(19) United States
(12) Patent Application Publication
(10) Pub. No.: US 2007/0072175 A1
(43) Pub. Date: Mar. 29, 2007

(54) Nucleotide array containing polynucleotide probes complementary to, or fragments of, cynomolgus monkey genes and the use thereof

(75) Inventors: Matthew T. Cooper, Palo Alto, CA (US); Deborah Kinch, Boston, MA (US); Michael Rosenberg, Issaquah, WA (US); S. Sai Subramaniam, Sharon, MA (US); Suzanne T. Szak, Arlington, MA (US); Huo Li, Winchester, MA (US); Raj Bandaru, Malden, MA (US); Maher Derbel, Arlington, MA (US)

Correspondence Address: STERNE, KESSLER, GOLDSTEIN & FOX, P.L.L.C., 1100 NEW YORK AVE., N.W., WASHINGTON, DC, 20005, US

(73) Assignee: Biogen Idec MA Inc., Cambridge, MA (US)

(21) Appl. No.: 11/433,832

(22) Filed: May 15, 2006

Related U.S. Application Data
(60) Provisional application No. 60/680,473, filed on May 13, 2005.
(60) Provisional application No. 60/680,544, filed on May 13, 2005.

(51) Int. Cl. C12Q 1/70; C12Q 1/68; C12M 3/00

(52) U.S. Cl. 435/5; 435/6; 435/287.2

(57) ABSTRACT

This invention relates to a nucleotide array containing polynucleotide probes complementary to, or fragments of, Cynomolgus monkey genes, and the use of such a nucleotide array to characterize the biological effects, including the actions, targets, and toxicities, of therapeutic agents in primates, e.g., a human, a Cynomolgus monkey, or a Rhesus monkey, in particular a nucleotide array to be used in identifying the toxicities of therapeutic agents administered to a non-human primate, e.g., a Cynomolgus monkey or a Rhesus monkey.

### CROSS-REFERENCE TO RELATED APPLICATION

[0001] This application claims the benefit of U.S. Provisional Patent Application Nos. 60/680,473, filed May 13, 2005, and 60/680,544, filed May 13, 2005, herein incorporated by reference.

### REFERENCE TO A SEQUENCE LISTING AND TABLES SUBMITTED ON A COMPACT DISC

[0002] This application includes a “Sequence Listing” and Table 2 which are provided as electronic documents on a compact disk (CD-R). This compact disk contains the files “Sequence_Listing.txt” (59,586,560 bytes, created on May 15, 2006) and “Table 2.txt” (2,095,104 bytes, created on May 15, 2006), which are hereby incorporated by reference in their entirety.

### BACKGROUND OF THE INVENTION

[0003] 1. Field of the Invention

[0004] A device and/or method that may be used to characterize the biological effects, including the actions, targets, and toxicities, of a therapeutic agent on a primate, e.g., a human, a Cynomolgus monkey or a Rhesus monkey, especially a non-human primate such as a Cynomolgus monkey or a Rhesus monkey, quickly and accurately would be useful in identifying which therapeutic agents warrant further development.

[0005] This invention relates to a nucleotide array containing polynucleotide probes complementary to, or fragments of, any portion of a Cynomolgus monkey gene, and the use of such a nucleotide array, to characterize the actions, targets, and toxicities of therapeutic agents in primates, e.g., a human, a Cynomolgus monkey or a Rhesus monkey, in particular a nucleotide array to be used in identifying the toxicities of therapeutic agents in a non-human primate such as a Cynomolgus or a Rhesus monkey.

[0006] 2. Background

[0007] Drug discovery, a process by which bioactive compounds are identified and preliminarily characterized, is a critical step in the development of treatments for human diseases. Knowledge of all the primary targets of a therapeutic agent is necessary in understanding efficacy, side-effects, toxicities, possible failures of efficacy, and activation of metabolic responses. Further, the identification of all primary targets of a drug can lead to discovery of alternative primary targets suitable to achieve the original therapeutic response.

[0008] One phase of the drug discovery process involves utilizing animal studies to determine the toxicity of a therapeutic agent, such as in studies conducted in non-human primates, e.g., Cynomolgus or Rhesus monkeys. Toxicity analysis of therapeutic agents is often the rate-limiting step in the development of new pharmaceutical compounds. J. F. Waring et al. Toxicology Letters 120:359-368 (2001). Therefore, characterizing the effects of a therapeutic agent on the cellular metabolism of a non-human primate, e.g., a Cynomolgus or a Rhesus monkey, quickly and accurately would be useful in identifying which therapeutic agents warrant further development.

[0009] Microfabricated arrays of large numbers of polynucleotide probes, called “nucleotide arrays,” “DNA chips,” or “gene chips,” may be used to identify the primary targets of a therapeutic agent.

[0010] Currently available nucleotide arrays are based upon bovine, canine, human, mouse, and rat gene sequences. However, there is not an available nucleotide array based upon a non-human primate, e.g., a Cynomolgus or a Rhesus monkey, gene sequences that may be utilized in investigating the biological effects, including the actions, targets, and toxicities, of a therapeutic agent in primates, e.g., a human, a Cynomolgus monkey, or a Rhesus monkey.

[0011] Nucleotide arrays are used to detect complementary nucleic acid sequences in a nucleic acid of interest. In some assay formats, the polynucleotide probe is tethered, i.e., by covalent attachment, to a solid support, and arrays of polynucleotide probes immobilized on solid supports have been used to detect specific nucleic acid sequences in a target nucleic acid. See, e.g., PCT publication Nos. WO 89/10977 and WO 89/11548.

[0012] There is a need for improved (e.g., faster, less expensive, and more accurate) methods for characterizing the actions, targets, and toxicities of therapeutic agents in non-human primates, e.g., Cynomolgus and Rhesus monkeys during the therapeutic agent development stage.

[0013] The present invention provides a nucleotide array containing polynucleotide probes complementary to, or fragments of, any portion of a Cynomolgus monkey gene that may be used to rapidly and efficiently analyze the biological effects, including the actions, targets, and toxicities, of therapeutic agents in primates, e.g., a human, a Cynomolgus monkey or a Rhesus monkey. In one embodiment, the present invention provides a nucleotide array containing polynucleotide probes complementary to, or fragments of, any portion of a Cynomolgus monkey gene that may be used to rapidly and efficiently analyze the biological effects, including the actions, targets, and toxicities, of therapeutic agents in a non-human primate, e.g., a Cynomolgus monkey or a Rhesus monkey.

[0014] The present invention provides a nucleotide array containing polynucleotide probes complementary to, or fragments of, any portion of a Cynomolgus monkey gene, as well as polynucleotide probes complementary to, or fragments of, any portion of a Rhesus monkey gene, that may be used to rapidly and efficiently analyze the biological effects, including the actions, targets, and toxicities, of therapeutic agents in primates, e.g., a human, a Cynomolgus monkey, or a Rhesus monkey. In one embodiment, the present invention provides a nucleotide array containing polynucleotide probes complementary to, or fragments of, any portion of a Cynomolgus monkey gene, as well as polynucleotide probes complementary to, or fragments of, any portion of a Rhesus monkey gene, that may be used to rapidly and efficiently analyze the biological effects, including the actions, targets, and toxicities, of therapeutic agents in a non-human primate, e.g., a Cynomolgus monkey or a Rhesus monkey.

[0015] The present invention provides a nucleotide array containing polynucleotide probes complementary to, or fragments of, any portion of a Cynomolgus monkey gene and polynucleotide probes complementary to, or fragments of, any portion of a Rhesus monkey gene, as well as polynucleotide probes complementary to, or fragments of, any portion of a human gene, that may be used to rapidly and efficiently analyze the biological effects, including the actions, targets, and toxicities, of therapeutic agents in primates, e.g., a human, a Cynomolgus monkey, or a Rhesus monkey. In one embodiment, the present invention provides a nucleotide array containing polynucleotide probes complementary to, or fragments of, any portion of a Cynomolgus monkey gene and polynucleotide probes complementary to, or fragments of, any portion of a Rhesus monkey gene, as well as polynucleotide probes complementary to, or fragments of, any portion of a human gene, that may be used to rapidly and efficiently analyze the biological effects, including the actions, targets, and toxicities, of therapeutic agents in a non-human primate, e.g., a Cynomolgus monkey or a Rhesus monkey.

### BRIEF SUMMARY OF THE INVENTION

[0016] One aspect of the invention relates to a nucleotide array to be used in assaying gene expression upon administration of a therapeutic agent to a primate, e.g., a human, a Cynomolgus monkey, or a Rhesus monkey, especially to a non-human primate such as a Cynomolgus or a Rhesus monkey, wherein the nucleotide array comprises at least one polynucleotide probe complementary to, or a fragment of, any portion of a Cynomolgus monkey gene, such that each polynucleotide probe is immobilized to a discrete and known spot on a substrate surface. Additionally, the nucleotide array may contain at least one polynucleotide probe complementary to, or a fragment of, any portion of a member of a subset of Cynomolgus monkey genes, wherein the members of the subset are orthologs of known human genes. Furthermore, the nucleotide array may contain at least one polynucleotide probe complementary to, or a fragment of, any portion of a member of a subset of Cynomolgus monkey genes, wherein the members of the subset are homologs of known human Tox genes.

[0017] Another aspect of the invention relates to a nucleotide array to be used in assaying gene expression upon administration of a therapeutic agent to a primate, e.g., a human, a Cynomolgus monkey or a Rhesus monkey, especially to a non-human primate such as a Cynomolgus monkey or a Rhesus monkey, wherein the nucleotide array comprises at least one polynucleotide probe complementary to, or a fragment of, any portion of a Cynomolgus monkey gene and at least one polynucleotide probe complementary to, or a fragment of, any portion of a Rhesus monkey gene, such that each polynucleotide probe is immobilized to a discrete and known spot on a substrate surface. Additionally, the nucleotide array may contain at least one polynucleotide probe complementary to, or a fragment of, any portion of a member of a subset of Cynomolgus monkey genes, and optionally at least one polynucleotide probe complementary to, or a fragment of, any portion of a member of a subset of Rhesus monkey genes, wherein the members of the subsets are orthologs of known human genes. Furthermore, the nucleotide array may contain at least one polynucleotide probe complementary to, or a fragment of, any portion of a member of a subset of Cynomolgus monkey genes, and optionally a polynucleotide probe complementary to, or a fragment of, any portion of a member of a subset of Rhesus monkey genes, wherein the members of the subsets are homologs of known human Tox genes.

[0018] A third aspect of the invention relates to a nucleotide array to be used in assaying gene expression upon administration of a therapeutic agent to a primate, e.g., a human, a Cynomolgus monkey or a Rhesus monkey, especially to a non-human primate such as a Cynomolgus monkey or a Rhesus monkey, wherein the nucleotide array comprises at least one polynucleotide probe complementary to, or a fragment of, any portion of a Cynomolgus monkey gene and at least one polynucleotide probe complementary to, or a fragment of, any portion of a human gene, such that each polynucleotide probe is immobilized to a discrete and known spot on a substrate surface. Additionally, the nucleotide array may contain at least one polynucleotide probe complementary to, or a fragment of, any portion of a member of a subset of Cynomolgus monkey genes wherein the members of the subset are orthologs of known human genes. Furthermore, the nucleotide array may contain at least one polynucleotide probe complementary to, or a fragment of, any portion of a member of a subset of Cynomolgus monkey genes wherein the members of the subset are homologs of known human Tox genes. Optionally, the nucleotide array may contain at least one polynucleotide probe complementary to, or a fragment of, any portion of a human Tox genes.

[0019] A fourth aspect of the invention relates to a nucleotide array to be used in assaying gene expression upon administration of a therapeutic agent to a primate, e.g., a human, a Cynomolgus monkey, or a Rhesus monkey, especially to a non-human primate, e.g., a Cynomolgus monkey or a Rhesus monkey, wherein the nucleotide array comprises at least one polynucleotide probe complementary to, or a fragment of, any portion of a Cynomolgus monkey gene, at least one polynucleotide probe complementary to, or a fragment of any portion of a Rhesus monkey gene, and at least one polynucleotide probe complementary to, or a fragment of, any portion of a human gene, such that each polynucleotide probe is immobilized to a discrete and known spot on a substrate surface. Additionally, the nucleotide array may contain at least one polynucleotide probe complementary to, or a fragment of, any portion of a member of a subset of Cynomolgus monkey genes, and optionally at least one polynucleotide probe complementary to, or a fragment of, any portion of a member of a subset of Rhesus monkey genes, wherein the members of the subsets are orthologs of known human genes. Furthermore, the nucleotide array may contain at least one polynucleotide probe complementary to, or a fragment of, any portion of a member of a subset of Cynomolgus monkey genes, wherein the members are homologs of known human Tox genes. Optionally, the nucleotide array may contain at least one polynucleotide probe complementary to, or a fragment of, any portion of a human Tox genes and/or at least one polynucleotide probe complementary to, or a fragment of, any portion of a member of a subset of Rhesus monkey genes, wherein the members of the subset are homologs of known human Tox genes.

[0020] A fifth aspect of the invention relates to a method for identifying biomarkers upon administration of a therapeutic agent comprising administering the therapeutic agent to a primate, e.g., a human, a Cynomolgus monkey, or a Rhesus monkey, especially to a non-human primate such as a Cynomolgus monkey or a Rhesus monkey, isolating the RNA from a biological sample from the non-human primate to yield a test sample, and hybridizing the test sample with a nucleotide array containing at least one polynucleotide probe complementary to, or a fragment of, any portion of a Cynomolgus monkey gene. Optimally, the RNA from the test sample may be amplified prior to hybridization with the polynucleotide probe of the nucleotide array. According to this method, biomarkers are detected as an increased hybridization signal intensity, as compared with genes that are not affected upon administration of the therapeutic agent.

[0021] A sixth aspect of the invention relates to a method for detecting changes in gene expression upon administration of a therapeutic agent comprising administering the therapeutic agent to a primate, e.g., a human, a Cynomolgus monkey, or a Rhesus monkey, especially to a non-human primate such as a Cynomolgus monkey or a Rhesus monkey, isolating the RNA from a biological sample from the non-human primate to yield a test sample, and hybridizing the test sample with a nucleotide array containing at least one polynucleotide probe complementary to, or a fragment of, any portion of a Cynomolgus monkey gene. Optimally, the RNA from the test sample may be amplified prior to hybridization with the polynucleotide probe of the nucleotide array. According to this method, changes in gene expression are detected as alterations in the hybridization pattern for the test sample from the primate administered the therapeutic agent, as compared with the hybridization pattern for the control sample obtained from a primate that was not administered the therapeutic agent.

[0022] A seventh aspect of the invention relates to a method for identifying the targets of a therapeutic agent and/or determining the effects of a therapeutic agent on a primate, e.g., a human, a Cynomolgus monkey, or a Rhesus monkey, especially a non-human primate such as a Cynomolgus monkey or a Rhesus monkey, comprising administering the therapeutic agent to the primate of interest, isolating the RNA from a biological sample from the primate to yield a test sample, and hybridizing the test sample with a nucleotide array containing at least one polynucleotide probe complementary to, or a fragment of, any portion of a Cynomolgus monkey gene. Optimally, the RNA from the test sample may be amplified prior to hybridization with the polynucleotide probe of the nucleotide array. According to this method, the targets of a therapeutic agent and/or the effects of the therapeutic agent on the cellular metabolism are detected as alterations in the hybridization pattern for the test sample from the primate administered the therapeutic agent, as compared with the hybridization pattern for the control sample from a primate that was not administered the therapeutic agent.

[0023] An eighth aspect of the invention relates to a method of determining whether a specific gene is a target of a therapeutic agent comprising administering the therapeutic agent to a primate, e.g., a human, a Cynomolgus monkey, or a Rhesus monkey, especially to a non-human primate such as a Cynomolgus monkey or a Rhesus monkey, isolating the RNA from a biological sample of the primate to yield a test sample, and hybridizing the test sample with a nucleotide array containing at least one polynucleotide probe complementary to, or a fragment of, any portion of a Cynomolgus monkey gene. Optimally, the RNA from the test sample may be amplified prior to hybridization with the polynucleotide probe of the nucleotide array. According to this method, whether a specific gene is a target of a therapeutic agent is determined by observing the changes in the hybridization pattern for the test sample from the primate administered the therapeutic agent, as compared with the hybridization pattern for the control sample from a primate that was not administered the therapeutic agent.

[0024] A ninth aspect of the invention relates to a method of determining whether a putative target of a therapeutic agent is an actual target of a therapeutic agent comprising administering the therapeutic agent to a primate, e.g., a human, a Cynomolgus monkey, or a Rhesus monkey, especially to a non-human primate such as a Cynomolgus monkey or a Rhesus monkey, isolating the RNA from a biological sample of the primate to yield a test sample, and hybridizing the test sample with a nucleotide array containing at least one polynucleotide probe complementary to, or a fragment of, any portion of a Cynomolgus monkey gene. Optimally, the RNA from the test sample may be amplified prior to hybridization with the polynucleotide probe of the nucleotide array. According to this method, whether a putative drug target is an actual drug target is determined by observing the changes in the hybridization pattern for the test sample from the primate administered the therapeutic agent, as compared with the hybridization pattern for the control sample from a primate that was not administered the therapeutic agent.

[0025] A tenth aspect of the invention relates to a method of determining a more target-specific therapeutic agent from an initial therapeutic agent comprising: (a) determining the targets of the initial therapeutic agent by administering the therapeutic agent to a primate, e.g., a human, a Cynomolgus monkey, or a Rhesus monkey, especially to a non-human primate such as a Cynomolgus monkey or a Rhesus monkey, isolating the RNA from a biological sample from the primate to yield a test sample, and hybridizing the test sample with a nucleotide array containing at least one polynucleotide probe complementary to, or a fragment of, any portion of a Cynomolgus monkey gene; (b) modifying the structure of the initial therapeutic agent; and (c) determining the targets of the modified initial therapeutic agent by administering the therapeutic agent to a primate, e.g., a human, a Cynomolgus monkey, or a Rhesus monkey, especially to a non-human primate such as a Cynomolgus monkey or a Rhesus monkey, isolating the RNA from a biological sample from the primate to yield a test sample, and hybridizing the test sample with a nucleotide array containing at least one polynucleotide probe complementary to, or a fragment of, any portion of a Cynomolgus monkey gene. Optimally, the RNA from the test sample may be amplified prior to hybridization with the polynucleotide probe of the nucleotide array.

[0026] An eleventh aspect of the invention relates to a method of identifying single nucleotide polymorphisms comprising isolating the RNA from a biological sample of a primate, e.g., a human, a Cynomolgus monkey, or a Rhesus monkey, especially to a non-human primate such as a Cynomolgus monkey or a Rhesus monkey, to yield a test sample, and hybridizing the test sample with a nucleotide array containing at least one polynucleotide probe complementary to, or a fragment of, any portion of a Cynomolgus monkey gene. Optimally, the RNA from the test sample may be amplified prior to hybridization with the polynucleotide probe of the nucleotide array. According to this method, a single nucleotide polymorphism would be identified by observing the decreases in intensity of the hybridization pattern for a primate that has a single nucleotide polymorphism as compared with the intensity of the hybridization pattern for a primate without the single nucleotide polymorphism.

[0027] A twelfth aspect of the invention relates to a method of normalizing data comprising (a) determining the signal intensity of the hybridized complex between the test or control sample and a polynucleotide probe that is complementary to, or a fragment of, a Cynomolgus monkey gene that is known not to be up- or down-regulated upon administration of a specific therapeutic agent; (b) averaging the signal intensity of the specific hybridized complex on different nucleotide arrays; (c) determining the ratio between the average signal intensity of the specific hybridized complex on all of the nucleotide arrays and the signal intensity of the specific hybridized complex on the nucleotide array of interest; and (d) adjusting the signal intensities of the hybridized complexes between the other hybridized complexes on the nucleotide array based upon the calculated ratio.

[0028] A thirteenth aspect of the invention relates to an in vitro system utilizing a nucleotide array containing a polynucleotide probe that is complementary to, or a fragment of, any portion of a Cynomolgus monkey gene. The gene expression upon exposure of a therapeutic agent to an isolated cell line may be assayed by exposing the therapeutic agent to a cell line isolated from a primate, e.g., a cell line isolated from a human, a cell line isolated from a Cynomolgus monkey, or a cell line isolated from a Rhesus monkey, especially a cell line isolated from a non-human primate such as a Cynomolgus monkey or a Rhesus monkey, isolating the RNA from the cell line to yield a test sample, and hybridizing the test sample with the nucleotide array of interest. In one embodiment, the changes in gene expression are detected by comparing the hybridization pattern of the nucleotide array exposed to the test sample of a cell line from a primate exposed to a therapeutic agent with the hybridization pattern of a nucleotide array exposed to the control sample of a cell line from a primate that was not exposed to a therapeutic agent.

### DETAILED DESCRIPTION OF THE INVENTION

Terminology

[0029] As used herein, the term “gene” refers to a deoxyribonucleic acid (“DNA”) sequence comprising several operably linked DNA fragments such as a promoter region, a 5′ untranslated region (“5′UTR”), a coding region (which may or may not code for a protein), and an untranslated 3′ region (“3′UTR”) comprising a polyadenylation site. Typically, the 5′UTR, the coding region and the 3′UTR are transcribed into a ribonucleoprotein (“RNA”) of which, in the case of a protein encoding gene, the coding region is translated into a protein. A gene may include additional DNA fragments such as, for example, introns.

[0030] As used herein, the term “nucleic acid” or “nucleic acid molecule” refers to a polymeric form of nucleotides of any length, either ribonucleotides or deoxyribonucleotides, in either single- or double-stranded from, and that comprise purine and pyrimidine bases, or other natural, chemically or biochemically modified, non-natural, or derivatized nucleotide bases. The backbone of the polynucleotide can comprise sugars and phosphate groups, as may typically be found in RNA or DNA, or modified or substituted sugar or phosphate groups. A polynucleotide may comprise modified nucleotides, such as methylated nucleotides and nucleotide analogs. The sequence of nucleotides may be interrupted by non-nucleotide components.

[0031] As used herein, the terms “polynucleotide probe” or “polynucleotide probes” refers to an oligodeoxyribonucleotide or oligoribonucleotide, or any modified form of these polymers that are capable of hybridizing with a target nucleic acid sequence by complementary base-pairing. Complementary base pairing means sequence-specific base pairing that includes e.g., Watson-Crick base pairing as well as other forms of base pairing such as Hoogsteen base pairing. Modified forms include 2′-O-methyl oligoribonucleotides and so-calls PNAs, in which oligodeoxyribonucleotides are linked via peptide bonds rather than phosphodiester bonds.

[0032] As used herein, the term “nucleotide array” refers to a multiplicity of different polynucleotide probes attached (preferably through a single terminal covalent bond) to one or more solid supports where, when there is a multiplicity of supports, each support bears a multiplicity of polynucleotide probes. The term “nucleotide array” can refer to the entire collection of polynucleotide probes on the support(s) or to a subset thereof. The spatial distribution of the polynucleotide probes may differ between two or more nucleotide arrays, but in a preferred embodiment, the spatial distribution is substantially the same. It is recognized that even where two nucleotide arrays are designed and synthesized to be identical there are variations in the abundance, composition, and distribution of the polynucleotide probes. These variations are preferably insubstantial and/or compensated for by the use of controls.

[0033] As used herein, the term “complementary to” refers to sequence that will form specific base pairing that includes e.g., Watson-Crick base pairing as well as other forms of base pairing such as Hoogsteen base pairing, with a nucleic acid of interest.

[0034] As used herein, the term “fragment of” refers to an oligodeoxyribonucleotide, oligoribonucleotide, a DNA, RNA, or other nucleic acid molecule or any modified form of these polymers, wherein the polymer is shorter than the full-length gene of interest, wherein these polymers are capable of hybridizing with a target nucleic acid sequence by complementary base pairing. Complementary base pairing means sequence-specific base pairing that includes e.g., Watson-Crick base pairing as well as other forms of base pairing such as Hoogsteen base pairing. Modified forms include 2′-O-methyl oligoribonucleotides and so-called PNAs, in which oligodeoxyribonucleotides are linked via peptide bonds rather than phosphodiester bonds. Examples of suitable lengths of the fragment may include, but not limited to, about 100 nucleotides in length, about 10 to about 50 nucleotides in length, about 15 to about 45 nucleotides in length, about 20 to about 40 nucleotides in length, about 20 to about 35 nucleotides in length, about 20 to about 30 nucleotides in length, about 22 to about 27 nucleotides in length, or about 25 nucleotides in length.

[0035] As used herein, the term “primate” refers to a mammal that falls within the human, ape or monkey family and includes, but is not limited to, a human, a baboon, a chimpanzee, a capuchin, a pigtail macaque, a sooty mangabey, a squirrel monkey, a gibbon, a Rhesus monkey, a Cynomolgus monkey, a gorilla, an orangutan, and any other ape or monkey species.

[0036] As used herein, the term “non-human primate” refers to a mammal that falls within the ape or monkey family and includes, but is not limited to, a baboon, a chimpanzee, a capuchin, a pigtail macaque, a sooty mangabey, a squirrel monkey, a gibbon, a Rhesus monkey, a Cynomolgus monkey, a gorilla, an orangutan, and any other ape or monkey species.

[0037] As used herein, the terms “therapeutic agent” or “therapeutic agents” refers to any compounds which have an effect on a cell or tissue. The therapeutic agent need not have any proven therapeutic benefit. Therapeutic agents include: typical small molecules of research or therapeutic interest; naturally-occurring factors, such as proteins, including antibodies, receptors, ligands, endocrine, paracrine, or autocrine factors or factors interacting with cell receptors of all types; intracellular factors, such as elements of intracellular signaling pathways; and factors isolated from other natural sources, such as carbohydrates, e.g., sugars, and lipids.

[0038] As used herein, the term “biological sample” refers to any blood or tissue sample obtained from a primate, e.g., a human, a Cynomolgus monkey, or a Rhesus monkey, including but not limited to, samples obtained from the liver, lung, lymph node, kidney, bone marrow, thymus, heart, kidney, spleen, brain, or serum.

[0039] As used herein, the term “test sample” refers to total cellular RNA directly isolated from, including mRNA, or a nucleic acid complementary to, or a fragment of, the RNA isolated from, a biological sample obtained from a primate, e.g., a human, a Cynomolgus monkey or a Rhesus monkey, especially from a non-human primate such as a Cynomolgus monkey or a Rhesus monkey, administered a therapeutic agent. Alternatively, the test sample may be either total cellular RNA directly isolated from, including mRNA, or a nucleic acid complementary to, or a fragment of, the RNA isolated from, a biological sample obtained from a primate, e.g., a human, a Cynomolgus monkey, or a Rhesus monkey, especially from a non-human primate such as a Cynomolgus monkey or a Rhesus monkey, that has a single nucleotide polymorphism. The difference in usage will be apparent from the context.

[0040] The test sample includes, but is not limited to isolated RNA, including mRNA, a cDNA reverse transcribed from the isolated RNA, an RNA transcribed from the cDNA, a DNA amplified from the cDNA, and an RNA transcribed from the amplified DNA.

[0041] As used herein, the term “control sample” refers to the total cellular RNA directly isolated from, including mRNA, or a nucleic acid complementary to, or a fragment of, the RNA isolated from, a biological sample obtained from a primate, e.g., a human, a Cynomolgus monkey, or a Rhesus monkey, especially from a non-human primate such as a Cynomolgus monkey or Rhesus monkey, that was not administered a therapeutic agent. Alternatively, the control sample may be either the total cellular RNA directly isolated from, including mRNA, or a nucleic acid complementary to, or a fragment of, the RNA isolated from, a biological sample obtained from a primate, e.g., a human, a Cynomolgus monkey, or a Rhesus monkey, especially from a non-human primate such as a Cynomolgus monkey or a Rhesus monkey that lacks the single nucleotide polymorphism. The difference in usage will be apparent from the context.

[0042] The control sample includes, but is not limited to isolated RNA, including mRNA, a cDNA reverse transcribed from the isolated RNA, an RNA transcribed from the cDNA, a DNA amplified from the cDNA, and an RNA transcribed from the amplified DNA.

[0043] As used herein, the term “homolog” refers to a gene that is related to a second gene by descent from a common ancestral sequence. The term may apply to the relationship between genes of two different species that have the same function. Additionally, the term may apply to genes, within the same species, that are related through genetic duplication, but have different functions.

[0044] As used herein, the term “homologous” refers to the relationship between two species wherein one gene is related to a second gene by descent from a common ancestral sequence. The term may apply to the relationship between genes of two different species that have the same function. Additionally, the term may apply to the relationship between genes that are related through genetic duplication but have different functions.

[0045] As used herein, the term “ortholog” refers to that subset of homologous genes which encompasses a gene in two different species that evolved from a common ancestor that has the same function in both species.

[0046] As used herein, the term “expressed sequence tags” (“ESTs”) encompasses pieces of DNA that are a copy of the gene that is expressed. ESTs may be a copy of either the 5′ or 3′ end of the gene. ESTs may be prepared by reverse transcribing mRNA that was isolated from a tissue and then inserting the reverse transcription product into a vector. Generally, ESTs are about 200 to about 750 nucleotides long.

[0047] The term “target nucleic acid” refers to a nucleic acid to which a polynucleotide probe is designed to specifically hybridize. It is either the presence or absence of the target nucleic acid that is to be detected, or the amount of the target nucleic acid that is to be quantified utilizing a nucleotide array of the present invention. The target nucleic acid has a sequence that is complementary to, or is a fragment of, the nucleic acid sequence of the corresponding polynucleotide probe directed to the target nucleic acid. The term target nucleic acid may refer to the specific subsequence of a larger nucleic acid to which the polynucleotide probe is directed or to the overall sequence (e.g., gene or RNA) whose expression level it is desired to detect. The difference in usage will be apparent from context.

[0048] As used herein, the term “mismatch control” or “mismatch controls” refers to a polynucleotide probe that has a sequence deliberately selected not to be perfectly complementary to, or is a fragment of, a particular target nucleic acid. The mismatch control typically has a corresponding test polynucleotide probe that is perfectly complementary to, or is a fragment of, the sequence of the same particular target nucleic acid except for the presence of one or more mismatched bases. A mismatched base is a base selected so that it is not complementary to, or is not a fragment of, the corresponding base in the sequence of the target nucleic acid to which the polynucleotide probe would otherwise specifically hybridize. One or more mismatches are selected such that under appropriate hybridization conditions (e.g., stringent conditions), the test or control polynucleotide probe would be expected to hybridize with its target nucleic acid, but the mismatch polynucleotide probe would not hybridize (or would hybridize to a significantly lesser extent). In one embodiment, the mismatch polynucleotide probe would contain a central mismatch. Thus, for example, where a polynucleotide probe contains 20 nucleotides, a corresponding mismatch polynucleotide probe will have the identical sequence except for a single mismatch base (e.g., substituting a G, a C, or a T for an A) at any of positions 6 through 14 (the central mismatch).

[0049] As used herein, the term “normalization control” or “normalization controls” refers to a polynucleotide probe that has a sequence deliberately selected to be to perfectly complementary to, or is a fragment of, a labeled target nucleic acid added to the test or control sample. The signals obtained from the normalization controls after hybridization provide a control for variations in hybridization conditions, label intensity, “reading” efficiency, and other factors that may cause the signal of a perfect hybridization to vary between nucleotide arrays. In one embodiment, signals (e.g., fluorescence intensity) read from all other polynucleotide probes in the nucleotide array are divided by the signal (e.g., fluorescence intensity) from the control polynucleotide probes, thereby normalizing the measurements.

[0050] As used herein, the term “expression level control” or “expression level controls” refers to a polynucleotide probe that has a sequence deliberately selected to be perfectly complementary to, or is a fragment of, a constitutively expressed gene in the test sample. Expression level controls are designed to control for the overall health and metabolic activity of a cell. Examination of the covariance of an expression level control with the expression level of the target nucleic acid indicates whether measured changes or variations in expression level of a gene is due to changes in transcription rate of that gene or to general variations in health of the cell. Thus, for example, when a cell is in poor health, or lacking a critical metabolite, the expression levels of both an active gene and a constitutively expressed gene are expressed to decrease. The converse is also true. Thus, where the expression levels of both an expression level control and the gene appear to both decrease or to both increase, the change may be attributed to changes in the metabolic activity of the cell as a whole, not to differential expression of the gene in question. Conversely, where the expression levels of the gene and the expression level control do not covary, the variation in the expression level of the gene is attributed to differences in regulation of that gene and not to variations in the metabolic activity of the cell.

[0051] As used herein, the term “sample preparation/amplification control” or “sample preparation/amplification controls” refers to a polynucleotide probe that is complementary to, or is a fragment of, subsequences of control genes selected because they do not normally occur in the nucleic acids of the particular biological sample being assayed. Suitable sample preparation/amplification controls include, for example, polynucleotide probes to bacterial genes (e.g., Bio B).

[0052] The term “solid support,” “support,” or “substrate” refer to a material or group of materials having a rigid or semi-rigid surface or surfaces. In many embodiments, at least one surface of the solid support will be substantially flat, although in some embodiments it may be desirable to physically separate synthesis regions for different compounds with, for example, wells, raised regions, pins, etched trenches, or the like. According to other embodiments the solid support(s) will take the form of beads, resins, gels, microspheres, or other geometric configurations.

[0053] Examples of suitable substrates include, but are not limited to, silicon or glass. The silicon or glass substrate may have the thickness of a microscope slide or glass cover slip. Substrates that are transparent to light are useful when the assay involves optical detection. Other useful substrates include Langmuir Blodgett film, germanium, (poly)tetrafluorethylene, polystyrene, (poly)vinylidenedifluoride, polycarbonate, gallium arsenide, gallium phosphide, silicon oxide, silicon dioxide, silicon nitride, and combinations thereof.

[0054] As used herein, the term “background,” “background signal,” or “background signals” refers to the hybridization signal resulting from non-specific binding, or other interactions, between a labeled target nucleic acid and components of a nucleotide array (e.g., the polynucleotide probes, mismatch controls, or the nucleotide array support). Background signals may also be produced by intrinsic fluorescence of the nucleotide array components themselves. A single background signal can be calculated for the entire nucleotide array, or a different background signal may be calculated for each target nucleic acid. In one embodiment, background is calculated as the average hybridization signal intensity for the lowest 5% to 10% of the polynucleotide probes in the nucleotide array. Of course, a person of ordinary skill in the art will appreciate that where the polynucleotide probes hybridize well, and thus appear to be specifically binding to a target nucleic acid, those polynucleotide probes should not be used in a background signal calculation. Alternatively, background may be calculated as the average hybridization signal intensity produced by hybridization to polynucleotide probes that are not complementary to, or are not fragments of, any sequence found in the test or control sample (e.g. polynucleotide probes directed to nucleic acids of the opposite sense or to genes not found in the test or control sample, such as bacterial genes). Background may also be calculated as the average signal intensity produced by regions of the nucleotide array that lack any polynucleotide probes at all.

[0055] As used herein, the term “hybridizing specifically to” refers to the binding, duplexing, or hybridizing of a nucleic acid only to a particular polynucleotide probe under stringent conditions when that nucleic acid is present in either the test or control sample.

[0056] As used herein, the term “stringent conditions” refers to conditions under which a polynucleotide probe will hybridize to its target nucleic acid, but to no other nucleic acids. Stringent conditions are sequence-dependent and will be different in different circumstances. Longer polynucleotide probes hybridize specifically at higher temperatures. Generally, stringent conditions are selected to be about 5° C. lower than the thermal melting point (“Tₘ”) for the specific polynucleotide probes at a defined ionic strength and pH.

[0057] As used herein, “Tₘ” is the temperature (under defined ionic strength, pH, and nucleic acid concentration) at which 50% of the polynucleotide probes complementary to, or fragments of, the sequences of the target nucleic acid hybridize to the target nucleic acid at equilibrium. Because the target nucleic acids are generally present in excess, at Tₘ, 50% of the polynucleotide probes are occupied at equilibrium. Typically, stringent conditions will be those in which the salt concentration is at least about 0.01 to 1.0 M Na ion concentration (or other salts), pH 7.0 to 8.3, and a temperature of at least about 30° C. for short polynucleotide probes (e.g., 10 to 50 nucleotides). Stringent conditions may also be achieved with the addition of destabilizing agents, such as formamide or tetralkyl ammonium salts.

[0058] As used herein, the term “perfectly matched polynucleotide probe” or “perfectly matched polynucleotide probes” refers to a nucleic acid that has a sequence perfectly complementary to, or is a fragment of, the sequence of a particular target nucleic acid. Such a polynucleotide probe is typically perfectly complementary to, or is a fragment of, a portion (subsequence) of the target nucleic acid.

[0059] As used herein, the term “polymorphic marker” or “polymorphic site” is the locus at which divergence occurs. Preferred polymorphic markers have at least two alleles, each occurring at frequency of greater than 1%, and more preferably greater than 10% or 20% of a selected population. A polymorphic locus may be as small as one base pair. Polymorphic markers include restriction fragment length polymorphisms, variable number of tandem repeats (VNTR's), hypervariable regions, minisatellites, dinucleotide repeats, trinucleotide repeats, tetranucleotide repeats, simple sequence repeats, and insertion elements such as Alu. The first identified allelic form is arbitrarily designated as a reference form and other allelic forms are designated as alternative or variant alleles. The allelic form occurring most frequently in a selected population is sometimes referred to as the wildtype form. Diploid organisms may be homozygous or heterozygous for allelic forms. A diallelic polymorphism has two forms. A triallelic polymorphism has three forms.

[0060] A single nucleotide polymorphism (“SNP”) occurs at a polymorphic site occupied by a single nucleotide, which is the site of variation between allelic sequences. The site is usually preceded by and followed by highly conserved sequences of the allele (e.g., sequences that vary in less than 1/100 or 1/1000 members of the populations).

[0061] A SNP usually arises due to substitution of one nucleotide for another at the polymorphic site. A transition is the replacement of one purine by another purine or one pyrimidine by another pyrimidine. A transversion is the replacement of a purine by a pyrimidine or vice versa. SNP's may also arise from a deletion of a nucleotide or an insertion of a nucleotide relative to a reference allele.

[0062] As used herein, the term “distinct” means that each row of the nucleotide array is separated by some physical distance.

[0063] As used herein, the term “immobilized” means that the polynucleotide probe is attached to a solid support, preferably covalently.

[0064] As used herein, the term “biomarker” or “marker” encompasses a broad range of intra- and extra-cellular events as well as whole-organism physiological changes. Biomarkers may be represent essentially any aspect of cell function, for example, but not limited to, levels or rate of production of signaling molecules, transcription factors, metabolites, gene transcripts as well as post-translational modifications of proteins. Biomarkers may include whole genome analysis of transcript levels or whole proteome analysis of protein levels and/or modifications.

[0065] A biomarker may also refer to a gene or gene product which is up- or down-regulated in a therapeutic agent-treated, diseased cell of a primate having the disease compared to an untreated diseased cell. That is, the gene or gene product is sufficiently specific to the treated cell that it may be used, optionally with other genes or gene products, to identify, predict, or detect efficacy of a small molecule. Thus, a biomarker is a gene or gene product that is characteristic of efficacy of a compound in a diseased cell or the response of that diseased cell to treatment by the compound.

[0066] Biomarkers may indicate whether a particular therapeutic agent may be toxic, may predict whether an individual primate will respond to a therapeutic agent, or whether a therapeutic agent will be efficacious.

[0067] The present invention provides a nucleotide array containing polynucleotide probes complementary to, or fragments of, any portion of a Cynomolgus monkey gene and a method of using such a nucleotide array to characterize the biological effects, including the actions, targets, and toxicities, of therapeutic agents in a primate, e.g., a human, a Cynomolgus monkey, or a Rhesus monkey, including identifying the targets of the therapeutic agents, improving lead compounds, and investigating the toxicities of therapeutic agents. In one embodiment, the present invention provides a nucleotide array containing polynucleotide probes complementary to, or fragments of, any portion of a Cynomolgus monkey gene and a method of using such a nucleotide array to characterize the biological effects, including the actions, targets, and toxicities, of therapeutic agents in a non-human primate, e.g., a Cynomolgus monkey or a Rhesus monkey, including identifying the targets of the therapeutic agents, improving lead compounds, and investigating the toxicities of therapeutic agents.

[0068] The biological effect of a therapeutic agent may be a consequence of, inter alia, therapeutic agent-mediated changes in the rate of transcription or degradation of one or more species of RNA, the rate or extent of translation or post-translational processing of a polypeptide, the rate or extent of protein degradation, and the inhibition or stimulation of protein action or activity.

[0069] The biological effects of a therapeutic agent are detected in the instant invention by measuring and/or observing the biological state of a cell or tissue exposed to the therapeutic agent or a metabolite of the therapeutic agent. The biological state of a cell is the state of a collection of cellular constituents that are sufficient to characterize the effects of a drug.

[0070] One aspect of the biological state of a cell or tissue that may be measured or observed in the present invention is the transcriptional state of a cell or tissue. The transcriptional state of a cell or tissue is the identities and abundances of the constituent RNA species, especially mRNAs, in the cell under a given set of conditions.

[0071] Administration of a therapeutic agent may affect the transcriptional state of a cell or tissue in a variety of ways. The administration of a therapeutic agent may result in a change, through direct or indirect effects, in the transcriptional state of a cell. In certain instances, the effect of the therapeutic agent may be either up- or down-regulation of the transcriptional state.

[0072] One reason that exposure to a therapeutic agent results in a change to the transcriptional state of a cell or tissue is that the feedback systems which react in a compensatory manner to administration of a therapeutic agent do so primarily by altering patterns of gene expression or transcription. Because the changes in the transcriptional state of a cell or tissue may be profound, this invention provides a method by which controlled measurements and/or observations of the biological state of a cell or tissue may be made to determine the effects or the direct targets of a therapeutic agent in a primate, e.g., a human, a Cynomolgus monkey, or a Rhesus monkey. In one embodiment, the measurements and/or observations of the effects of a therapeutic agent may be utilized to analyze the actions, targets, and toxicities of therapeutic agents in a non-human primate, e.g., a Cynomolgus monkey or a Rhesus monkey, and to thereby identify which therapeutic agents warrant further development, e.g., clinical testing in humans.

[0073] Generally, the methods of observing the biological effects of a therapeutic agent utilizing a nucleotide array involves preparing the nucleotide array, providing a pool of target nucleic acids comprising RNA transcripts, or nucleic acids complementary to, or fragments of, the RNA transcripts, from a test and/or control sample, hybridizing the test and/or control sample to the nucleotide array (including control polynucleotide probes) and detecting the hybridized nucleic acid complexes.

Nucleotide Array Design

[0074] A person of ordinary skill in the art will appreciate that a number of possible nucleotide array designs are suitable for the practice of this invention. The nucleotide array will typically include one or more polynucleotide probes that specifically hybridize to the target nucleic acid. In addition, the nucleotide array may optionally include one or more normalization controls, expression level controls, mismatch controls, and/or sample preparation/amplification controls.

1) Polynucleotide Probes

[0075] Certain polynucleotide probes incorporated onto a nucleotide array to be utilized in the methods of the present invention are complementary to, or fragments of, portions of ESTs of the Cynomolgus monkey. Additionally, a nucleotide array utilized in the methods of the present invention may optionally include polynucleotide probes complementary to, or fragments of, portions of ESTs of the Rhesus monkey. Furthermore, a nucleotide array that may be utilized in the methods of the present invention may optionally include polynucleotide probes complementary to, or fragments of, portions of human genes. Optionally, the nucleotide array may include fragments of Cynomolgus monkey, Rhesus monkey, and/or human genomic DNA.

[0076] Cynomolgus monkey ESTs were identified by isolating mRNA in the liver, lung, lymph node, kidney, bone marrow, thymus, heart, kidney, spleen, and brain. The isolated mRNAs were amplified using polymerase chain reaction (“PCR”) and then sequenced. The sequenced ESTs from Cynomolgus monkey were used to generate the polynucleotide probes to be immobilized to the nucleotide array. The sequences of the ESTs from Cynomolgus monkey are identified herein as SEQ ID NOS. 1-8881 and 9187-18598. Certain of SEQ ID NOS. 9187-18598, as indicated in the Sequence Listing, are orthologs of known human genes.

[0077] SEQ ID NOS 17249-18598, as indicated in the Sequence Listing, are Cynomolgus genes that are homologous to known human Tox genes. The human Tox genes have previously been identified as being activated in response to a toxic therapeutic agent. Therefore, a nucleotide array containing polynucleotide probes complementary to, or fragments of, any portion of SEQ ID NOS. 17249-18598 will be useful in exploring the toxicity of a therapeutic agent when administered to a non-human primate, e.g., a Cynomolgus or a Rhesus monkey.

[0078] Additionally, a nucleotide array to be utilized in the methods of the present invention may optionally include polynucleotide probes complementary to, or fragments of, any portion of an EST of the Rhesus monkey. Also, a nucleotide array to be utilized in the methods of the present invention may optionally include polynucleotide probes complementary to, or fragments of, any portion of a genomic sequence of the Rhesus monkey. The ESTs and genomic sequences from the Rhesus monkey used to generate the polynucleotide probes immobilized to the nucleotide array of the present invention are identified as SEQ ID NOS. 18599-35840 and SEQ ID NOS. 36075-43225. Certain of SEQ ID NOS. 18599-35840, as indicated in the Sequence Listing, are orthologs of known human genes.

[0079] SEQ ID NOS 18599-20526, as indicated in the Sequence Listing, are Rhesus genes that are homologous to known human Tox genes. The human Tox genes have been previously identified as being activated in response to a toxic therapeutic agent. Therefore, a nucleotide array containing polynucleotide probes complementary to, or fragments of, any portion of SEQ ID NOS. 18599-20526 will be useful in exploring the toxicity of a therapeutic agent when administered to a non-human primate, e.g., a Cynomolgus or a Rhesus monkey.

[0080] Furthermore, the nucleotide array to be utilized in the methods of the present invention may optionally include polynucleotide probes complementary to, or fragments of, any portion of a human gene. The human sequences used to generate the polynucleotide probes immobilized to the nucleotide array of the present invention are identified as SEQ ID NOS. 43450-48714.

[0081] The polynucleotide probes complementary to, or fragments of, any portion of SEQ ID NOS. 43450-48714 were selected to be complementary to, or fragments of, human genes in which no homologous genomic sequence has been identified in the Cynomolgus or Rhesus monkey.

[0082] Therefore, the polynucleotide probes identified as SEQ ID NOS. 8882-9186 and 35841-36074 and the polynucleotide probes complementary to, or fragments of, any portion of SEQ ID NOS. 1-8881, SEQ ID NOS. 9187-18598, SEQ ID NOS. 18599-35840 or SEQ ID NOS. 36075-43225 to be immobilized to the nucleotide array to be utilized in the methods of the present invention were selected to exhibit greater complementarity with both the Cynomolgus and Rhesus monkey genome, than seen with a nucleotide array using polynucleotide probes generated solely from human genomic sequences. The greater sequence complementarity will yield a more effective nucleotide array to examine the actions, targets, and toxicities of therapeutic agents in Cynomolgus or Rhesus monkey than a nucleotide array containing polynucleotide probes generated solely from human genomic sequences.

[0083] The polynucleotide probes to be included on the nucleotide array of the prevent invention, SEQ ID NOS. 8882-9186, SEQ ID NOS. 35841-36074, and/or SEQ ID NOS. 43226-43449, or polynucleotide probes that are complementary to, or fragments of, SEQ ID NOS. 1-8881, SEQ ID NOS. 9187-18598, SEQ ID NOS. 18599-35840, SEQ ID NOS. 36075-43225, and/or SEQ ID NOS. 43450-48714, may be oligodeoxyribonucleotides or oligoribonucleotides, or any modified forms of these polymers that are capable of hybridizing with a target nucleic sequence by complementary base-pairing. Complementary base pairing means sequence-specific base pairing which includes e.g., Watson-Crick base pairing as well as other forms of base pairing such as Hoogsteen base pairing. Modified forms include 2′-O-methyl oligoribonucleotides and so-called PNAs, in which oligodeoxyribonucleotides are linked via peptide bonds rather than phosphodiester bonds.

[0084] The polynucleotide probes complementary to, or fragments of, any portion of SEQ ID NOS. 1-8881, SEQ ID NOS. 9187-18598, SEQ ID NOS. 18599-35840, SEQ ID NOS. 36075-43225, or SEQ ID NOS. 43450-48714 may be a range of nucleotide lengths. The polynucleotide probes may be as long as the number of nucleotides of the EST or genomic fragment. The polynucleotide probes may be as long as about 100 nucleotides. Optionally, the polynucleotide probes complementary to, or fragments of, any portion of SEQ ID NOS. 1-8881, SEQ ID NOS. 9187-18598, SEQ ID NOS. 18599-35840, SEQ ID NOS. 36075-43225, or SEQ ID NOS. 43450-48714 may be from about 10 to about 50 nucleotides in length. In one embodiment, the polynucleotide probes complementary to, or fragments of, any portion of SEQ ID NOS. 1-8881, SEQ ID NOS. 9187-18598, SEQ ID NOS. 18599-35840, SEQ ID NOS. 36075-43225, and SEQ ID NOS. 43450-48714 may be from about 15 to about 45 nucleotides in length. In another embodiment, the polynucleotide probes complementary to, or fragments of, any portion of SEQ ID NOS. 1-8881, SEQ ID NOS. 9187-18598, SEQ ID NOS. 18599-35840, SEQ ID NOS. 36075-43225, or SEQ ID NOS. 43450-48714 may be from about 20 to about 40 nucleotides in length. In yet another embodiment, the polynucleotide probes complementary to, or fragments of, any portion of SEQ ID NOS. 1-8881, SEQ ID NOS. 9187-18598, SEQ ID NOS. 18599-35840, SEQ ID NOS. 36075-43225, or 43450-48714 may be from about 20 to about 35 nucleotides in length. In still yet another embodiment, the polynucleotide probes complementary to, or fragments of, any portion of SEQ ID NOS. 1-8881, SEQ ID NOS. 9187-18598, SEQ ID NOS. 18599-35840, SEQ ID NOS. 36075-43225, or 43450-48714 may be from about 20 to about 30 nucleotides in length. In another embodiment, the polynucleotide probes complementary to, or fragments of, any portion of SEQ ID NOS. 1-8881, SEQ ID NOS. 9187-18598, SEQ ID NOS. 18599-35840, SEQ ID NOS. 36075-43225, and SEQ ID NOS. 43450-48714 may be from about 22 to about 27 nucleotides in length. In still yet another embodiment, the polynucleotide probes complementary to, or fragments of, any portion of SEQ ID NOS. 1-8881, SEQ ID NOS. 9187-185988, SEQ ID NOS. 18599-35840, SEQ ID NOS. 36075-43225, or SEQ ID NOS. 43450-48714 may be about 25 nucleotides in length.

[0085] An embodiment of the invention has at least one polynucleotide probe complementary to, or a fragment of, any portion of a sequence identified in the Cynomolgus monkey immobilized to a discrete and known spot on a solid support. In one embodiment of the invention, the nucleotide array has at least one polynucleotide probe that is complementary to, or a fragment of, any portion of an ortholog, of a human gene, immobilized to a discrete and known spot on a solid support. In another embodiment, the nucleotide array may include at least one polynucleotide probe complementary to, or a fragment of, any portion of an ortholog to a human Tox gene immobilized to a discrete and known spot on a solid support. In yet another embodiment, the nucleotide array may include at least one polynucleotide probe complementary to, or a fragment of, any portion of SEQ ID NOS. 1-8881 or SEQ ID NOS. 9187-18598, Cynomolgus genes, immobilized to a discrete and known spot on a solid support. In still yet another embodiment, the nucleotide array may include a polynucleotide probe complementary to, or a fragment of, any portion of only SEQ ID NOS. 9187-18598 immobilized to a discrete and known spot on a solid support. In another embodiment, the nucleotide array may include at least one polynucleotide probe complementary to, or a fragment of, any portion of SEQ ID NOS. 17249-18598 immobilized to a discrete and known spot on a solid support. In yet another embodiment, the nucleotide array may include any one of SEQ ID NOS. 8882-9186 as the polynucleotide probes immobilized to a discrete and known spot on a solid support.

[0086] Another embodiment of the invention has at least one polynucleotide probe complementary to, or a fragment of, any portion of a sequence identified in the Cynomolgus monkey, as well as at least one polynucleotide probe complementary to, or a fragment of, any portion of a human gene, immobilized to a discrete and known spot on a solid support. In one embodiment of the invention, the polynucleotide probe from the human gene is complementary to, or a fragment of, any portion of any of SEQ ID NOS. 43450-48714. In another embodiment of the invention, the nucleotide array may include any one of SEQ ID NOS. 43226-48714 as the polynucleotide probes immobilized to a discrete and known spot on a solid support. In still yet another embodiment of the invention, the nucleotide array may include at least one polynucleotide probe complementary to, or a fragment of, any portion of a human gene in combination with any of the polynucleotide probes, described above, directed to a Cynomolgus gene.

[0087] Yet another embodiment of the invention has at least one polynucleotide probe complementary to, or a fragment of, any portion of a sequence identified in the Cynomolgus monkey, as well as at least one polynucleotide probe complementary to, or fragment of, any portion of a gene from a Rhesus monkey, immobilized to a discrete and known spot on a solid support. In one embodiment of the invention, the polynucleotide probe from the Rhesus monkey gene is complementary to, or a fragment of, any portion of any of SEQ ID NOS. 18599-35840 and SEQ ID NOS. 36075-43225. In another embodiment of the invention, the polynucleotide probe from the Rhesus monkey gene is complementary to, or a fragment of, any portion of any of SEQ ID NOS. 18599-20526. In yet another embodiment of the invention, the nucleotide array may include any one of SEQ ID NOS. 35841-36074 as the polynucleotide probes immobilized to a discrete and known spot on a solid support. In still yet another embodiment of the invention, the nucleotide array may include at least one polynucleotide probe complementary to, or a fragment of, any portion of a Rhesus monkey gene in combination with any of the polynucleotide probes, described above, directed to a Cynomolgus gene.

[0088] Still yet another embodiment of the invention has at least one polynucleotide probe complementary to, or a fragment of, any portion of a sequence identified in the Cynomolgus monkey, as well as at least one polynucleotide probe complementary to, or a fragment of, any portion of a gene from a Rhesus monkey and at least one polynucleotide probe complementary to, or a fragment of, any portion of a human gene, immobilized to a discrete and known spot on a solid support. In one embodiment of the invention, the nucleotide array has at least one polynucleotide probe that is complementary to, or a fragment of, any portion of an ortholog identified in the Cynomolgus monkey, of a human gene, as well as at least one polynucleotide probe complementary to, or a fragment of, any portion of a Rhesus monkey gene and at least one polynucleotide probe complementary to, or a fragment of, any portion of any human gene, immobilized to a discrete and known spot on a solid support. In another embodiment of the invention, the nucleotide array has at least one polynucleotide probe that is complementary to, or a fragment of, any portion of an ortholog identified in the Cynomolgus monkey, of a human gene, where at least one polynucleotide probe from a Rhesus monkey gene is complementary to, or a fragment of, any portion of any of SEQ ID NOS. 18599-35840 or SEQ ID NOS. 36075-43225 and at least one polynucleotide probe from the human gene is complementary to, or a fragment of, any portion of any of SEQ ID NOS. 43450-48714, immobilized to a discrete and known spot on a solid support. In yet another embodiment of the invention, the nucleotide array has at least one polynucleotide probe that is complementary to, or a fragment of, any portion of an ortholog identified in the Cynomolgus monkey, of a human gene, where at least one polynucleotide probe from a Rhesus monkey gene is complementary to, or a fragment of, any portion of any of SEQ ID NOS. 18599-35840 or SEQ ID NOS. 36075-43225 and at least one polynucleotide probe from the human gene is any of SEQ ID NOS. 43226-48714, immobilized to a discrete and known spot on a solid support. In still yet another embodiment of the invention, the nucleotide array has at least one polynucleotide probe that is complementary to, or a fragment of, any portion of an ortholog identified in the Cynomolgus monkey, of a human gene, where at least one polynucleotide probe from a Rhesus monkey gene is complementary to, or a fragment of, any portion of any of SEQ ID NOS. 18599-20526 and at least one polynucleotide probe from the human gene is complementary to, or a fragment of, any portion of any of SEQ ID NOS. 43450-48714, immobilized to a discrete and known spot on a solid support. In one embodiment of the invention, the nucleotide array has at least one polynucleotide probe that is complementary to, or a fragment of, any portion of an ortholog identified in the Cynomolgus monkey, of a human gene, where at least one polynucleotide probe from a Rhesus monkey gene is complementary to, or a fragment of, any portion of any of SEQ ID NOS. 18599-20526 and at least one polynucleotide probe from the human gene is any of SEQ ID NOS. 43226-48714, immobilized to a discrete and known spot on a solid support. In another embodiment of the invention, the nucleotide array has at least one polynucleotide probe that is complementary to, or a fragment of, any portion of an ortholog identified in the Cynomolgus monkey, of a human gene, where at least one polynucleotide probe from a Rhesus monkey gene is any of SEQ ID NOS. 35841-36074 and at least one polynucleotide probe from the human gene is complementary to, or a fragment of, any portion of any of SEQ ID NOS. 43450-48714, immobilized to a discrete and known spot on a solid support. In yet another embodiment of the invention, the nucleotide array has at least one polynucleotide probe that is complementary to, or a fragment of, any portion of an ortholog identified in the Cynomolgus monkey, of a human gene, where at least one polynucleotide probe from a Rhesus monkey gene is any of SEQ ID NOS. 35841-36074 and at least one polynucleotide probe from the human gene is any of SEQ ID NOS. 43226-48714, immobilized to a discrete and known spot on a solid support.

[0089] Another embodiment of the invention has at least one polynucleotide probe complementary to, or a fragment of, any portion of a sequence identified in the Cynomolgus monkey as a homolog of a human Tox gene, as well as at least one polynucleotide probe complementary to, or a fragment of, any portion of a Rhesus monkey gene and at least one polynucleotide probe complementary to, or a fragment of, any portion of any human gene, immobilized to a discrete and known spot on a solid support. In another embodiment of the invention, the nucleotide array has at least one polynucleotide probe that is complementary to, or a fragment of, any portion of a homolog of a human Tox gene identified in the Cynomolgus monkey, where at least one polynucleotide probe from a Rhesus monkey gene is complementary to, or a fragment of, any portion of any of SEQ ID NOS. 18599-35840 or SEQ ID NOS. 36075-43225 and at least one polynucleotide probe from the human gene is complementary to, or a fragment of, any portion of any of SEQ ID NOS. 43450-48714, immobilized to a discrete and known spot on a solid support. In yet another embodiment of the invention, the nucleotide array has at least one polynucleotide probe that is complementary to, or a fragment of, any portion of a homolog of a human Tox gene identified in the Cynomolgus monkey, where at least one polynucleotide probe from a Rhesus monkey gene is complementary to, or a fragment of, any portion of any of SEQ ID NOS. 18599-35840 or SEQ ID NOS. 36075-43225 and at least one polynucleotide probe from the human gene is any of SEQ ID NOS. 43226-48714, immobilized to a discrete and known spot on a solid support. In still yet another embodiment of the invention, the nucleotide array has at least one polynucleotide probe that is complementary to, or a fragment of, any portion of a homolog of a human Tox gene identified in the Cynomolgus monkey, where at least one polynucleotide probe from a Rhesus monkey gene is complementary to, or a fragment of, any portion of any of SEQ ID NOS. 18599-20526 and at least one polynucleotide probe from the human gene is complementary to, or a fragment of, any portion of any of SEQ ID NOS. 43450-48714, immobilized to a discrete and known spot on a solid support. In one embodiment of the invention, the nucleotide array has at least one polynucleotide probe that is complementary to, or a fragment of, any portion of a homolog of a human Tox gene identified in the Cynomolgus monkey, where at least one polynucleotide probe from a Rhesus monkey gene is complementary to, or a fragment of, any portion of any of SEQ ID NOS. 18599-20526 and at least one polynucleotide probe from the human gene is any of SEQ ID NOS. 43226-48714, immobilized to a discrete and known spot on a solid support. In another embodiment of the invention, the nucleotide array has at least one polynucleotide probe that is complementary to, or a fragment of, any portion of a homolog of a human Tox gene identified in the Cynomolgus monkey, where at least one polynucleotide probe from a Rhesus monkey gene is any of SEQ ID NOS. 35841-36074 and at least one polynucleotide probe from the human gene is complementary to, or a fragment of, any portion of any of SEQ ID NOS. 43450-48714, immobilized to a discrete and known spot on a solid support. In yet another embodiment of the invention, the nucleotide array has at least one polynucleotide probe that is complementary to, or a fragment of, any portion of a homolog of a human Tox gene identified in the Cynomolgus monkey, where at least one polynucleotide probe from a Rhesus monkey gene is any of SEQ ID NOS. 35841-36074 and at least one polynucleotide probe from the human gene is any of SEQ ID NOS. 43226-48714, immobilized to a discrete and known spot on a solid support.

[0090] Yet another embodiment of the invention has at least one polynucleotide probe complementary to, or a fragment of, any portion of any of the Cynomolgus monkey genes identified as SEQ ID NOS. 1-8881 or SEQ ID NOS. 9187-18598, as well as at least one polynucleotide probe complementary to, or a fragment of, any portion of a gene from a Rhesus monkey and at least one polynucleotide probe complementary to, or a fragment of, any portion of a human gene, immobilized to a discrete and known spot on a solid support. In one embodiment of the invention, the nucleotide array has at least one polynucleotide probe that is complementary to, or a fragment of, any portion of any of the Cynomolgus monkey genes identified as SEQ ID NOS. 1-8881 or SEQ ID NOS. 9187-18598, where at least one polynucleotide probe from a Rhesus monkey gene is complementary to, or a fragment of, any portion of any of SEQ. ID NOS. 18599-35840 or SEQ ID NOS. 36075-43225 and at least one polynucleotide probe from the human gene is complementary to, or a fragment of, any portion of any of SEQ ID NOS. 43450-48714, immobilized to a discrete and known spot on a solid support. In another embodiment of the invention, the nucleotide array has at least one polynucleotide probe that is complementary to, or a fragment of, any portion of any of the Cynomolgus monkey genes identified as SEQ ID NOS. 1-8881 or SEQ ID NOS. 9187-18598, where at least one polynucleotide probe from a Rhesus monkey gene is complementary to, or a fragment of, any portion of any of SEQ ID NOS. 18599-35840 or SEQ ID NOS. 36075-43225 and at least one polynucleotide probe from the human gene is any of SEQ ID NOS. 43226-48714, immobilized to a discrete and known spot on a solid support. In yet another embodiment of the invention, the nucleotide array has at least one polynucleotide probe that is complementary to, or a fragment of, any portion of any of the Cynomolgus monkey genes identified as SEQ ID NOS. 1-8881 or SEQ ID NOS. 9187-18598, where at least one polynucleotide probe from a Rhesus monkey gene is complementary to, or a fragment of, any portion of any of SEQ ID NOS. 18599-20526 and at least one polynucleotide probe from the human gene is complementary to, or a fragment of, any portion of any of SEQ ID NOS. 43450-48714, immobilized to a discrete and known spot on a solid support. In still yet embodiment of the invention, the nucleotide array has at least one polynucleotide probe that is complementary to, or a fragment of, any portion of any of the Cynomolgus monkey genes identified as SEQ ID NOS. 1-8881 or SEQ ID NOS. 9187-18598, where at least one polynucleotide probe from a Rhesus monkey gene is complementary to, or a fragment of, any portion of any of SEQ ID NOS. 18599-20526 and at least one polynucleotide probe from the human gene is any of SEQ ID NOS. 43226-48714, immobilized to a discrete and known spot on a solid support. In an embodiment of the invention, the nucleotide array has at least one polynucleotide probe that is complementary to, or a fragment of, any portion of any of the Cynomolgus monkey genes identified as SEQ ID NOS. 1-8881 or SEQ ID NOS. 9187-18598, where at least one polynucleotide probe from a Rhesus monkey gene is any of SEQ ID NOS. 35841-36074 and at least one polynucleotide probe from the human gene is complementary to, or a fragment of, any portion of any of SEQ ID NOS. 43450-48714, immobilized to a discrete and known spot on a solid support. In another embodiment of the invention, the nucleotide array has at least one polynucleotide probe that is complementary to, or a fragment of, any portion of any of the Cynomolgus monkey genes identified as SEQ ID NOS. 1-8881 or SEQ ID NOS. 9187-18598, where at least one polynucleotide probe from a Rhesus monkey gene is any of SEQ ID NOS. 35841-36074 and at least one polynucleotide probe from the human gene is any of SEQ ID NOS. 43226-48714, immobilized to a discrete and known spot on a solid support.

[0091] Still yet another embodiment of the invention has at least one polynucleotide probe complementary to, or a fragment of, any portion of any of the Cynomolgus monkey genes identified as SEQ ID NOS. 9187-18598, as well as at least one polynucleotide probe complementary to, or a fragment of, any portion of a gene from a Rhesus monkey and at least one polynucleotide probe complementary to, or a fragment of, any portion of a human gene, immobilized to a discrete and known spot on a solid support. In one embodiment of the invention, the nucleotide array has at least one polynucleotide probe that is complementary to, or a fragment of, any portion of any of the Cynomolgus monkey genes identified as SEQ ID NOS. 9187-18598, where at least one polynucleotide probe from a Rhesus monkey gene is complementary to, or a fragment of, any portion of any of SEQ ID NOS. 18599-35840 or SEQ ID NOS. 36075-43225 and at least one polynucleotide probe from the human gene is complementary to, or a fragment of, any portion of any of SEQ ID NOS. 43450-48714, immobilized to a discrete and known spot on a solid support. In another embodiment of the invention, the nucleotide array has at least one polynucleotide probe that is complementary to, or a fragment of, any portion of any of the Cynomolgus monkey genes identified as SEQ ID NOS. 9187-18598, where at least one polynucleotide probe from a Rhesus monkey gene is complementary to, or a fragment of, any portion of any of SEQ ID NOS. 18599-35840 or SEQ ID NOS. 36075-43225 and at least one polynucleotide probe from the human gene is any of SEQ ID NOS. 43226-48714, immobilized to a discrete and known spot on a solid support. In yet another embodiment of the invention, the nucleotide array has at least one polynucleotide probe that is complementary to, or a fragment of, any portion of any of the Cynomolgus monkey genes identified as SEQ ID NOS. 9187-18598, where at least one polynucleotide probe from a Rhesus monkey gene is complementary to, or a fragment of, any portion of any of SEQ ID NOS. 18599-20526 and at least one polynucleotide probe from the human gene is complementary to, or a fragment of, any portion of any of SEQ ID NOS. 43450-48714, immobilized to a discrete and known spot on a solid support. In still yet embodiment of the invention, the nucleotide array has at least one polynucleotide probe that is complementary to, or a fragment of, any portion of any of the Cynomolgus monkey genes identified as SEQ ID NOS. 9187-18598, where at least one polynucleotide probe from a Rhesus monkey gene is complementary to, or a fragment of, any portion of any of SEQ ID NOS. 18599-20526 and at least one polynucleotide probe from the human gene is any of SEQ ID NOS. 43226-48714, immobilized to a discrete and known spot on a solid support. In an embodiment of the invention, the nucleotide array has at least one polynucleotide probe that is complementary to, or a fragment of, any portion of any of the Cynomolgus monkey genes identified as SEQ ID NOS. 9187-18598, where at least one polynucleotide probe from a Rhesus monkey gene is any of SEQ ID NOS. 35841-36074 and at least one polynucleotide probe from the human gene is complementary to, or a fragment of, any portion of any of SEQ ID NOS. 43450-48714, immobilized to a discrete and known spot on a solid support. In another embodiment of the invention, the nucleotide array has at least one polynucleotide probe that is complementary to, or a fragment of, any portion of any of the Cynomolgus monkey genes identified as SEQ ID NOS. 9187-18598, where at least one polynucleotide probe from a Rhesus monkey gene is any of SEQ ID NOS. 35841-36074 and at least one polynucleotide probe from the human gene is any of SEQ ID NOS. 43226-48714, immobilized to a discrete and known spot on a solid support.

[0092] Another embodiment of the invention has at least one polynucleotide probe complementary to, or a fragment of, any portion of any of the Cynomolgus monkey genes identified as SEQ ID NOS. 17249-18598, as well as at least one polynucleotide probe complementary to, or a fragment of, any portion of a gene from a Rhesus monkey and at least one polynucleotide probe complementary to, or a fragment of, any portion of a human gene, immobilized to a discrete and known spot on a solid support. In one embodiment of the invention, the nucleotide array has at least one polynucleotide probe that is complementary to, or a fragment of, any portion of any of the Cynomolgus monkey genes identified as SEQ ID NOS. 17249-18598, where at least one polynucleotide probe from a Rhesus monkey gene is complementary to, or a fragment of, any portion of any of SEQ ID NOS. 18599-35840 or SEQ ID NOS. 36075-43225 and at least one polynucleotide probe from the human gene is complementary to, or a fragment of, any portion of any of SEQ ID NOS. 43450-48714, immobilized to a discrete and known spot on a solid support. In another embodiment of the invention, the nucleotide array has at least one polynucleotide probe that is complementary to, or a fragment of, any portion of any of the Cynomolgus monkey genes identified as SEQ ID NOS. 17249-18598, where at least one polynucleotide probe from a Rhesus monkey gene is complementary to, or a fragment of, any portion of any of SEQ ID NOS. 18599-35840 or SEQ ID NOS. 36075-43225 and at least one polynucleotide probe from the human gene is any of SEQ ID NOS. 43226-48714, immobilized to a discrete and known spot on a solid support. In yet another embodiment of the invention, the nucleotide array has at least one polynucleotide probe that is complementary to, or a fragment of, any portion of any of the Cynomolgus monkey genes identified as SEQ ID NOS. 17249-18598, where at least one polynucleotide probe from a Rhesus monkey gene is complementary to, or a fragment of, any portion of any of SEQ ID NOS. 18599-20526 and at least one polynucleotide probe from the human gene is complementary to, or a fragment of, any portion of any of SEQ ID NOS. 43450-48714, immobilized to a discrete and known spot on a solid support. In still yet embodiment of the invention, the nucleotide array has at least one polynucleotide probe that is complementary to, or a fragment of, any portion of any of the Cynomolgus monkey genes identified as SEQ ID NOS. 17249-18598, where at least one polynucleotide probe from a Rhesus monkey gene is complementary to, or a fragment of, any portion of any of SEQ ID NOS. 18599-20526 and at least one polynucleotide probe from the human gene is any of SEQ ID NOS. 43226-48714, immobilized to a discrete and known spot on a solid support. In an embodiment of the invention, the nucleotide array has at least one polynucleotide probe that is complementary to, or a fragment of, any portion of any of the Cynomolgus monkey genes identified as SEQ ID NOS. 17249-18598, where at least one polynucleotide probe from a Rhesus monkey gene is any of SEQ ID NOS. 35841-36074 and at least one polynucleotide probe from the human gene is complementary to, or a fragment of, any portion of any of SEQ ID NOS. 43450-48714, immobilized to a discrete and known spot on a solid support. In another embodiment of the invention, the nucleotide array has at least one polynucleotide probe that is complementary to, or a fragment of, any portion of any of the Cynomolgus monkey genes identified as SEQ ID NOS. 17249-18598, where at least one polynucleotide probe from a Rhesus monkey gene is any of SEQ ID NOS. 35841-36074 and at least one polynucleotide probe from the human gene is any of SEQ ID NOS. 43226-48714, immobilized to a discrete and known spot on a solid support.

[0093] Yet another embodiment of the invention has at least one polynucleotide probe directed to a Cynomolgus monkey gene, wherein the polynucleotide probe is identified as SEQ ID NOS. 8882-9186, as well as at least one polynucleotide probe complementary to, or a fragment of, any portion of a gene from a Rhesus monkey and at least one polynucleotide probe complementary to, or a fragment of, any portion of a human gene, immobilized to a discrete and known spot on a solid support. In one embodiment of the invention, the nucleotide array has at least one polynucleotide probe directed to a Cynomolgus monkey gene, wherein the polynucleotide probe is identified as SEQ ID NOS. 8882-9186, where at least one polynucleotide probe from a Rhesus monkey gene is complementary to, or a fragment of, any portion of any of SEQ ID NOS. 18599-35840 or SEQ ID NOS. 36075-43225 and at least one polynucleotide probe from the human gene is complementary to, or a fragment of, any portion of any of SEQ ID NOS. 43450-48714, immobilized to a discrete and known spot on a solid support. In another embodiment of the invention, the nucleotide array has at least one polynucleotide probe directed to a Cynomolgus monkey gene, wherein the polynucleotide probe is identified as SEQ ID NOS. 8882-9186, where at least one polynucleotide probe from a Rhesus monkey gene is complementary to, or a fragment of, any portion of any of SEQ ID NOS. 18599-35840 or SEQ ID NOS. 36075-43225 and at least one polynucleotide probe from the human gene is any of SEQ ID NOS. 43226-48714, immobilized to a discrete and known spot on a solid support. In yet another embodiment of the invention, the nucleotide array has at least one polynucleotide probe directed to a Cynomolgus monkey gene, wherein the polynucleotide probe is identified as SEQ ID NOS. 8882-9186, where at least one polynucleotide probe from a Rhesus monkey gene is complementary to, or a fragment of, any portion of any of SEQ ID NOS. 18599-20526 and at least one polynucleotide probe from the human gene is complementary to, or a fragment of, any portion of any of SEQ ID NOS. 43450-48714, immobilized to a discrete and known spot on a solid support. In still yet embodiment of the invention, the nucleotide array has at least one polynucleotide probe directed to a Cynomolgus monkey gene, wherein the polynucleotide probe is identified as SEQ ID NOS. 8882-9186, where at least one polynucleotide probe from a Rhesus monkey gene is complementary to, or a fragment of, any portion of any of SEQ ID NOS. 18599-20526 and at least one polynucleotide probe from the human gene is any of SEQ ID NOS. 43226-48714, immobilized to a discrete and known spot on a solid support. In an embodiment of the invention, the nucleotide array has at least one polynucleotide probe directed to a Cynomolgus monkey gene, wherein the polynucleotide probe is identified as SEQ ID NOS. 8882-9186, where at least one polynucleotide probe from a Rhesus monkey gene is any of SEQ ID NOS. 35841-36074 and at least one polynucleotide probe from the human gene is complementary to, or a fragment of, any portion of any of SEQ ID NOS. 43450-48714, immobilized to a discrete and known spot on a solid support. In another embodiment of the invention, the nucleotide array has at least one polynucleotide probe directed to a Cynomolgus monkey gene, wherein the polynucleotide probe is identified as SEQ ID NOS. 8882-9186, where at least one polynucleotide probe from a Rhesus monkey gene is any of SEQ ID NOS. 35841-36074 and at least one polynucleotide probe from the human gene is any of SEQ ID NOS. 43226-48714, immobilized to a discrete and known spot on a solid support.

[0094] As will be appreciated by a person of ordinary skill in the art, the number of polynucleotide probes immobilized to a nucleotide array will depend upon the size and composition of the nucleotide array. The polynucleotide probes of the nucleotide array may be attached to a silicon or a glass substrate. The silicon or glass substrate may have the thickness of a microscope slide or glass cover slip. Substrates that are transparent to light are useful when the assay involves optical detection. Other useful substrates include Langmuir Blodgett film, germanium, (poly)tetrafluorethylene, polystyrene, (poly)vinylidenedifluoride, polycarbonate, gallium arsenide, gallium phosphide, silicon oxide, silicon dioxide, silicon nitride, and combinations thereof. In one embodiment, the substrate is a flat glass or single crystal silicon surface with relief features less than about 10 Angstroms. In another embodiment, the substrate is a quartz wafer.

[0095] The surfaces on the substrates, to which the polynucleotide probes are attached, will usually, but not always, be composed of the same material as the substrate. Thus, the surface may comprise any number of materials, including polymers, plastics, resins, polysaccharides, silica or silica based materials, carbon, metals, inorganic glasses, membranes, silanes, or any of the above-listed substrate materials. In one embodiment, the surface will contain reactive groups, such as carboxyl, amino, and hydroxyl. In another embodiment, the surface is optically transparent and will have surface Si—OH functionalities such as are found on silica surfaces. In still yet another embodiment, the surface is silane.

[0096] In an embodiment wherein polynucleotide probes are immobilized on the substrate surface, the number of nucleic acid sequences may be selected for different applications, and may be, for example, about 100 or more, or, e.g., in some embodiments, more than 10⁵ or 10⁸. In one embodiment, the surface comprises at least 100 polynucleotide probes, each optionally having a different sequence, each polynucleotide probe contained in an area of less than about 0.1 cm², or, for example, between about 1 μm² and 10,000 μm², and each polynucleotide probe having a defined sequence and location on the substrate surface. In one embodiment, at least 1,000 different polynucleotide probes are provided on the substrate surface, wherein each nucleic acid is contained within an area less than about 10⁻³ cm², as described, for example, in U.S. Pat. No. 5,510,270, the disclosure of which is incorporated herein.

[0097] Nucleotide arrays for use in gene expression monitoring are described in PCT publication WO 97/10365, the disclosure of which is incorporated herein. In one embodiment, the polynucleotide probes are immobilized on a substrate surface, wherein the nucleotide array comprises more than 100 different polynucleotide probes and wherein each different polynucleotide probe is localized in a predetermined area of the substrate surface, and the density of the different polynucleotide probes is greater than about 60 different polynucleotide probes per 1 cm².

[0098] Nucleotide arrays containing polynucleotide probes immobilized on a surface which may be used are described in detail in U.S. Pat. No. 5,744,305, the disclosure of which is incorporated herein. As disclosed therein, on a substrate, polynucleotide probes with different sequences are immobilized each in a predefined area on a surface. For example, 10, 50, 60, 100, 10³, 10⁴, 10⁵, 10⁶, 10⁷, or 10⁸ different polynucleotide probes may be provided on the substrate surface. The polynucleotide probes of a particular sequence are provided within a predefined region of a substrate, having a surface area, for example, of about 1 cm² to 10⁻¹⁰ cm². In some embodiments, the regions have areas of less than about 10⁻¹, 10⁻², 10⁻³, 10⁻⁴, 10⁻⁵, 10⁻⁶, 10⁻⁷, 10⁻⁸, 10⁻⁹, or 10⁻¹⁰ cm². For example, in one embodiment, there is provided a planar, non-porous substrate having at least a first surface, and a number of different polynucleotide probes attached to the first surface at a density exceeding about 400 different polynucleotide probes/cm², wherein each of the different polynucleotide probes is attached to the surface of the substrate in a different predefined region, has a different determinable sequence, and is, for example, at least 4 nucleotides in length.

[0099] The polynucleotide probes may be attached to the substrate surface either by de novo synthesis on the substrate surface or by spotting or transporting polynucleotide probes onto specific locations of the substrate surface.

[0100] One example of de novo synthesis is the light-directed combinatorial synthesis of polynucleotide probes on a glass surface using automated phosphoramidite chemistry and chip masking techniques. In one specific implementation, a glass surface is derivatized with a silane reagent containing a functional group, e.g., a hydroxyl or amine group blocked by a photolabile protecting group. Photolysis through a photolithogaphic mask is used selectively to expose functional groups which are then ready to react with incoming 5′-photoprotected nucleoside phosphoramidites. The phosphoramidites react only with those sites which are illuminated (and thus exposed by removal of the photolabile blocking group). Thus, the phosphoramidites only add to those areas selectively exposed from the preceding step. These steps are repeated until the desired polynucleotide probes have been synthesized on the solid surface. Combinatorial synthesis of different polynucleotide probes at different locations on the nucleotide array is determined by the pattern of illumination during synthesis and the order of addition of coupling reagents.

[0101] In addition to the foregoing, additional methods which can be used to generate a nucleotide array on a single substrate are described in PCT Publication No. WO 93/09668. In the methods disclosed in this application, reagents are delivered to the substrate by either (1) flowing within a channel defined on predefined regions or (2) “spotting” on predefined regions. However, other approaches, as well as combinations of spotting and flowing, may be employed. In each instance, certain activated regions of the substrate are mechanically separated from other regions when the monomer solutions are delivered to the various reaction sites.

[0102] A typical “flow channel” method applied to the polynucleotide probes can generally be described as follows. Diverse polymer sequences are synthesized at selected regions of a substrate or solid support by forming flow channels on a surface of the substrate through which appropriate reagents flow or in which appropriate reagents are placed. For example, assume a monomer “A” is to be bound to the substrate in a first group of selected regions. If necessary, all or part of the surface of the substrate in all or a part of the selected regions is activated for binding by, for example, flowing appropriate reagents through all or some of the channels, or by washing the entire substrate with appropriate reagents. After placement of a channel block on the surface of the substrate, a reagent having the monomer A flows through or is placed in all or some of the channel(s). The channels provide fluid contact to the first selected regions, thereby binding the monomer A on the substrate directly or indirectly (via a spacer) in the first selected regions.

[0103] Thereafter, a monomer B is coupled to second selected regions, some of which may be included among the first selected regions. The second selected regions will be in fluid contact with a second flow channel(s) through translation, rotation, or replacement of the channel block on the surface of the substrate; through opening or closing a selected valve; or through deposition of a layer of chemical or photoresist. If necessary, a step is performed for activating at least the second regions. Thereafter, the monomer B is flowed through or placed in the second flow channel(s), binding monomer B at the second selected locations. In this particular example, the resulting sequences bound to the substrate at this stage of processing will be, for example, A, B, and AB. The process is repeated to form a polynucleotide probe of desired length at known locations on the substrate.

[0104] After the substrate is activated, monomer A can be flowed through some of the channels, monomer B can be flowed through other channels, a monomer C can be flowed through still other channels, etc. In this manner, many or all of the reaction regions are reacted with a monomer before the channel block must be moved or the substrate must be washed and/or reactivated. By making use of many or all of the available reaction regions simultaneously, the number of washing and activation steps can be minimized.

[0105] A person of ordinary skill in the art will recognize that there are alternative methods of forming channels or otherwise protecting a portion of the surface of the substrate. For example, according to some embodiments, a protective coating such as a hydrophilic or hydrophobic coating (depending upon the nature of the solvent) is utilized over portions of the substrate to be protected, sometimes in combination with materials that facilitate wetting by the reactant solution in other regions. In this manner, the flowing solutions are further prevented from passing outside of their designated flow paths.

[0106] The “spotting” methods of preparing polynucleotide probes can be implemented in much the same manner as the flow channel methods. For example, a monomer A can be delivered to and coupled with a first group of reaction regions which have been appropriately activated. Thereafter, a monomer B can be delivered to and reacted with a second group of activated reaction regions. Unlike the flow channel embodiments described above, reactants are delivered by directly depositing (rather than flowing) relatively small quantities of them in selected regions. In some steps, of course, the entire substrate surface can be sprayed or otherwise coated with a solution. In preferred embodiments, a dispenser moves from region to region, depositing only as much monomer as necessary at each stop. Typical dispensers include a micropipette to deliver the monomer solution to the substrate and a robotic system to control the position of the micropipette with respect to the substrate. In other embodiments, the dispenser includes a series of tubes, a manifold, a nucleotide array of pipettes, or the like so that various reagents can be delivered to the reaction regions simultaneously.

[0107] Furthermore, other methods or materials may be used to attached the polynucleotide probes to the substrate surface, such as using a polymer including a substantial amount of monomer or monomers including uncharged polar moieties other than primary amide, such as a polymer including an N-substituted acrylamide, N,N-disubstituted acrylamide, N-substituted methacrylamide, and/or N,N-disubstituted methacrylamide or coating the surface of the material with thermochemically reactive groups. See U.S. Publication Nos. 2005/0074478; 2003/0078314; 2001/0055761; and 2001/0014448.

[0108] In one embodiment, the polynucleotide probes are attached to the substrate surface. In this embodiment, a linker molecule, attached to a silane matrix, provides a surface that may be spatially activated by light. In this embodiment, synthesis of the polynucleotide probes occurs in parallel, such that the addition of a nucleotide to multiple growing polynucleotide probe chains occurs simultaneously.

[0109] In this embodiment, to define which polynucleotide probe chains will receive a nucleotide in each step, photolithographic masks, carrying 18-20 square micron windows that correspond to the dimension of individual features, may be placed over the substrate. The windows are distributed over the mask based on the desired sequence of each polynucleotide probe. When ultraviolet light is shone over the mask in the first step of synthesis, the exposed linkers become deprotected and are available for nucleotide coupling.

[0110] Additionally, a person of ordinary skill in the art will know that the number of polynucleotide probes immobilized to a nucleotide array will depend upon the end use of the nucleotide array. For certain diagnostic nucleotide arrays, only a few different polynucleotide probes may be required. However, other uses of the nucleotide array, such as for analyzing the transcriptional state of a cell or tissue in response to a therapeutic agent, a large number of polynucleotide probes immobilized to a solid support may be required to collect the desired information.

[0111] In one embodiment, the nucleotide array consists of polynucleotide probes complementary to, or a fragment of, any portion of any of SEQ ID NOS. 1-8881 or SEQ ID NOS. 9187-18598 immobilized to the solid support. Optionally, the nucleotide array consists of polynucleotide probes complementary to, or a fragment of, any portion of any of SEQ ID NOS. 1-8881 or SEQ ID NOS. 9187-18598, as well as polynucleotide probes complementary to, or a fragment of, any portion of any of SEQ ID NOS. 18599-35840 or SEQ ID NOS. 36075-43225 and/or SEQ ID NOS. 43450-48714 immobilized to the solid support.

[0112] In another embodiment, the nucleotide array consists of polynucleotide probes complementary to, or fragments of, any portion of each of SEQ ID NOS. 1-8881 and SEQ ID NOS. 9187-18598 immobilized to the solid support. Optionally, the nucleotide array consists of polynucleotide probes complementary to, or fragments of, any portion of each of SEQ ID NOS. 1-8881 and SEQ ID NOS. 9187-18598, as well as polynucleotide probes complementary to, or fragments of, any portion of each of SEQ ID NOS. 18599-35840 or SEQ ID NOS. 36075-43225 and/or SEQ ID NOS. 43450-48714 immobilized to the solid support.

[0113] In yet another embodiment, subsets of polynucleotide probes complementary to, or fragments of, any portion of any of SEQ ID NOS. 1-8881 and SEQ ID NOS. 9187-18598 are immobilized to the solid support. These subsets may include the polynucleotide probes that are complementary to, or fragments of, any portion of the Cynomolgus monkey genes that are homologous to the human Tox genes. Optionally, the subsets of polynucleotide probes may include polynucleotide probes that are complementary to, or fragments of, any portion of any of the Cynomolgus and Rhesus monkey genes that are homologous to the human Tox genes. As a non-limiting example, the subsets may include the polynucleotide probes that are complementary to, or fragments of, any portion of any of SEQ ID NOS. 17249-18598. Optionally, as a non-limiting example, the subsets may include the polynucleotide probes that are complementary to, or fragments of, any portion of any of SEQ ID NOS. 17249-18598 and any of SEQ ID NOS. 18599-20526. Further, optionally, as a non-limiting example, the subsets may include the polynucleotide probes that are complementary to, or fragments of, any portion of any of SEQ ID NOS. 17249-18598, as well as any of SEQ ID NOS. 18599-20526 and/or SEQ ID NOS. 43450-48714.

[0114] In still yet another embodiment, the subsets of polynucleotide probes complementary to, or fragments of, any portion of any of SEQ ID NOS. 1-8881 and SEQ ID NOS. 9187-18598 may include the polynucleotide probes that are complementary to, or fragments of, any of the Cynomolgus monkey genes that are orthologs of known human genes. Optionally, the subsets of polynucleotide probes may include the polynucleotide probes that are complementary to, or fragments of, any of the Cynomolgus and Rhesus monkey genes that are orthologs of known human genes. As a non-limiting example, the subsets may include the polynucleotide probes that are complementary to, or fragments of, any portion of any of SEQ ID NOS. 9187-18598. Optionally, as a non-limiting example, the subsets may include the polynucleotide probes that are complementary to, or fragments of, any portion of any of SEQ ID NOS. 9187-18598 and any of SEQ ID NOS. 18599-35840 or SEQ ID NOS. 36075-43225. Further, optionally, as a non-limiting example, the subsets may include the polynucleotide probes that are complementary to, or fragments of, any portion of any of SEQ ID NOS. 9187-18598, as well as any of SEQ ID NOS. 18599-35840 or SEQ ID NOS. 36075-43225 and/or SEQ ID NOS. 43450-48714.

[0115] In another embodiment, the nucleotide array consists of polynucleotide probes of any of SEQ ID NOS. 8882-9186 immobilized to the solid support. Optionally, the nucleotide array consists of polynucleotide probes of any of SEQ ID NOS. 8882-9186, as well as polynucleotide probes of any of SEQ ID NOS. 35841-36074 and/or SEQ ID NOS. 43450-48714 immobilized to the solid support.

[0116] In another embodiment, the subsets may include about 100 to about 55,000 polynucleotide probes. Alternatively, the subsets may include about 500 to about 50,000 polynucleotide probes. In one embodiment, the subsets may include about 1000 to about 45,000 polynucleotide probes. In another embodiment, the subsets may include about 2500 to about 40,000 polynucleotide probes. In yet another embodiment, the subsets may include 5000 to about 35,000 polynucleotide probes. In still yet another embodiment, the subsets may include 10,000 to about 30,000 polynucleotide probes. In another embodiment, the subsets may include 15,000 to about 25,000 polynucleotide probes.

[0117] The polynucleotide probes complementary to, or fragments of, any portion of any of SEQ ID NOS. 1-8881, SEQ ID NOS. 9187-18598, SEQ ID NOS. 18599-35840 or SEQ ID NOS. 36075-43225, and SEQ ID NOS. 43450-48714, as well as the polynucleotide probes of any of SEQ ID NOS. 8882-9186, SEQ ID NOS. 35841-36074, and SEQ ID NOS. 43226-43449 were designed to be complementary to one or more selected, known target nucleic acid sequences. These polynucleotide probes are designed to hybridize either to the target nucleic acid sequence itself or to variants of the target nucleic acid sequence. The variants of the target nucleic acid sequence may differ from the target nucleic acid sequence at one or more positions, but show a high overall degree of sequence identity with the reference sequence (e.g., at least 75, 90, 95, 99, 99.9 or 99.99%). The degree of identity between a base region of a polynucleotide probe and a base region of a target nucleic acid sequence can be determined by manual alignment. The degree of identity is determined by comparing just the sequence of nitrogenous bases, irrespective of the sugar and backbone regions of the nucleic acids being compared. Thus, the polynucleotide probe:target nucleic acid base sequence alignment may be DNA:DNA, RNA:RNA, DNA:RNA, RNA:DNA, or any combinations or analogs thereof. Equivalent RNA and DNA base sequences can be compared by converting U's (in RNA) to T's (in DNA).

2) Normalization Controls

[0118] Normalization controls are polynucleotide probes that have a sequence deliberately selected to be perfectly complementary to, or fragments of, labeled target polynucleotide probes added to the test or control sample either before or after the RNA, such as mRNA, of the test or control samples is amplified. The signals obtained from the normalization controls after hybridization provide a control for variations in hybridization conditions, label intensity, “reading” efficiency and other factors that may cause the signal of a perfect hybridization to vary between nucleotide arrays. In one embodiment, signals (e.g., fluorescence intensity) read from all other polynucleotide probes in the nucleotide array are divided by the signal (e.g., fluorescence intensity) from the normalization controls thereby normalizing the measurements.

[0119] Virtually any polynucleotide probe may serve as a normalization control. However, it is recognized that hybridization efficiency varies with base composition and polynucleotide probe length. Preferred normalization polynucleotide probes are selected to reflect the average length of the other polynucleotide probes present in the nucleotide array, however, they can be selected to cover a range of lengths. The normalization control(s) can also be selected to reflect the (average) base composition of the other polynucleotide probes in the nucleotide array, however in one embodiment, only one or a few normalization controls are used and they are selected such that they hybridize well (i.e. no secondary structure) and do not match any target polynucleotide probes generated from the test or control samples.

[0120] Normalization controls may be localized at any position in the nucleotide array or at multiple positions throughout the nucleotide array to control for spatial variation in hybridization efficiently. In one embodiment, the normalization controls are located at the corners or at the edges of the nucleotide array, as well as in the middle.

3) Expression Level Controls

[0121] Expression level controls are polynucleotide probes that have a sequence deliberately selected to be perfectly complementary to, or fragments of, constitutively expressed genes in the biological sample. Expression level controls are designed to control for the overall health and metabolic activity of a cell. Examination of the covariance of an expression level control with the expression level of the target nucleic acid indicates whether measured changes or variations in expression level of a gene are due to changes in transcription rate of that gene or to general variations in health of the cell. Thus, for example, when a cell is in poor health or lacking a critical metabolite the expression levels of both an active gene and a constitutively expressed gene are expected to decrease. The converse is also true. Thus, where the expression levels of both an expression level control and the gene appear to both decrease or to both increase, the change may be attributed to changes in the metabolic activity of the cell as a whole, not to differential expression of the gene in question. Conversely, where the expression levels of the gene and the expression level control do not covary, the variation in the expression level of the target gene is attributed to differences in regulation of that gene and not to overall variations in the metabolic activity of the cell.

[0122] Virtually any constitutively expressed gene provides a suitable target for expression level controls. Typically, expression level control polynucleotide probes have sequences complementary to, or fragments of, subsequences of constitutively expressed “housekeeping genes” including, but not limited to the β-actin gene, the transferrin receptor gene, or the GAPDH gene.

4) Mismatch Controls

[0123] Mismatch controls may also be provided for the polynucleotide probes complementary to, or fragments of, any portion of any of SEQ ID NOS. 1-8881, SEQ ID NOS. 9187-18598, SEQ ID NOS. 18599-35840, SEQ ID NOS. 36075-43225, and SEQ ID NOS. 43450-48714, as well as the polynucleotide probes of any of SEQ ID NOS. 8882-9186, SEQ ID NOS. 35841-36074, and SEQ ID NOS. 43226-43449, for expression level controls, or for normalization controls. Mismatch controls are polynucleotide probes that have a sequence deliberately selected not to be perfectly complementary to a particular target nucleic acid. The mismatch control typically has a corresponding test polynucleotide probe that is perfectly complementary to the sequence of the same particular target nucleic acid except for the presence of one or more mismatched bases. A mismatched base is a base selected so that it is not complementary to, or fragment of, the corresponding base in the sequence of the target nucleic acid to which the nucleic acid probe would otherwise specifically hybridize. One or more mismatches are selected such that under appropriate hybridization conditions (e.g. stringent conditions), the polynucleotide probe complementary to, or a fragment of, any portion of any of SEQ ID NOS. 1-8881, SEQ ID NOS. 9187-18598, SEQ ID NOS. 18599-35840, SEQ ID NOS. 36075-43225, and SEQ ID NOS. 43450-48714, as well as the polynucleotide probes of any of SEQ ID NOS. 8882-9186, SEQ ID NOS. 35841-36074, and SEQ ID NOS. 43226-43449 would be expected to hybridize with its target nucleic acid, but the mismatch control would not hybridize (or would hybridize to a significantly lesser extent).

[0124] In one embodiment, the mismatch control would contain a central mismatch. Thus, for example, where a polynucleotide probe contains 20 nucleotides, a corresponding mismatch control will have the identical sequence except for a single base mismatch (e.g., substituting a G, a C or a T for an A) at any of positions 6 through 14 (the central mismatch).

[0125] Mismatch controls thus provide a control for non-specific binding or cross-hybridization to a nucleic acid in the sample other than the target to which the polynucleotide probe is directed. Mismatch controls thus indicate whether a hybridization is specific or not. For example, if the target is present, the perfect match polynucleotide probes should be consistently brighter than the mismatch controls. In addition, if all central mismatches are present, the mismatch polynucleotide probes can be used to detect a mutation, such as a SNP.

5) Sample Preparation/Amplification Controls

[0126] The nucleotide array may also include sample preparation/amplification controls. Sample preparation/amplification controls are polynucleotide probes that are complementary to, or fragments of, subsequences of control genes selected because the control genes do not normally occur in the nucleic acids of the particular biological sample being assayed. Suitable sample preparation/amplification controls include, for example, polynucleotide probes to bacterial genes (e.g., Bio B).

[0127] The sample preparation/amplification control may be added to the test or control sample before processing. Quantification of the hybridization of the sample preparation/amplification control polynucleotide probe provides a measure of alteration in the abundance of the nucleic acids caused by the subsequent processing steps (e.g. PCR, reverse transcription, in vitro transcription, etc.).

Test or Control Sample

[0128] The test sample may be either total cellular RNA, e.g., mRNA, directly isolated from, or a target nucleic acid complementary to, the RNA isolated from, a biological sample obtained from a primate, e.g., a human, a Cynomolgus monkey, or a Rhesus monkey, especially a non-human primate such as a Cynomolgus monkey or a Rhesus monkey, exposed to the therapeutic agent. Alternatively, the test sample may be either total RNA, e.g., mRNA, directly isolated from, or a nucleic acid complementary to the RNA isolated from, a biological sample obtained from a primate, e.g., a human, a Cynomolgus monkey, or a Rhesus monkey, especially a non-human primate such as a Cynomolgus monkey or a Rhesus monkey, that has a SNP. The test sample includes, but is not limited to isolated RNA, a cDNA reverse transcribed from the isolated RNA, an RNA transcribed from the cDNA, a DNA amplified from the cDNA, and an RNA transcribed from the amplified DNA.

[0129] The control sample may be either total cellular RNA, e.g., mRNA, directly isolated from, or a nucleic acid complementary to the RNA isolated from, a biological sample obtained from a primate, e.g., a human, a Cynomolgus monkey, or a Rhesus monkey, especially a non-human primate such as a Cynomolgus monkey or a Rhesus monkey, that was not exposed to the therapeutic agent. Alternatively, the control sample may be either total cellular RNA, e.g., mRNA, directly isolated from, or a nucleic acid complementary to the RNA isolated from, a biological sample obtained from a primate, e.g., a human, a Cynomolgus monkey, or a Rhesus monkey, especially a non-human primate such as a Cynomolgus monkey or a Rhesus monkey, that lacks the SNP. The control sample includes, but is not limited to isolated RNA, a cDNA reverse transcribed from the isolated RNA, an RNA transcribed from the cDNA, a DNA amplified from the cDNA, and an RNA transcribed from the amplified DNA.

[0130] The test and/or control samples may be amplified prior to hybridization to the polynucleotide probe immobilized to the solid surface of the nucleotide array. Methods of amplification are well known to persons of ordinary skill in the art. One method by which the test sample may be amplified is PCR.

[0131] In one embodiment, the test or control sample RNA is reverse transcribed with a reverse transcriptase and a promoter consisting of a sequence encoding the phage T7 promoter to provide single stranded DNA template. The DNA strand is polymerized using a DNA polymerase. After synthesis of double-stranded cDNA, T7 RNA polymerase is added and RNA is transcribed from the cDNA template. Successive rounds of transcription from each single cDNA template results in amplified RNA.

[0132] It will be appreciated by a person of ordinary skill in the art that the direct transcription method described above provides an antisense RNA pool. Where antisense RNA is used as the target nucleic acid in the test or control sample, the polynucleotide probes provided in the nucleotide array are chosen to be complementary to, or fragments of, subsequences of the antisense RNA. Conversely, where the test or control sample is a pool of sense nucleic acids, the polynucleotide probes are selected to be complementary to, or fragments of, subsequences of the sense nucleic acids. Finally, where the test or control sample is double stranded, the polynucleotide probes may be of either sense as the target nucleic acids include both sense and antisense strands.

Labeling of the Test or Control Sample

[0133] Formation of the hybridized complex between the polynucleotide probes immobilized on the solid surface of the nucleotide array and the test or control sample may be monitored by detecting one or more labels attached to the test or control sample. The labels may be incorporated by any number of means known to persons of ordinary skill in the art. In one embodiment of the present invention, the label may be incorporated using PCR. In another embodiment of the present invention, a labeled nucleotide, such as fluorosceien-labeled UTP and/or CTP, may be incorporated into transcribed nucleic acids using transcription amplification.

[0134] The means of attaching labels to nucleic acids are well known to persons of ordinary skill in the art. Examples of attachment methods include, but are not limited to, nick translation and end-labeling by kinasing the nucleic acid and subsequently attaching a nucleic acid linker joining the test or control sample to a label, such as a fluorophore.

[0135] Additionally, a label may be added directly to the test or control sample if the test or control sample is RNA directly isolated from the Cynomolgus or Rhesus monkey biological sample. Furthermore, a label may be added directly to the amplification product after the amplification is completed.

[0136] Labels suitable for use in the present invention include any composition detectable by spectroscopic, photochemical, biochemical, immunochemical, electrical, optical, or chemical means. The label may be any suitable labeling substance, including but not limited to a radioisotope, an enzyme, an enzyme cofactor, an enzyme substrate, a dye, a hapten, a chemiluminescent molecule, a fluorescent molecule, a phosphorescent molecule, an electrochemiluminescent molecule, a chromophore, a base sequence region that is unable to stably hybridize to the target nucleic acid under the stated conditions, and mixtures of these. Useful labels in the present invention include biotin for staining with labeled streptavidin conjugate, magnetic beads, such as Dynabeads™, fluorescent dyes, such as fluoroscein, Texas red, rhodamine, and green fluorescent protein, radiolabels, such as ³H, ¹²⁵I, ³⁵S, ¹⁴C, and ³²P, enzymes, such as horse radish peroxidase and alkaline phosphatase, and calorimetric labels, such as colloidal gold and colored glass or plastic beads. In one embodiment, the label is biotin.

[0137] The labels may be detected using a variety of means known by a person of ordinary skill in the art. Radiolabels may be detected using photographic film or scintillation counters. Fluorescent markers may be detected using a photodetector to detect emitted light. Enzymatic labels may be detected by providing the enzyme with a substrate and detecting the reaction product produced by the action of the enzyme on the substrate. Calorimetric labels may be detected by simply visualizing the colored label.

[0138] The label may be added to the target nucleic acid(s) of the test or control sample prior to, or after the hybridization. So called “direct labels” are detectable labels that are directly attached to or incorporated into the target (test or control sample) nucleic acid prior to hybridization. In contrast, so called “indirect labels” are joined to the hybrid duplex after hybridization. Often, the indirect label is attached to a binding moiety that has been attached to the target nucleic acid prior to the hybridization. Thus, for example, the target nucleic acid may be biotinylated before the hybridization. After hybridization, an aviden-conjugated fluorophore will bind the biotin bearing hybrid duplexes providing a label that is easily detected. For a detailed review of methods of labeling nucleic acids and detecting labeled hybridized nucleic acids see Laboratory Techniques in Biochemistry and Molecular Biology, Vol. 24: Hybridization With Nucleic Acid Probes, P. Tijssen, ed. Elsevier, N.Y., (1993)).

Hybridizing the Polynucleotide Probes and the Test Sample

[0139] Nucleic acid hybridization simply involves providing a denatured polynucleotide probe and nucleic acid of the test or control sample under conditions where the polynucleotide probe and its complementary nucleic acid can form stable hybrid duplexes through complementary base pairing. The nucleic acids that do not form hybrid duplexes are then washed away leaving the hybridized nucleic acids to be detected, typically through detection of an attached detectable label. It is generally recognized that nucleic acids are denatured by increasing the temperature or decreasing the salt concentration of the buffer containing the nucleic acids. Under low stringency conditions (e.g., low temperature and/or high salt) hybrid duplexes (e.g., DNA:DNA, RNA:RNA, or RNA:DNA) will form even where the annealed sequences are not perfectly complementary. Thus specificity of hybridization is reduced at lower stringency. Conversely, at higher stringency (e.g., higher temperature or lower salt) successful hybridization requires fewer mismatches.

[0140] Hybridization conditions may be selected to provide any degree of stringency. In one embodiment, hybridization reaction between the polynucleotide probes complementary to, or fragments of, any portion of any of SEQ ID NOS. 1-8881, SEQ ID NOS. 9187-18598, SEQ ID NOS. 18599-35840, SEQ ID NOS. 36075-43225, and SEQ ID NOS. 43450-48714, as well as the polynucleotide probes of any of SEQ ID NOS. 8882-9186, SEQ ID NOS. 35841-36074, and SEQ ID NOS. 43226-43449 and the test or control sample may be performed under low stringency conditions (e.g., 6×SSPE-T at 37° C. (0.005% Triton X-100)) to ensure hybridization. The hybridized complexes may subsequently be washed under higher stringency conditions (e.g., 1×SSPE-T at 37° C.) to eliminate mismatched hybridized complexes. Successive washes may be performed at increasingly higher stringency (e.g., down to as low as 0.25×SSPE-T at 37° C. to 50° C.) until a desired level of hybridization specificity is obtained. In another embodiment, the degree of stringency may also be increased by adding additional agents, such as formamide. Hybridization specificity may be evaluated by comparison of hybridization to the polynucleotide probes complementary to, or fragments of, any portion of any of SEQ ID NOS. 1-8881, SEQ ID NOS. 9187-18598, SEQ ID NOS. 18599-35840, SEQ ID NOS. 36075-43225, and SEQ ID NOS. 43450-48714, as well as the polynucleotide probes of any of SEQ ID NOS. 8882-9186, SEQ ID NOS. 35841-36074, and SEQ ID NOS. 43226-43449 with hybridization to the various control polynucleotide probes that may be present on the nucleotide array (e.g., expression level control, normalization control, mismatch control, etc.).

[0141] In general, a tradeoff exists between hybridization specificity (stringency) and signal intensity. In one embodiment, the wash is performed at the highest stringency that produces consistent results and that provides a signal intensity greater than approximately 10% of the background intensity. In another embodiment, the nucleotide array containing the hybridized complexes may be washed at successively higher stringency solutions and read between each wash. Analysis of the data sets thus produced will reveal a wash stringency above which the hybridization pattern is not appreciably altered and which provides adequate signal for the particular polynucleotide probes complementary to, or fragments of, any portion of any of SEQ ID NOS. 1-8881, SEQ ID NOS. 9187-18598, SEQ ID NOS. 18599-35840, SEQ ID NOS. 36075-43225, and SEQ ID NOS. 43450-48714, as well as the polynucleotide probes of any of SEQ ID NOS. 8882-9186, SEQ ID NOS. 35841-36074, and SEQ ID NOS. 43226-43449 of interest.

[0142] The background signal may be reduced by using a detergent, such as C-TAB, or a blocking reagent, such as sperm DNA or cot-1 DNA, during the hybridization reaction to the reduce non-specific binding of the labeled test or control sample. In one embodiment of the present invention, the hybridization reaction may be performed in the presence of about 0.5 mg/ml DNA, such as herring sperm DNA.

[0143] The stability of the hybridized complexes formed between the polynucleotide probes complementary to, or fragments of, any portion of any of SEQ ID NOS. 1-8881, SEQ ID NOS. 9187-18598, SEQ ID NOS. 18599-35840, SEQ ID NOS. 36075-43225, and SEQ ID NOS. 43450-48714, as well as the polynucleotide probes of any of SEQ ID NOS. 8882-9186, SEQ ID NOS. 35841-36074, and SEQ ID NOS. 43226-43449, are generally in the order of RNA:RNA>RNA:DNA>DNA:DNA, in solution. Long polynucleotide probes will generally from a more stable hybridized complex with the test sample. However, longer polynucleotide probes generally exhibit poorer mismatch discrimination than shorter polynucleotide probes. Mismatch discrimination refers to the measured hybridization signal ratio between a perfect match polynucleotide probe and a single base mismatch polynucleotide probe. Shorter polynucleotide probes (e.g., containing 8 nucleotides) discriminate mismatches very well, but the overall duplex stability is low.

[0144] Altering the thermal stability (“Tₘ”) of the duplex formed between the target nucleic acid and the polynucleotide probe using, e.g., known polynucleotide probe analogues allows for optimization of duplex stability and mismatch discrimination. One useful aspect of altering the Tₘ arises from the fact that adenine-thymine (A-T) duplexes have a lower Tₘ than guanine cytosine (G-C) duplexes due in part to the fact that the A-T duplexes have 2 hydrogen bonds per base-pair, while the G-C duplexes have 3 hydrogen bonds per base pair. In heterogeneous nucleotide arrays in which there is a non-uniform distribution of bases, it is not generally possible to optimize hybridization for each polynucleotide probe simultaneously. Thus, in some embodiments, it is desirable to selectively destabilize G-C duplexes and/or to increase the stability of A-T duplexes. This can be accomplished, e.g., by substituting guanine residues in the polynucleotide probes of a nucleotide array which form G-C duplexes with hypoxanthine, or by substituting adenine residues in polynucleotide probes which form A-T duplexes with 2,6 diaminopurine or by using the salt tetramethyl ammonium chloride (TMACl) in place of NaCl.

[0145] Altered duplex stability conferred by using polynucleotide probe analogues can be ascertained by following, e.g., fluorescence signal intensity of nucleotide arrays hybridized with a target nucleic acid over time. The data allow optimization of specific hybridization conditions at, e.g., room temperature (for simplified diagnostic applications in the future).

[0146] Another way of verifying altered duplex stability is by following the signal intensity generated upon hybridization with time. Previous experiments using DNA targets and DNA chips have shown that signal intensity increases with time, and that the more stable duplexes generate higher signal intensities faster than less stable duplexes. The signals reach a plateau or “saturate” after a certain amount of time due to all of the binding sites becoming occupied. These data allow for optimization of hybridization, and determination of the best conditions at a specified temperature.

[0147] Methods of optimizing hybridization conditions are well known to those of skill in the art (see, e.g., Laboratory Techniques in Biochemistry and Molecular Biology, Vol. 24: Hybridization With Nucleic Acid Probes, P. Tijssen, ed. Elsevier, N.Y., (1993)).

[0148] The hybridization signals will vary in strength with the efficiency of the hybridization of the polynucleotide probes complementary to, or fragments of, any portion of any of SEQ ID NOS. 1-8881, SEQ ID NOS. 9187-18598, SEQ ID NOS. 18599-35840, SEQ ID NOS. 36075-43225, and SEQ ID NOS. 43450-48714, as well as the polynucleotide probes of any of SEQ ID NOS. 8882-9186, SEQ ID NOS. 35841-36074, and SEQ ID NOS. 43226-43449, immobilized to the solid surface of the nucleotide array, with the test or control sample. Additionally, the hybridization signal will vary with the amount of label incorporated into the test or control sample. Further, the hybridization signal will vary in strength with the amount of the particular nucleic acid in the test or control sample.

[0149] Therefore, the nucleotide array containing a plurality of polynucleotide probes complementary to, or fragments of, any portion of any of SEQ ID NOS. 1-8881, SEQ ID NOS. 9187-18598, SEQ ID NOS. 18599-35840, SEQ iD NOS. 36075-43225, and SEQ ID NOS. 43450-48714, as well as the polynucleotide probes of any of SEQ ID NOS. 8882-9186, SEQ ID NOS. 35841-36074, and SEQ ID NOS. 43226-43449, immobilized to the solid surface, may be used to determine the levels and species of RNA produced after administration of a therapeutic agent to a primate, e.g., a human, a Cynomolgus monkey, or a Rhesus monkey, especially a non-human primate such as a Cynomolgus monkey or a Rhesus monkey. The hybridization patterns and intensities of the label attached to the test or control sample may be determined by hybridizing the test or control sample to the polynucleotide probes complementary to, or fragments of, any portion of any of SEQ ID NOS. 1-8881, SEQ ID NOS. 9187-18598, SEQ ID NOS. 18599-35840, SEQ ID NOS. 36075-43225, and SEQ ID NOS. 43450-48714, as well as the polynucleotide probes of any of SEQ ID NOS. 8882-9186, SEQ ID NOS. 35841-36074, and SEQ ID NOS. 43226-43449. The hybridization pattern produced from a test sample obtained from a biological sample of a primate, e.g., a human, a Cynomolgus monkey, or a Rhesus monkey, especially a non-human primate such as a Cynomolgus monkey or a Rhesus monkey, administered a therapeutic agent, may be compared with the hybridization pattern produced from a control sample obtained from a biological sample from the same species of primate that was not administered the therapeutic agent. The differences between the two hybridization patterns will indicate which primate genes are affected upon administration of the therapeutic agent. The investigator may then determine the genes which are up- or down-regulated to determine the biological effects, including the actions, targets, and toxicities, of the therapeutic agent.

[0150] Based upon the differences in hybridization patterns, an investigator may also determine whether a modified therapeutic agent is more specific and/or active than the originally administered therapeutic agent. If fewer primate genes are up- or down-regulated after administration of the modified therapeutic agent, as compared with the genes up- or down-regulated after administration of the original therapeutic agent, the modified therapeutic agent is more specific than the original therapeutic agent.

Modifying the Test or Control Sample to Decrease Background

[0151] The test or control sample may be modified prior to hybridization to the polynucleotide probes on the nucleotide array to reduce sample complexity and thereby decrease background signal and improve sensitivity of the measurement. In one embodiment, complexity reduction is achieved by selective degradation of background RNA. Selective degradation is accomplished by hybridizing the sample RNA (e.g., polyA⁺ RNA) with a pool of DNA oligonucleotides that hybridize specifically with the regions to which the polynucleotide probes in the nucleotide array specifically hybridize. In one embodiment, the pool of oligonucleotides consists of the same polynucleotide probes as found on the nucleotide array.

[0152] The pool of oligonucleotides hybridizes to the test or control sample RNA forming a number of double stranded (hybrid duplex) nucleic acids. The hybridized sample is then treated with RNase A, a nuclease that specifically digests single stranded RNA. The RNase A is then inhibited, using a protease and/or commercially available RNase inhibitors, and the double stranded nucleic acids are then separated from the digested single stranded RNA. This separation may be accomplished in a number of ways well known to those of ordinary skill in the art including, but not limited to, electrophoresis, and gradient centrifugation. However, in one embodiment, the pool of DNA oligonucleotides is provided attached to beads forming thereby a nucleic acid affinity column. After digestion with the RNase A, the hybridized DNA is removed simply by denaturing (e.g., by adding heat or increasing salt) the hybrid duplexes and washing the previously hybridized RNA off in an elution buffer.

[0153] The undigested RNA fragments which will be hybridized to the polynucleotide probe in the nucleotide array are then preferably end-labeled with a fluorophore attached to an RNA linker using an RNA ligase. This procedure produces a labeled sample RNA pool in which the nucleic acids that do not correspond to polynucleotide probes in the nucleotide array are eliminated and thus unavailable to contribute to a background signal.

[0154] Another method of reducing sample complexity involves hybridizing the RNA with deoxyoligonucleotides that hybridize to regions that border on either size the regions to which the polynucleotide probes of the nucleotide array are directed. Treatment with RNAse H selectively digests the double stranded (hybrid duplexes) leaving a pool of single-stranded RNA corresponding to the short regions that were formerly bounded by the deoxyolignucleotide polynucleotide probes and which correspond to the target nucleic acids and longer RNA sequences that correspond to regions between the target nucleic acids and the polynucleotide probes of the nucleotide array. The short RNA fragments are then separated from the long fragments (e.g., by electrophoresis), labeled if necessary as described above, and then are ready for hybridization with the nucleotide array.

[0155] In a third approach, sample complexity reduction involves the selective removal of particular (preselected) mRNA messages. In particular, highly expressed mRNA messages that are not specifically polynucleotide probed by the polynucleotide probes in the nucleotide array are preferably removed. This approach involves hybridizing the polyA⁺ mRNA with an oligonucleotide polynucleotide probe that specifically hybridizes to the preselected message close to the 3′ (poly A) end. The polynucleotide probe may be selected to provide high specificity and low cross reactivity. Treatment of the hybridized message/polynucleotide probe complex with RNase H digests the double stranded region effectively removing the polyA⁺ tail from the rest of the message. The sample is then treated with methods that specifically retain or amplify polyA⁺ RNA (e.g., an oligo dT column or (dT)ₙ magnetic beads). Such methods will not retain or amplify the selected message(s) as they are no longer associated with a polyA⁺ tail. These highly expressed messages are effectively removed from the sample providing a sample that has reduced background mRNA.

Signal Evaluation

[0156] A person of ordinary skill in the art will appreciate that methods for evaluating the hybridization results vary with the nature of the specific polynucleotide probe and nucleic acids used, as well as the controls (e.g., normalization controls, expression level controls, mismatch controls, or sample preparation/amplification controls) provided. In one embodiment, simple quantification of the fluorescence intensity for each polynucleotide probe is determined. This is accomplished simply by measuring polynucleotide probe signal strength at each location (representing a different polynucleotide probe) on the nucleotide array (e.g., where the label is a fluorescent label, detection of the amount of florescence (intensity) produced by a fixed excitation illumination at each location on the nucleotide array). Comparison of the absolute intensities of a nucleotide array hybridized to nucleic acids from a test or control sample with intensities produced by a hybridization to the expression level controls, mismatch controls, normalization controls, or sample preparation/amplification controls provides a measure of the relative expression of the nucleic acids that hybridize to each of the polynucleotide probes.

[0157] A person of ordinary skill in the art, however, will appreciate that hybridization signals will vary in strength with efficiency of hybridization, the amount of label on the target nucleic acid and the amount of the particular target nucleic acid in the sample. Typically target nucleic acids present at very low levels (e.g., <1 pM) will show a very weak signal. At some low level of concentration, the signal becomes virtually indistinguishable from background. In evaluating the hybridization data, a threshold intensity value may be selected below which a signal is not counted as being essentially indistinguishable from background.

[0158] Where it is desirable to detect nucleic acids expressed at lower levels, a lower threshold is chosen. Conversely, where only high expression levels are to be evaluated a higher threshold level is selected. In one embodiment, a suitable threshold is about 10% above that of the average background signal.

[0159] In addition, the provision of appropriate controls (e.g., normalization controls, expression level controls, mismatch controls, and sample preparation/amplification controls) permits a more detailed analysis that controls for variations in hybridization conditions, cell health, non-specific binding and the like. Thus, for example, in one embodiment, the nucleotide array is provided with normalization controls as described above. These normalization controls are polynucleotide probes complementary to, or fragments of, control sequences added in a known concentration to the sample. Where the overall hybridization conditions are poor, the normalization controls will show a smaller signal reflecting reduced hybridization. Conversely, where hybridization conditions are good, the normalization controls will provide a higher signal reflecting the improved hybridization. Normalization of the signal complementary to, or fragments of, other polynucleotide probes in the nucleotide array to the normalization controls thus provides a control for variations in hybridization conditions. Typically, normalization is accomplished by dividing the measured signal from the other polynucleotide probes in the nucleotide array by the average signal produced by the normalization controls. Normalization may also include correction for variations due to sample preparation and amplification. Such normalization may be accomplished by dividing the measured signal by the average signal from the sample preparation/amplification control polynucleotide probes (e.g., the Bio B polynucleotide probes). The resulting values may be multiplied by a constant value to scale the results.

[0160] As indicated above, the nucleotide array may include mismatch controls. In one embodiment, there may be a mismatch control having a central mismatch for every polynucleotide probe (except the normalization controls) in the nucleotide array. It is expected that after washing in stringent conditions, where a perfect match would be expected to hybridize to the polynucleotide probe, but not to the mismatch, the signal from the mismatch controls should only reflect non-specific binding or the presence in the sample of a nucleic acid that hybridizes with the mismatch. Where both the polynucleotide probe in question and its corresponding mismatch control both show high signals, or the mismatch shows a higher signal than its corresponding test polynucleotide probe, there is a problem with the hybridization and the signal from those polynucleotide probes may be ignored. The difference in hybridization signal intensity between the target specific polynucleotide probe and its corresponding mismatch control is a measure of the discrimination of the target-specific polynucleotide probe. Thus, in one embodiment, the signal of the mismatch polynucleotide probe is subtracted from the signal from its corresponding test polynucleotide probe to provide a measure of the signal due to specific binding of the test polynucleotide probe.

[0161] The concentration of a particular sequence can then be determined by measuring the signal intensity of each of the polynucleotide probes that bind specifically to that gene and normalizing to the normalization controls. Where the signal from the polynucleotide probes is greater than the mismatch, the mismatch is subtracted. Where the mismatch intensity is equal to or greater than its corresponding test polynucleotide probe, the signal is ignored. The expression level of a particular gene can then be scored by the number of positive signals (either absolute or above a threshold value), the intensity of the positive signals (either absolute or above a selected threshold value), or a combination of both metrics (e.g., a weighted average).

Monitoring Expression Levels

[0162] As indicated above, the methods of this invention may be used to monitor expression levels of a gene in a wide variety of contexts. For example, where the effects of a therapeutic agent on gene expression of a primate, e.g., a human, a Cynomolgus monkey, or a Rhesus monkey, is to be determined the therapeutic agent will be administered to the primate. Nucleic acids from a biological sample from the primate and from a primate not administered the therapeutic agent may be isolated, amplified, and hybridized to a nucleotide array containing polynucleotide probes directed to the gene of interest. The expression levels of that particular gene may be determined as described above. The same method may be followed when identifying the targets of a therapeutic agent in a primate, in determining the effects of a therapeutic agent on a primate, in determining whether a specific gene is a target of a therapeutic agent, and in determining whether a putative target for a therapeutic agent is an actual target for a therapeutic agent. In one embodiment of the invention, the primate is a non-human primate, e.g., a Cynomolgus monkey or a Rhesus monkey.

[0163] The present invention moreover provides a method of predicting at least one toxic effect of a compound, comprising:

[0164] (a) detecting the level of expression of one or more genes identified as SEQ ID NOS. 1-8881 and SEQ ID NOS. 9187-18598 in a biological sample exposed to the compound;

[0165] (b) comparing the level of expression of the genes to their level of expression in a control tissue or cell sample, wherein differential expression of the genes identified as orthologs of human Tox genes in the Cynomolgus monkey, indicated as SEQ ID NOS. 1-8881 and SEQ ID NOS. 9187-18598, is evidence of at least one toxic effect.

[0166] Optionally, the present invention provides a method of predicting at least one toxic effect of a compound, comprising:

[0167] (a) detecting the level of expression of one or more genes identified as SEQ ID NOS. 1-8881 and SEQ ID NOS. 9187-18598, as well as SEQ ID NOS. 18599-35840, SEQ ID NOS. 36075-43225, and SEQ ID NOS. 36075-43225 in a biological sample exposed to the compound;

[0168] (b) comparing the level of expression of the genes to their level of expression in a control biological sample, wherein differential expression of the genes identified as orthologs of human Tox genes in the Cynomolgus monkey, indicated as SEQ ID NOS. 17249-18598, as well as differential expression of the genes identified as orthologs of human Tox genes in the Rhesus monkey, indicated as SEQ ID NOS. 18599-20526, is evidence of at least one toxic effect.

[0169] Also, as indicated above, the nucleotide array of the present invention may be used to identify biomarkers upon administration of a therapeutic agent comprising administering the therapeutic agent to a primate, e.g., a human, a Cynomolgus monkey, or a Rhesus monkey, especially to a non-human primate such as a Cynomolgus monkey or a Rhesus monkey, isolating the RNA from a biological sample from the non-human primate to yield a test sample, and hybridizing the test sample with a nucleotide array containing at least one polynucleotide probe complementary to, or a fragment of, any portion of a Cynomolgus monkey gene. Optimally, the RNA from the test sample may be amplified prior to hybridization with the polynucleotide probe of the nucleotide array. According to this method, biomarkers are detected as an increased hybridization signal intensity, as compared with genes that are not affected upon administration of the therapeutic agent. Alternatively, biomarkers are identified by determining which polynucleotide probes, attached to the surface of the nucleotide array, form hybridized commplexes with the test sample from a primate administered a therapeutic agent but do not form hybridized complexes with the control sample from a primate that was not administered a therapeutic agent. Also, biomarkers may be identified by determining which polynucleotide probes, attached to the surface of the nucleotide array, form hybridized commplexes with the test sample from a primate administered a therapeutic agent but do not form hybridized complexes with the control sample from a primate that does not respond to a therapeutic agent.

[0170] Moreover, as indicated above, the nucleotide array of this invention may be used to determine a more target-specific therapeutic agent from an initial therapeutic agent. In this case, the targets of the initial therapeutic agent may be identified as above. The structure of the initial therapeutic agent may then be modified. Then, the modified therapeutic agent may be administered to the primate. The targets of the modified therapeutic agent may then be identified as above and then compared with the targets of the initial therapeutic agent.

[0171] Furthermore, as indicated above, the nucleotide array of this invention may be used to determine single nucleotide polymorphisms. In this case, the hybridization signal of the duplex between the polynucleotide probe and the test sample from a primate with an SNP will be reduced, as observed in the mismatch controls. Thus, the hybridization signal intensity will be reduced as compared with hybridization of the polynucleotide probe for the control sample that lacks the single nucleotide polymorphism.

[0172] A non-limiting example of systems in which the nucleotide array of the present invention may be used to assay the changes in gene expression levels resulting from the administration of a therapeutic agent, especially to determine the toxicity of the therapeutic agent, is a Cynomolgus monkey system to study human diseases. Especially relevant disease models utilizing a Cynomolgus monkey system are viral infections and vaccine efficacy, such as HIV, SARS, smallpox (variola), human influenza, tuberculosis, hepatitis, and Venezuelan equine encepyhalitis. Other relevant disease models utilizing a Cynomolgus monkey system are directed to studying coronary atherosclerosis, Parkinson's disease, osteoarthritis, Alzheimer's disease, and acute experimental autoimmune encephalomyelitis.

[0173] Another aspect of the present invention, as indicated above, is a method for normalizing data comprising (a) determining the signal intensity of the hybridized complex between the test or control sample and a polynucleotide probe that is complementary to, or a fragment of, a Cynomolgus monkey gene that is known not to be up- or down-regulated upon administration of a specific therapeutic agent; (b) averaging the signal intensity of the specific hybridized complex on different nucleotide arrays; (c) determining the ratio between the average signal intensity of the specific hybridized complex on all of the nucleotide arrays and the signal intensity of the specific hybridized complex on the nucleotide array of interest; and (d) adjusting the signal intensities of the hybridized complexes between the other hybridized complexes on the nucleotide array based upon the calculated ratio. In one embodiment of the present invention, the polynucleotide probe that is complementary to, or a fragment of, a Cynomolgus monkey gene that is known not to be up- or down-regulated upon administration of a specific therapeutic agent is complementary to, or a fragment of, any portion of any of SEQ ID NOS. 1-8881 or SEQ ID NOS. 9187-18598. In another embodiment of the present invention, the polynucleotide probe that is complementary to, or a fragment of, a Cynomolgus monkey gene that is known not to be up- or down-regulated upon administration of a specific therapeutic agent is any of SEQ ID NOS. 8882-9186.

[0174] In one embodiment of the present invention, the method of normalizing data additionally comprises (a) determining the signal intensity of the hybridized complex between the test or control sample and a polynucleotide probe that is complementary to, or a fragment of, a Rhesus monkey gene that is known not to be up- or down-regulated upon administration of a specific therapeutic agent; (b) averaging the signal intensity of the specific hybridized complex between test or control sample and the polynucleotide probe that is complementary to, or a fragment of, the Rhesus monkey gene, on different nucleotide arrays; (c) determining the ratio between the average signal intensity of the specific hybridized complex on all of the nucleotide arrays and the signal intensity of the specific hybridized complex on the nucleotide array of interest; and (d) adjusting the signal intensities of the hybridized complexes between the other hybridized complexes on the nucleotide array based upon the calculated ratio. In one embodiment of the present invention, the polynucleotide probe that is complementary to, or a fragment of, a Rhesus monkey gene that is known not to be up- or down-regulated upon administration of a specific therapeutic agent is complementary to, or a fragment of, any portion of any of SEQ ID NOS. 18599-35840 or SEQ ID NOS. 36075-43225. In another embodiment of the present invention, the polynucleotide probe that is complementary to, or a fragment of, a Rhesus monkey gene that is known not to be up- or down-regulated upon administration of a specific therapeutic agent is any of SEQ ID NOS. 35841-36074.

[0175] In yet another embodiment of the present invention, the method of normalizing data additionally comprises (a) determining the signal intensity of the hybridized complex between the test or control sample and a polynucleotide probe that is complementary to, or a fragment of, a human gene that is known not to be up- or down-regulated upon administration of a specific therapeutic agent; (b) averaging the signal intensity of the specific hybridized complex between test or control sample and the polynucleotide probe that is complementary to, or a fragment of, the human gene, on different nucleotide arrays; (c) determining the ratio between the average signal intensity of the specific hybridized complex on all of the nucleotide arrays and the signal intensity of the specific hybridized complex on the nucleotide array of interest; and (d) adjusting the signal intensities of the hybridized complexes between the other hybridized complexes on the nucleotide array based upon the calculated ratio. In one embodiment of the present invention, the polynucleotide probe that is complementary to, or a fragment of, a human gene that is known not to be up- or down-regulated upon administration of a specific therapeutic agent is complementary to, or a fragment of, any portion of any of SEQ ID NOS. 43450-48714. In another embodiment of the invention, the polynucleotide probe that is complementary to, or a fragment of, a human gene that is known not to be up- or down-regulated upon administration of a specific therapeutic agent is any of SEQ ID NOS. 43226-43449.

[0176] Furthermore, the nucleotide array of the present invention may be utilized in an in vitro system. The gene expression upon exposure of a therapeutic agent to an isolated cell line may be assayed by exposing the therapeutic agent to a cell line isolated from a primate, e.g., a cell line isolated from a human, a cell line isolated from a Cynomolgus monkey, or a cell line isolated from a Rhesus monkey, especially a cell line isolated from a non-human primate such as a Cynomolgus monkey or a Rhesus monkey, isolating the RNA from the cell line to yield a test sample, and hybridizing the test sample with the nucleotide array of interest. In one embodiment, the changes in gene expression are detected by comparing the hybridization pattern of the nucleotide array exposed to the test sample of a cell line from a primate exposed to a therapeutic agent with the hybridization pattern of a nucleotide array exposed to the control sample of a cell line from a primate that was not exposed to a therapeutic agent.

[0177] Examples of in vitro systems in which the nucleotide array of the present invention may be utilized are those directed to cancer, skin permeation, cytotoxicity, embryonic stem cell lines, expression of cytochrome P-450 and other metabolizing enzymes, endocrine disruption, genetic toxicity, metabolism-mediated toxicity, and hepatocyte models of liver toxicity.

[0178] The following examples are illustrative, but not limiting, of the methods of the present invention. Other suitable modifications and adaptations of the variety of conditions and parameters normally encountered in the field, and which are obvious to those skilled in the art, are within the spirit and scope of the invention.

[0179] All patents and publications cited herein are fully incorporated by reference herein in their entirety.

### EXAMPLES

### Example 1

### Generation of Cynomolgus EST Sequences

[0180] Libraries were generated from mRNA isolated from ten Macaca fascicularis tissues. The origin of the Macaca fascicularis was Indonesia.

[0181] Nine non-normalized, oligo-dT primed directionally clone libraries were generated from bone marrow, spleen, skin, thymus, heart, lung, liver, kidney, and lymph node. A normalized, oligo-dT primed library was generated from brain tissue. To manage the redundancy, the gene discovery rate was monitored after sequencing every 2000 reads from every library. Libraries with higher estimated gene discovery rate were sequenced at a greater depth compared to other libraries.

[0182] The specific tissue of the Macaca fascicularis was ground using a mortar and pestle in liquid nitrogen to form a fine powder. The finely ground powder was dissolved in TriZOL reagent and then homogenized with a Polytron Homogenizer. Following centrifugation, total RNA was precipitated from the supernatant using isopropyl alcohol. The RNA was resuspended in RNAse free water, quantitated using UV spectrophotometry, and analyzed by formaldehyde gel.

[0183] The mRNA was isolated from each total RNA sample by binding the mRNA to oligo-dT beads in a hybridization buffer, washing contaminating particles away with a wash buffer, and eluting the mRNA in RNAse free water.

[0184] The primary libraries were constructed by first strand cDNA synthesis of mRNA using an oligo-dT primer containing a rare restriction enzyme site and an RNAse H+ reverse transcriptase under proprietary conditions (Agencourt Bioscience Corporation).

[0185] Second strand cDNA was synthesized using standard methods of Gubler and Hoffman. See U. Gubler & B. J. Hoffman, Gene, 25:263-69 (1983), herein incorporated by reference.

[0186] The cDNA was analyzed by agarose gel. The size of the cDNA was selected to be greater than 1.2 kb. The selected cDNA was purified and then ligated into a suitably digested pAgen vector. The ligations were transformed into T1 phage resistant DH10B cells.

[0187] The transformed cells were then plated to determine titer. Twenty clones were selected for digestion to determine average insert size.

[0188] Normalized cDNA libraries were prepared by in vitro transcription of primary library DNA to make biotinylated RNA anti-sense to the cloned cDNA. In addition, phagemid infection of the primary library was used to produce single stranded DNA circles containing the sense strand of the cDNA clone. The antisense RNA and sense DNA were hybridized using conditions that favor the hybridization of abundantly expressed sequences. Double stranded structures were removed via strepavidin/phenol extraction leaving single stranded DNA circles representing the normalized library. The circles are repaired to double strand form and electroporated back into TI phage resistant DH10B E. coli cells.

[0189] A total of 100,000 3′ ESTs were generated and subjected to quality control using a combination of the software LUCY and in-house perl scripts.

[0190] Specifically, the libraries were plated to a density of 1000-2000 colonies/plate and then picked using an automated picking robot into bar-coded 384-well glycerol plates. The 384-well glycerol plates were processed through an automated DNA preparation pipeline that utilized the SprintPrep™ technology.

[0191] Sequencing was then accomplished by standard sequencing methods utilizing BigDye™ chemistry on ABI 3730 sequencing machines. The sequences results were downloaded from the machines and processed through the PHRED basecalling program. PHRED is a software that reads the bases and assigns a quality value for each base in the trace. See B. Ewing & P. Green, Genome Research, 8:186-94 (1998).

[0192] The average length of the raw sequence was 824 bp. The average PHRED score/trace was 32.

[0193] The quality control steps included removal of low quality, vector, contaminant, ribosomal, and mitochondrial traces, and clipping of traces with low quality ends and/or presence of vector sequences.

[0194] The vector sequences and low quality bases were removed using LUCY. See H. H. Chou & M. H. Holmes, Bioinformatics, 17:1093-1104 (2001).

[0195] The default settings were used for both PHRED and LUCY.

[0196] The sequences were next screened for E. coli, rRNA, mitochondrial DNA using Cross-match (minmatch=14; miniscore=100; screen=0). Cross-match is an implementation of the Smith-Waterman-Gotoh algorithm that may be used to compare nucleic acid sequences.

[0197] After the quality control steps, a total of 80,147 good quality sequences were generated. These good quality sequences were used for further analysis. The average length of the good quality sequences was 620 bp. The average PHRED score/trace of the good quality sequences was 43. The Cynomolgus sequences mapped to about 9,000 human genes.

[0198] The heart library did exhibit a high content of mitochondrial genes.

### Example 2

### Clustering of Cynomolgus EST Sequences

[0199] The good quality ESTs were clustered and assembled using the combination of CAT (version 4.5) and PHRAP softwares. See Burke et al., Genome Research 8:276-90 (1998). The default settings were used except for the following: (a) minimum overlap (d2_window) was set to 75 bp, (b) overlap identity (d2_string) was set to 93%, (c) the filter option was turned on (low_complexity=1; simple=1, repeats=1). Repeats were screened against repeat database present in the CAT software, as well as against the Repbase database. See J. Jurka, Current Opinion in Structural Biology, 8:333-37 (1998).

[0200] Two sequences were brought into the same cluster if they had an overlap of 75 bp and 93% identity. Unmatched overhangs in the cluster were split by PHRAP, which was used to create the consensus sequences. A majority of the singletons identified in the penultimate round of clustering were resequenced and added to the final assembly.

[0201] The assembled sequences were then checked for orientation. The unigenes were compared to Ensembl human cDNAs using BLASTN with an Evalue<10⁻⁵. The unigenes were also compared against the human genome using BLAT. The default settings were used for BLAT.

[0202] The unigenes were reverse complemented if the orientation was inconsistent with either the orientation of the Ensembl human cDNA or the orientation of the annotated genes in the genome. In those cases, both the forward and reverse sequences were used in the design of the chip.

[0203] A total of 80,147 ESTs were assembled into 16,357 unigenes. Of these, 3,335 remained as singletons.

[0204] The assembly was examined to understand the distribution of ESTs among the unigenes. A total of 11,702 unigenes (71.5%) contained more than one, but less than 10, EST members. A total of 109 unigenes had greater than 50 EST members.

[0205] ESTs from the brain tissue were represented in 41% of the unigenes. At the lower end, the ESTs from the heart tissue were represented in 9.5% of the unigenes and the ESTs from the liver tissue were represented in 10.9% of the unigenes. The ESTs from the other tissues were more or less evenly represented.

[0206] The percent of library-specified unigenes were computed to investigate the specificity of transcripts across the sampled tissues. A library-specific unigene was defined as a unigene with EST members unique to one of the sequenced libraries. A total of 9,588 unigenes (58.6%) contained members unique to a library. 3,032 (18.5%) unigenes were specific to brain tissue. The specificity for other libraries ranged from 2% (heart) to 6.3% (lymph node).

[0207] The rate of gene discovery was evaluated for each library by calculating the percent unigenes (total number of contigs and singletons divided by the number of good quality ESTs). The normalized brain library had the highest rate of gene discovery and was deeply sampled. Seven of the remaining nine non-normalized libraries exhibited similar levels of redundancy within the libraries. The liver and heart libraries exhibited higher levels of redundancy and were not deeply sampled.

[0208] After several rounds of sequencing, the percent unigenes across libraries ranged from 35% to 52%, with most of the libraries clocking at the higher end of this range.

### Example 3

### Identification of Cynomolgus Gene Sequences

[0209] Publicly available Macaca fascicularis sequences were also utilized in the construction of the monkey chip. A total of 2,773 Macaca fascicularis transcript sequences were obtained from Genbank. The sequences were processed as described above, except that the sequences were not processed using PHRED. These sequences were assembled separately using the methods described above. The assembly process resulted in 2,170 sequences.

### Example 4

### Generation of Rhesus EST Sequences

[0210] Macaca mullata mRNA sequences available in Genbank were utilized in the construction of the monkey chip. A total of 20,139 Macaca mullata transcript sequences were obtained from GenBank. However, trace quality information was not available for most of these sequences. Also, most of the Macaca mullata transcript sequences in Genbank appeared to be complementary to the 5′ end.

[0211] These mRNA sequences were processed as described in Example 1, with the exception that the sequences were not processed using PHRED.

### Example 5

### Identification of Rhesus Gene Sequences

[0212] The sequences and accompanying files for 2,330,205 whole genome shotgun sequences from the Human Genome Sequencing Center at Baylor College of Medicine were downloaded from the NCBI traces archive. The 5′ and 3′ ends of the sequences were trimmed to remove any vector or poor quality sequence. The BLAT results were post-processed, as described below, to omit potential intron regions from the sequence.

[0213] Each BLAT alignment can have multiple blocks (analogous to HSPs in BLAST) associated with it. For each BLAT hit, the total score was divided by the sum of all block lengths to calculate the score per nucleotide. If adjacent blocks were separated by a gap that represented less than 5% of the sum of their lengths, those blocks were merged into a single block. Consequently, multi-blocked entries were consolidated into one or more single block entries. Then, the scores of the single block entries were calculated as the total block length multiplied by the entry's score per nucleotide. From these results, the highest-scoring human genome block was identified for each Rhesus genomic sequence (RGS).

[0214] The genomic locus of each top scoring hit was cross-referenced against the locations of known human genes to determine whether or not the RGS likely represented a coding sequence (“RGS-Coding”) or an UTR sequence (“RGS-putative 3′UTR”). An RGS that did not align with a locus at which an exon or UTR was annotated were removed from further analysis. The remaining RGS's were BLASTed against all Ensembl build #33 cDNAs. The BLAST and BLAT results were compared to each other to ensure that the gene that was found using the BLAT approach was also present in the BLAST results.

[0215] Each RGS was then consolidated into transcripts using human transcripts as a template. The segment of each RGS that aligned to an Ensembl transcript was cut out (e.g., alignment with the transcript may be interrupted by an intron). If more than one RGS covered the same locus of a gene, the sequences were consolidated using PHRAP. Then, for the final files of assembled RGS's, if the Rhesus DNA segments did not exhibit a continuous alignment across a human gene, the sequence segments were separated with the appropriate number of Ns.

[0216] For the more than half of the human Ensembl genes that do not have defined 3′ UTRs, the annotated 3′ coordinates correspond to the stop codon of the gene. Because the DNA chip technology depends on the proximity to the 3′ end of the transcript, the longest RGS that aligned to a sequence within 1 kilobase downstream of each stop codon of the gene was also collected. These sequences were considered to be putative 3′ UTRs.

[0217] The 3 sets of Rhesus sequences needed to be merged (the Rhesus public ESTs described in Example 3 and the RGS-putative 3′ UTRs and RGS-Coding described in Example 4) to avoid redundant, overlapping sequences. The merger approach involved having the EST sequences take precedence over either the RGS-putative 3′ UTRs or the RGS-Codings, because the EST sequences were known, expressed sequences.

[0218] RGS-Codings were BLASTed against a database of public Rhesus EST sequences. If sequences that represent the same Ensembl transcript were found to overlap by more than 50 bp, with a greater than 90% identity, the RGS-Coding was removed from the master sequences file. The Rhesus ESTs were pooled with the remaining RGS-Codings and these sequences were BLASTed against a database of RGS-putative 3′ UTRs (10⁻⁵). Any RGS-putative 3′ UTR that was hit was removed from the master file of the RGS-putative 3′ UTR sequence file.

[0219] A total of 18,897 sequences were used for further analysis. These sequences were clustered and assembled as described in Example 1, resulting in 10,875 unigenes, of which 7,317 were singletons. There were 6,886 ENSEMBL transcripts were covered by the Rhesus unigenes, some of them were covered by more than one unigene. Additionally, 2,161 Rhesus unigenes did not map to any ENSEMBL transcripts.

[0220] The summary of the transcription data is shown in Table 1 below.

TABLE 1

| | | Tissues | | | | | | | | | | | |
|---|---|---|---|---|---|---|---|---|---|---|---|---|---|
| | | | | Cyno | | Cyno | | Cyno | | Cyno | | Cyno | |
| | Total | All | | heart | | brain | | lung | | liver | | kidney | |
| Sequences | Num Seq | Number | Percent | Number | Percent | Number | Percent | Number | Percent | Number | Percent | Number | Percent |
| All | 51724 | 48365 | 94% | 29252 | 57% | 31534 | 61% | 28379 | 55% | 27796 | 54% | 24274 | 47% |
| Human | 5606 | 4799 | 86% | 2289 | 41% | 2487 | 44% | 2013 | 36% | 1947 | 35% | 1680 | 30% |
| Cyno | 20426 | 19925 | 98% | 13882 | 68% | 14962 | 73% | 14001 | 69% | 13758 | 67% | 12074 | 59% |
| Rhesus | 27074 | 25006 | 92% | 14211 | 52% | 15229 | 56% | 13528 | 50% | 13226 | 49% | 11588 | 43% |

| | | Rhesus | | Rhesus | | Rhesus | | Rhesus | | Rhesus | |
|---|---|---|---|---|---|---|---|---|---|---|---|
| | Total | heart | | brain | | lung | | liver | | kidney | |
| Sequences | Num Seq | Number | Percent | Number | Percent | Number | Percent | Number | Percent | Number | Percent |
| All | 51724 | 30451 | 59% | 31991 | 62% | 30674 | 59% | 24705 | 48% | 28000 | 54% |
| Human | 5606 | 2385 | 43% | 2517 | 45% | 2239 | 40% | 1722 | 31% | 1984 | 35% |
| Cyno | 20426 | 14086 | 69% | 14974 | 73% | 14688 | 72% | 12083 | 59% | 13649 | 67% |
| Rhesus | 27074 | 14974 | 55% | 15533 | 57% | 14774 | 55% | 11752 | 43% | 13312 | 49% |

### Example 6

### Polynucleotide Probe Design and Selection

[0221] Polynucleotide probes were designed using standard design guidelines and algorithms as outlined in Affymetrix literature “GeneChip® Custom Array Design Guide” and “New Statistical Algorithms for Monitoring Gene Expression on GeneChip® Probe Arrays”, herein incorporated by reference. The polynucleotide probes were designed with a 3′ bias in which the terminal 600 bases of the transcript were targeted.

[0222] Each polynucleotide probe set was assigned a quality score based on predicted hybridization efficiency. The quality score was lowered if the polynucleotide probe was likely to cross-hybridize or overlapped with another polynucleotide probe.

[0223] In addition to the quality score, whether a particular polynucleotide probe was included on the nucleotide array was dependent upon the type of probe set—whether the probe set was unique, identical, or mixed. A unique probe set is a probe set in which each polynucleotide probe hybridizes to only one nucleic acid. An identical probe set is a probe set in which the polynucleotide probes will hybridize to more than one nucleic acid. A mixed probe set is a probe set in which different polynucleotide probes within the probe set hybridize with differing nucleic acid sequences.

[0224] All polynucleotide probe sets with a quality score ≧2.34 were included on the nucleotide array. Then, the highest scoring unique and identical probe sets containing polynucleotide probes that were complementary to, or were fragments of, Cynomolgus monkey genes or Rhesus monkey genes, but had a quality score lower than 2.34 were included on the nucleotide array until there was no additional space on the nucleotide array. The final cut-off score was 1.7437.

[0225] Multiple polynucleotide probe sets exist on the nucleotide array for some nucleic acids due to redundancy between the Cynomolgus monkey and Rhesus monkey sequences.

[0226] To maximize the nucleotide array content, human sequences for which no primate ortholog was identified were included on the nucleotide array.

### Example 7

### Nucleotide Array

[0227] The nucleotide array may be prepared by any method known to a person of ordinary skill in the art. Particular examples of such methods that may be utilized for each of these steps are disclosed in Affymetrix literature “Array Design for the Gene Chip® Human Genome U133 Set”, U.S. Patent Application No. 2004/0259124, and U.S. Pat. Nos. 5,412,084; 6,147,205; 6,262,216, 6,310,189; 5,889,165; and 5,595,098, incorporated herein by reference.

[0228] Specifically, the nucleotide array was prepared utilizing photographic methods. See J. W. Jacobs & S. P. Fodor, Trends in Biotechnology, 12:19-26 (1994); L. T. Mazzola & S. P. Fodor, Biophys. J, 68:1653-1660 (1995), herein incorporated by reference.

[0229] The nucleotide array contained 51,724 total probesets. Specifically, 19,917 probesets contained polynucleotide probes that were complementary to, or fragments of, Cynomolgus monkey sequences. The nucleotide array contained 12,178 probesets that contained polynucleotide probes that were complementary to, or fragments of, Rhesus monkey genomic sequences (“RGS-Coding”). The nucleotide array also contained 9,111 and 4,983 probesets containing polynucleotide probes that were complementary to, or fragments of, Rhesus ESTs and Rhesus monkey putative 3′UTR (“RGS-putative 3′UTR”), respectively. Finally, the nucleotide array contained 5,526 probesets containing polynucleotide probes that were complementary to, or fragments of, human genomic sequences, as well as 9 negative controls.

[0230] Each probeset consisted of 13 polynucleotide probes per sequence. Each polynucleotide probe was 25 nucleotides in length.

[0231] The nucleotide array was designed such that 40,174 probesets were unique sets that only recognized one nucleic acid, 7,421 probesets were identical sets that would recognize more than one nucleic acid, and 2,209 probesets were mixed sets in which some polynucleotide probes would cross-hybridize with other nucleic acid sequences.

[0232] Of the 1,739 human Tox genes, 1,689 were attached to the surface of the nucleotide array.

[0233] Several control polynucleotide probe sets were also included on the nucleotide array to assist in evaluating performance of the nucleotide array and to scale the hybridization intensity data.

[0234] First, non-eukaryotic hybridization controls (bioB, bioC, bioD, and cre) were included on the nucleotide array as normalization controls to monitor the performance of the hybridization, staining, and washing procedures.

[0235] Second, polynucleotide probe sets for several B. subtilis genes (dap, lys, phe, and thr) were included on the nucleotide array to assess the labeling process independent of the sample RNA quality.

[0236] Third, edge controls, corner checkerboards, and a center cross were included on each nucleotide array for grid alignment purposes.

[0237] Fourth, polynucleotide probe sets representing beta-actin and glyceraldehyde-3-phosphate dehydrogenase were also included on the nucleotide array. Polynucleotide probe sets were designed to the 5′, middle, and 3′ regions of these transcripts to control for RNA quality and labeling efficiency.

[0238] Polynucleotide probe sets representing 100 normalization control genes that are homologous to those included on the human U133 Plus 2.0 array were included on the nucleotide array of the present invention for cross-array comparisons.

### Example 8

### Sample Preparation for Gene Expression Analysis

[0239] The nucleotide array was used to examine the basal gene expression in the cerebellum, heart, liver, kidney, and lung tissues from naïve female Cynomolgus monkeys and male Rhesus monkeys.

[0240] The particular tissue of interest was homogenized in freshly prepared RLT buffer (Qiagen). The total RNA from the tissue was isolated using RNeasy columns (Qiagen) according to the manufacturer's protocol.

[0241] The isolated RNA was reverse transcribed into double-stranded cDNA. The double-stranded cDNA was reverse transcribed using a T7-oligo(dT) primer, SuperScript™ II reverse transcriptase, and the Affymetrix One Cycle cDNA Synthesis Kit. The steps of the reverse transcription reaction were performed as outlined in the Affymetrix One Cycle cDNA Synthesis Kit. The synthesized cDNA was purified using spin columns from the Affymetrix Sample Cleanup Module, according to the manufacturer's instructions.

[0242] Biotinylated cRNA was synthesized from the double-stranded cDNA utilizing the Affymetrix IVT Labeling Kit. The purified cDNA was primed using a T7 primer and T7 RNA polymerase. All of the in vitro transcription reactions were performed according to the manufacturer's protocol. The transcribed, biotinylated cRNA was then purified using spin columns.

[0243] The biotinylated cRNA was then fragmented using the Affymetrix Sample Cleanup Module in 5× Fragmentation Buffer, in accordance with the manufacturer's instructions.

[0244] Then, the fragmented biotinylated cRNA was hybridized overnight with the polynucleotide probes of the nucleotide array, as detailed in the Affymetrix GeneChip® Expression Analysis Technical Manual 701025/Rev 6 (Affymetrix, Santa Clara, Calif.).

[0245] The nucleotide arrays containing the hybridized complexes were washed and stained using the EukGE-WS2 antibody amplification protocol as detailed in the Affymetrix GeneChip® Expression Analysis Technical Manual 701025/Rev 6 (Affymetrix, Santa Clara, Calif.).

[0246] The samples were processed according to the general procedures outlined within the GeneChip® Operating Software (“GCOS”) and Rosetta Resolver v4.0.1.78 software packages. The library files for the nucleotide array were uploaded into Resolver for each of the Cynomolgus and Rhesus monkeys. One specific Cynomolgus monkey and one specific Rhesus monkey pattern file was created.

[0247] Data from each scan were uploaded into Resolver manually using the GeneChip® Migration Wizard. The appropriate pattern specified was dependent upon the specifies from the fragmented, biotinylated RNA hybridized to the nucleotide array was derived.

[0248] The software's error model was applied as the default “intensity profiles” were built, as described in Rosetta Technical Note (2001). Rosetta Resolver Application Error Model for Affymetrix GeneChip Microarray Data. (Rosetta Biosoftware, Seattle, Wash.). The intensity profiles for each nucleotide array hybridized with Cynomolgus fragmented, biotinylated cRNA were selected and a trend analysis was performed. Each profile was labeled with an integer from 0 to 21, with the profiles sorted in alphabetical order. Once the trend was built, the calculated p-values for each transcript were exported as a tab separated text file with an .xls extension using the data export tool. These same steps were utilized in building a trend for the Rhesus scans.

[0249] The total fluorescence intensities of each nucleotide array were scaled to 250 prior to comparison analysis. The data were filtered in DMT for signal log ratio (−1_SLR_{—}1) and gene detection (designated as “present” or “absent”). In this experiment, all transcripts called “marginal” by the Affymetrix algorithm were considered “present”.

[0250] The summary of the transcription data is shown in Table 1 above in Example 5.

[0251] The presence or absence of each transcript in the tissue of interest is shown in Table 2.

### Example 9

### Toxicogenomic Screening Using the Nucleotide Array

[0252] A therapeutic agent will be administered to a non-human primate, e.g., a Cynomolgus or Rhesus monkey, according to an appropriate treatment protocol and dosing schedule. A separate group of non-human primates of the same species will be designated as the control group. The members of the control group will not be administered the therapeutic agent of interest.

[0253] At the end of the treatment protocol, the non-human primates of both the test and the control groups will be sacrificed. The following tissues may be collected as the biological sample(s) for toxicogenomic and histopathology analysis from the non-human primates of both the test and control groups: liver, pancreas, kidneys, uterus, testes, thyroid, brain, heart, ovaries, spleen, thymus, prostate, colon, and/or lungs. Each sample of interest for the toxicogenomics analysis will be submerged in RNALater TissueProtect Tubes (Qiagen) and cut into small pieces. Each sample of interest will remain in the solution for at least 30 minutes at room temperature.

[0254] The RNA from the biological sample from the test and control non-human primates will be isolated. The RNA will be reverse transcribed to generate cDNA. The generated cDNA will be transcribed in vitro to generate labeled RNA. The labeled RNA will be fragmented to generate the test and control samples. The labeled RNA of the test and control samples will be hybridized to the nucleotide array containing the polynucleotide probes complementary to, or fragments of, any portion of any of SEQ ID NOS. 1-8881, SEQ ID NOS. 9187-18598, SEQ ID NOS. 18599-35840, SEQ ID NOS. 36075-43225, and SEQ ID NOS. 43450-48714, as well as the polynucleotide probes of any of SEQ ID NOS. 8882-9186, SEQ ID NOS. 35841-36074, and SEQ ID NOS. 43226-43449, immobilized to the solid surface of the nucleotide array. The nucleotide array will then be washed and stained to visualize the hybridization pattern. The hybridization pattern of the test group will then be compared with the hybridization pattern of the control group to determine which non-human primate genes were up- or down-regulated in response to the administered therapeutic agent.

[0255] The RNA isolation, reverse transcription steps, in vitro transcription, RNA labeling, fragmentation, hybridization, washing, and staining steps may be any method known by a person of ordinary skill in the art. Particular examples of such methods that may be utilized for each of these steps are disclosed in U.S. Pat. Nos. 5,837,832; 6,306,643 B1; 6,309,823 B1, 6,344,316 B1; and 6,410,229 B1, incorporated herein by reference.

### Example 10

### Use of the Nucleotide Probe in a Primate System

[0256] A non-human primate, e.g., a Cynomolgus monkey or a Rhesus monkey, will be infected with a particular virus of interest, including, but not limited to HIV, SIV, SARS, human influenza, small pox (variola), tuberculosis, hepatitis, or Venezuelan equine encaphalitis. Then, the non-human primate may be treated with a therapeutic agent according to an appropriate treatment protocol and dosing schedule. A separate group of non-human primates of the same species will be designated as the control group. The members of the control group will not be administered the therapeutic agent of interest.

[0257] At the end of the treatment protocol, the non-human primates of both the test and the control groups will be sacrificed and the biological sample(s) of the test and control non-human primates will be collected and prepared as described above in Example 9. The test and control samples will be prepared as described above in Example 9. Then, the labeled RNA of the test and control samples will be hybridized to the nucleotide array containing the polypeptide probes complementary to, or fragments of, any portion of any of SEQ ID NOS. 1-8881, SEQ ID NOS. 9187-18598, SEQ ID NOS. 18599-35840, SEQ ID NOS. 36075-43225, and SEQ ID NOS. 43450-48714, as well as the polynucleotide probes of any of SEQ ID NOS. 8882-9186, SEQ ID NOS. 35841-36074, and SEQ ID NOS. 43226-43449, as described above in Example 9. The hybridization pattern of the test group will then be compared with the hybridization pattern of the control group to determine which non-human primate genes correlate to a response to the administered therapeutic agent and/or toxic reactions to the therapeutic agent in a non-human primate infected by the virus of interest.

### Example 11

### Serum Analysis to Identify Genes Correlating to Drug Response or Toxicity Using the Nucleotide Array

[0258] A therapeutic agent will be administered to a non-human primate, e.g., a Cynomolgus or Rhesus monkey, according to an appropriate treatment protocol and dosing schedule. A separate group of non-human primates of the same species will be designated as the control group. The members of the control group will not be administered the therapeutic agent of interest.

[0259] At the beginning and end of the treatment period, serum samples will be collected from the non-human primates of both the test and control groups. The RNA will be isolated from the serum samples using QIAamp (Qiagen) according to the manufacturers' instructions. The test and control samples will be prepared as described above in Example 9. Then, the labeled RNA of the test and control samples will be hybridized to the nucleotide array containing the polypeptide probes complementary to, or fragments of, any portion of any of SEQ ID NOS. 1-8881, SEQ ID NOS. 9187-18598, SEQ ID NOS. 18599-35840, SEQ ID NOS. 36075-43225, and SEQ ID NOS. 43450-48714, as well as the polynucleotide probes of any of SEQ ID NOS. 8882-9186, SEQ ID NOS. 35841-36074, and SEQ ID NOS. 43226-43449, as described above in Example 9. The hybridization pattern of the test group will then be compared with the hybridization pattern of the control group to determine which non-human primate genes correlate to a response to the administered therapeutic agent and/or toxic reactions to the therapeutic agent.

### Example 12

### Use of the Nucleotide Probe in an In Vitro System

[0260] An in vitro cell culture of a non-human primate, e.g., a Cynomolgus monkey or a Rhesus monkey, will be exposed to a therapeutic agent according to an appropriate treatment protocol and dosing schedule. A separate in vitro cell culture of the same species will be designated as the control group. The cell culture of the control group will not be administered the therapeutic agent of interest.

[0261] At the end of the treatment protocol, the cells will be harvested using an appropriate protocol. The RNA will be isolated from the harvested cells and the test and control samples will be prepared as described above in Example 9. Then, the labeled RNA of the test and control samples will be hybridized to the nucleotide array containing the polypeptide probes complementary to, or fragments of, any portion of any of SEQ ID NOS. 1-8881, SEQ ID NOS. 9187-18598, SEQ ID NOS. 18599-35840, SEQ ID NOS. 36075-43225, and SEQ ID NOS. 43450-48714, as well as the polynucleotide probes of any of SEQ ID NOS. 8882-9186, SEQ ID NOS. 35841-36074, and SEQ ID NOS. 43226-43449, as described above in Example 9. The hybridization pattern of the test group will then be compared with the hybridization pattern of the control group to determine which non-human primate genes correlate to a response to the administered therapeutic agent and/or toxic reactions to the therapeutic agent in a non-human.

### Example 13

### Expression of Tissue Specific Genes

[0262] Samples of right ventricle and cerebellum tissues were taken from a Cynomolgus and a Rhesus monkey. These samples were hybridized to the nucleotide array of Example 7. A selection of genes that were expressed in one tissue and not the other, for both species, was clearly related to the organ in question.

Study Design

[0263] Right ventricle and cerebellum tissues were selected for transcript profiling, based on a large difference in transcripts present in one tissue and not the other. These organs were obtained from a Rhesus macaque and a Cynomolgus macaque and samples were removed for transcript profiling. Each tissue from each species was hybridized to six nucleotide arrays from Example 7, for a total of 24 nucleotide arrays used for the experiment.

Processing of Samples and Quality Control for Transcript Profiling

[0264] Sample homogenization, total RNA extraction, labeling, and hybridization procedures were performed by GeneLogic according to Affymetrix recommended protocols and standard procedures. Quality control consisted of measurement of A₂₆₀/A₂₈₀ ratios to assess protein contamination. RNA degradation and genomic DNA contamination were also assessed, using the Agilent Bioanalyzer.

[0265] cDNA and labeled cRNA were prepared using Affymetrix kits according to standard procedures. cRNA A₂₆₀/A₂₈₀ ratios were measured to check quality. The cRNA samples were then fragmented, hybridized onto the nucleotide arrays of Example 7 and scanned. Scan quality was assessed by examining background intensity, scaling factor, percent present calls, GAPDH 3′/5′ ratios, and beta actin 3′/5′ ratios. Values that were outside 3 standard deviations from the mean were flagged.

[0266] (a) Data Acquisition and Reduction

[0267] Affymetrix GeneChip Operating Software (“GCOS”) was used for instrument control and data acquisition according to the manufacturer's instructions. Affymetrix Technical Note (2003). Standardized Assays and Reagents for GeneChip Expression Analysis. Part Number 701192/Rev3 (Affymetrix, Santa Clara, Calif.). Briefly, after scanning the microarray, GCOS identified and utilized the signal from spiked-in controls (Oligo B2) to align a grid to the scanned image. Intensity values for each feature were calculated by taking the median intensity of all pixels assigned to the feature. Global normalization was performed to compensate for chip-to-chip variability by scaling the intensity values on each chip to a median of 250. These scaled data were saved in a CEL file, which includes the X and Y coordinates of each probe feature, intensity mean and standard deviation, the number of pixels used for calculating intensity values, and background intensity. The data in the .CEL file and the associated images were subsequently manually uploaded into Rosetta Resolver using the Rosetta GeneChip Migration Wizard.

[0268] “Experiment Definitions” (“ED's”) were constructed in Rosetta Resolver to facilitate data processing and analysis. All definitions used the Affymetrix—Intensity Profile Builder visual script to compute error model statistics and p-values, the Affymetrix—Intensity Experiment Builder (no Reporters) visual script to perform normalization and combine intensities across chips, and the Affymetrix—Default Ratio Builder visual script to create ratios and compute p-values. Rosetta Technical Note (2001). Rosetta Resolver Application Error Model for Affymetrix GeneChip Microarray Data. (Rosetta Biosoftware, Seattle, Wash.). The majority of analysis was performed using the individual ratios or intensities; however, the average fold change or intensity results from the group analyses are reported for clarity.

[0269] (b) Data Analysis

[0270] The list of probe sets corresponding to transcripts that were uniquely expressed in each tissue, for each species, was generated. The Rosetta Resolver intensity p-value (Rosetta Technical Note (2001). Rosetta Resolver Application Error Model for Affymetrix GeneChip Microarray Data. (Rosetta Biosoftware, Seattle, Wash.)) was used to determine whether the transcripts were expressed or not. A transcript with a p-value ≦0.01 was considered “present”; a transcript with a p-value >0.04 was considered “absent”. For each species, the list of probe sets that was present in all six replicates of one tissue, and absent in all six replicates of the other tissue was selected.

[0271] The annotations of these probe sets, derived from BLAST searches across the human and other genomes, was obtained. These lists were compared with the list of genes present in human cerebellum and not ventricle, or present in ventricle and not cerebellum, obtained from the ASCENTA database (https://ascenta.genelogic.com). Genes intersecting between all three species (separately for each tissue) were found. Those specifically related to either the brain or heart are shown in the results section below.

Results

[0272] Genes uniquely expressed in both Rhesus and Cynomolgus monkeys, in each tissue type (cerebellum or ventricle) specifically related to the organ in question, are shown in Tables 3 and 4 below.

TABLE 3
Cerebellum Specific Genes Consistent across Human,
Cynomolgus Monkey, and Rhesus Monkey

| SEQ ID NO | SEQ ID NO | | |
|---|---|---|---|
| (Rhesus | (Cynomolgus | | |
| Monkey) | Monkey) | Gene Name | Description |
| 16762 | 16762 | CTNND2 | catenin (cadherin-associated protein), delta 2 (neural |
| | | | plakophilin-related arm-repeat protein) |
| 19111 | 19111 | FABP7 | fatty acid binding protein 7, brain |
| 26023 | 26023 | GAD1 | glutamate decarboxylase 1 (brain, 67 kDa) |
| | 31000 | | |
| 27765 | 27765 | MT3 | metallothionein 3 (growth inhibitory factor (neurotrophic)) |
| 13908 | 13908 | NEF3 | neurofilament 3 (150 kDa medium) |
| 35417 | 15856 | NEFH | neurofilament, heavy polypeptide 200 kDa |
| 15856 | | | |
| 13197 | 13197 | NEFL | neurofilament, light polypeptide 68 kDa |
| 9477 | 9477 | | |
| 30232 | 30232 | NEUROD1 | neurogenic differentiation 1 |
| 9742 | 9742 | NPTX1 | neuronal pentraxin I |
| 27576 | 27576 | | |
| 28290 | 28290 | NRXN2 | neurexin 2 |
| 21336 | 21336 | NRXN3 | neurexin 3 |
| 27842 | 27842 | | |
| 45104 | 45104 | | |
| 17996 | 20511 | NTRK2 | neurotrophic tyrosine kinase, receptor, type 2 |
| 21471 | 21471 | RIMS2 | regulating synaptic membrane exocytosis 2 |
| 34809 | 34809 | SGNE1 | secretory granule, neuroendocrine protein 1 (7B2 protein) |
| 14873 | 14873 | | |
| 24164 | 32081 | SNAP25 | synaptosomal-associated protein, 25 kDa |
| 32081 | 11319 | | |
| 11319 | | | |
| 13915 | 13915 | SV2A | synaptic vesicle glycoprotein 2A |
| 22387 | 22387 | | |
| 31843 | 31843 | SV2B | synaptic vesicle glycoprotein 2B |
| 22443 | 22443 | SYN2 | synapsin II |
| 29443 | 29443 | | |
| 27656 | 27656 | SYNPR | synaptoporin |
| 9722 | 9722 | | |
| 12578 | 12578 | SYT1 | synaptotagmin I |
| 16039 | 16039 | SYT4 | synaptotagmin IV |
| 25031 | 25031 | | |

[0273] TABLE 4
Ventricle Specific Genes Consistent across Human,
Cynomolgus Monkey, and Rhesus Monkey

| SEQ ID NO | SEQ ID NO | | |
|---|---|---|---|
| (Rhesus | (Cynomolgus | | |
| Monkey) | Monkey) | Gene Name | Description |
| 12401 | 12401 | CMYA4 | cardiomyopathy associated 4 |
| 34797 | | | |
| 34539 | 34539 | CMYA5 | cardiomyopathy associated 5 |
| 20496 | 20496 | FABP3 | fatty acid binding protein 3, muscle and heart (mammary- |
| | | | derived growth inhibitor) |
| 26129 | 26129 | JUP | junction plakoglobin |
| 12605 | 12605 | MYBPC3 | myosin binding protein C, cardiac |
| 27853 | 27853 | MYH6 | myosin, heavy polypeptide 6, cardiac muscle, alpha |
| | | | (cardiomyopathy, hypertrophic 1) |
| 12302 | 26413 | MYH7 | myosin, heavy polypeptide 7, cardiac muscle, beta |
| 26413 | 12302 | | |
| 11571 | 11571 | MYL2 | myosin, light polypeptide 2, regulatory, cardiac, slow |
| 30554 | | | |
| 30229 | 30229 | MYL3 | myosin, light polypeptide 3, alkali; ventricular, skeletal, slow |
| 10572 | 32928 | MYOZ2 | myozenin 2 |
| 32928 | 10572 | | |
| 11930 | 34885 | NRAP | nebulin-related anchoring protein |
| 34885 | | | |
| 10712 | 10712 | PLN | phospholamban |
| 9320 | 9320 | | |
| 16190 | 16190 | POPDC2 | popeye domain containing 2 |
| 26858 | 26858 | RPL3L | ribosomal protein L3-like |
| 17661 | 17661 | SOD2 | superoxide dismutase 2, mitochondrial |
| 15825 | 15825 | TCAP | titin-cap (telethonin) |
| 11100 | 11100 | TNNT2 | troponin T2, cardiac |
| 9803 | 9803 | TPM1 | tropomyosin 1 (alpha) |
| 42601 | 42601 | TTN | titin |
| 34710 | 34710 | | |
| | 37715 | | |
| 12401 | 12401 | CMYA4 | cardiomyopathy associated 4 |
| 34797 | | | |
| 34539 | 34539 | CMYA5 | cardiomyopathy associated 5 |

[0274] The genes shown in Tables 3 and 4 above were expected to be expressed in the specified tissue. Therefore, the results shown in Tables 3 and 4 validate the nucleotide array of Example 7.

The application's sequence listing, which the Patent Office published only in electronic form, follows.

SEQUENCE LISTING (48714 sequences)

SEQ ID NO: 1 - DNA, 748 bp, Macaca Fascicularis
  misc_feature (1)...(748): n = A,T,C or G
tttagtagagacgggnnnnnnncatgnnnnncaggctggtctcgaactcctgaccnnnnnnnnnngcccgcctcggcctcccaatgtgctgggattacaggcatgagccaccacgcccagccaatttctaggctttnnnnnnnnnnnnnaaagctactttgtcaaatagagtttttcagagctttagttttgcatttaccccagccttttgatacataaataggtgaagtttttctgaagtggagtttgcagttcgtctcgttttgtatactcacgctctgcccctgttcctgggcttgcctcagacaaggctgaggcacgagtagggcttaaacttttttaacaagcgtcaacaattcatcaaattagtaatttagaagatttgtttggcaaattgtattctgacattttttnnnnnnnnnnnnnnnnnnnngtatacttctttttgccaaattttgacctaccattaaacacaccactcagtttttaaggacctccataaattggttccaaaagcatttnnnnnnnnnnnnnnnnnnnnnnnnnnnnnnnnnnnnnnnnnnnngatatttcttgaccagtcagacttggttgaggaatggagttggggtgagaaacaatgcattaagttagtaaaaagttggaggcaaactatgcttatcacaaaatgaatcagtaagtgaaagatagcatatattatgtaatacaatgtagaaatctgaaggaataaaatgaagaaggcaatgtg

SEQ ID NO: 2 - DNA, 712 bp, Macaca Fascicularis
  misc_feature (1)...(712): n = A,T,C or G
agcttcctgtgtggcaaagtgccccccnnnnnncctccacctcgcannnnnaggacacccccgaagccacccactggggcccccagccaggctgtggcaactgagtnnnnnnnnnnnnnnnacgtcgacctgcagcccttccaggaggcgaccgccctgcatggcctcagnnnnnnnnnnnnnnnnnnnnnnnnnnnnnnnnnnnnnnnnnnnnnnnnnnnnnnnnnnnnnnnnnnnnnnnnnnnnnnnnnnngcttcttggaggacgacttgaatcccttcggctcagannnnnnnnnnnnnnnnnnnnnnnntggggggatccgnnnnnnnnnnnnnnnnnnnnnnggtgatggcaccacagactcaccaatgcaaaagcgcaaccgaatggtctaaactgcctcattggttgcctgctgccatattgcttgagagtgaactcaaccttcgacacgcttgtctaaannnnnnnnnngaccgtttttcttcccttctctaagttaaacaaagatttctaacaattttgcgatgaagaaactttaaaagtattccagaagaggcttcatatgactctgactttccaaaaaatataatcctatcagagaacaaatatgtagtagttagcaggatcatttaaagcaaacnnnnnnnnnnnnnnnnngagtctgatttatcttgttcacagttatattcctcagcacctagcaca

SEQ ID NO: 3 - DNA, 710 bp, Macaca Fascicularis
  misc_feature (1)...(710): n = A,T,C or G
acagagtgagnnnnngtnncaaaaaaannnanaggcttacttttgcnnnnaggaaaaaaaagaaaaaaattttgcaaagagttctaaaggctccagtacaaggcagtgtatctgtatcacagcacaggtaaaaaacaagaacaagatggaattctcagaagaggataagcagaacttggacatcccagaaaaaaaggtgtctggactgaacccgaccacagttggccaaggactttcaccaattcttcatacataggaattgttcattagaatcctattatatattccttagggtcataaatgattctgtttatgttaattatacagtaaacttggtgtggattcattctcatattgtcctttattcttttcaaaatgttccaagttaaggagtgaaacctaaatatgaatactggtactcccagtatacgggaaccagaggtgtacacattccagtacttgtttgttatgacttgtttctatctaggagagtaatatattaccatttcacatgtattagtttatttggtccatccaaccaagtgttgttgtcctttttctatgagaagaaatatttaagctacacatagtagtagatgatttattattcagggtttctctgactgaaatgtcactataacatcagtcattttactcctaatccagtagannnnnnnnnnnnnnnnnacagtcttttataacactctgaa

SEQ ID NO: 4 - DNA, 697 bp, Macaca Fascicularis
  misc_feature (1)...(697): n = A,T,C or G
tccagtagnnnnccctaccactnncccctgtccannnngnnncagccacaatggcctctttgatgtttgtctaagaagccaagcttgcttctacctcagggccattctactaaaggcttcctctgggctctggtggaatgtcaccctataccccaattctcacaccccatagctttcgtaccctcaatttttccccacagtacttaacagcatctaactatattgcaagttgaccctgccttatctgaaatgcttgagaccagaagtgtctcagattttggaatatttgcattatacttaccagtggagcattccaaatctgaaacccaaaatgctccaatgagcgtttcctttgaatgtcatgtcagcacacaaaaacattcaattttggagcatttcagatttgggatgcccaacctgtattaaatgatttgttttatcaatctctcactaaaatatctgttctggtcattatgtattccaggtgcctagaatagctgaatgagagaatagttgaaggaacgaatgaactcctgttatttagcatctttgacctgtgcttcacttccgtcatgaagcctccaccctattccaagttctcgcctctttgtgtctagtttatcatacttcctacctcagagtctctgccttcaagttcatcgtccatttgtcagttaagagttgttgtcttcaaata

SEQ ID NO: 5 - DNA, 1704 bp, Macaca Fascicularis
atctaattcatcatttctccataggtaagttttggattttctttcttttaaagaaaaatcacattgttgagtgggtttgttttggtgcccaccagccattctgtctcagaatcagtgaaaatggaactcctaccccaggatagcctctcgtgggttagtatatgtaagtggctgtggatattcagtcaaccaggggcaagtaaggcaataatgaaaacctcatcatgtctatgattgtaaaactggggaatgtttggaatactatcaacctattcttcataaagaaaaatttgtagtggccaatttgtgactgtggtatacagaagatctgcgttactaagcaatatgggagagatgggagagatgggagaaagcggagaatgccatggcctactgagttcaagtacttcacaaaggctaacactgcaaggcagcctcgttggacgggtaaccaagatcatcaggattatccaatattaaacatgagagaaagtgttgacatgaaataaatgaaaacaaagctatccccatattcaataggaacataaatcagaagtaatttcctctaacattatgagatgggagtttactactaccagaatgatttcatccacagcagcagcagtagcccactgataaatattgtcttctgaattgtcctgccttctgataactggatagtcatggaaactagcagtataaatgaagaaagagttaagacgcacttagaggaaacattttgattattttattttttaatcttcaaaatcttctgccatgagacaggaatgcatgatagcaatggctcaacttcttcacatgaaacacttggattcattttcattcacaagtttttctaaaaacatctacaatttcataaccccacccacttccaaccattatcacagatttaactgaccattaaacagtagttgccagcattaaatagctggaacgcttcctgcgtattagtagtgtcttttgaaactaccaccgaagagtatcatgattataaatctcattgtacacggcaaccccagaggtgactgatgttctcaaagaaactccctgcagatcactgagagctgtattccccaggtacctaaagaaatgctctttcttctccaagaactgcctgttcatgtcagtatatttcttgcagggagtatagcacatgctgatctgatggtgtaatcatcactgctaataggcagatatgtatgcctgatacttactggcgtgctctgataactatgtcagaacatactgaaaaaagatgggttgcttggaatctctcttcttttgaagagaactattttgaggttttttaacagttgtaaacaaaaggaaagatatacagatacctatacacatagagatctacactgagtattttcaacgtggtgcatatcttcttatctagagatacacacagtgtctccactcgccccttcacacacacccacacccttccatacagcgtgtgaatataaatgtaaatgtccttgggagttcactggagttttcatattaccaaatgatgatgaaatacctgatttgtattactcctgagaagatattagaagggaatgacagttctgatgcactttggaatggcacaatcacgtaaacgcctgcatacttaagacttcttaactcatccaaagtttctaaacatgatttgaccaaaaaaaaaaaaaaaaa

SEQ ID NO: 6 - DNA, 771 bp, Macaca Fascicularis
  misc_feature (1)...(771): n = A,T,C or G
acgcccgggacaagtggctggcgcccgatggcnnnnnnnnnnnnnnnnnngccacgctgtatgtgacagccatcgnnnnnnnnnnnnnnnnnnnnnncaagatccactggtgggagaacgtgtatggcttcgacatgtcttgcatcaaagatgtgnnnnnnnnnnnnnnnnnnnnggatgtggtggaccccaaacagctggtcaccaatgcctgcctcataaaggaggtggacatctacaccgtcaaggtgnnnnnnnnnnnnnnnnnntccccgttctgcctgcaagtgannnnnnnnnnnnnnnnnnnnnncctggtggcctacttcaacatcgagttcacgcgctgccacaagaggacgggcttctccaccagccctgagtccccgtacacgcactggaagcagacagtgttctacatggaggactacctgnnnnnnnnnnnnnnnnnnnnnnnnnnnnnnnnnnnnnnnnnnnggcccaatgccaagaacaannnnnnnnnnnnnnnnnccatcnnnnnnnnnnnnnnnnnnnnnnnnnnnnnnnnnnnnnnnnnnnnnnnnnnnnnnatgcgctgaggcccggctctcccgccctgcacgggcccaggggctgagcattcctaggcggtttcggggctcccccttcctctcccttcttccnnnnnnnnnnnnnnnnnnnngcctgggctggggggatggggagggcacatcgtgactgtgtttttcataacttatgtttttatatggttgcatttacgccaaaaat

SEQ ID NO: 7 - DNA, 706 bp, Macaca Fascicularis
  misc_feature (1)...(706): n = A,T,C or G
gcagtgagccnnnnnnnnnnnnnnnnnnnnnnnngatggaggagaagaacnnnnagaccccagcggctgcgtcnnnnnnnnnnnnnnncctcggtgtggttccaaggtcgctgttcacccacggggctaagagcttagcgctcccgcaccccagggtgtgggaagggagagcggggcagcctcgggtggctagtnnnnnnnnnnnnnnnnnnnnnnnnnnnnnnnnnnnnnnnncccttctatcctcactccaccacccaaaagtcaaaaggagcctgtgaggcaggggcggagtgacacttcaagtgcatgctctcctctgcagccggcccagccccgccggtgggaaccgtctgtccgtttactccagggtggggtccttgtgagagtgagctgtaggtgtgcgggaccagtacggaaaggcgttcttcgaggtggatcacggaggctgcttcagatcagtggttgagtttggggaatgcgaccgtatttgctgtgtctccagaaatgttaaagtcagtgggaacgtgaccgcccagctcccggaagctgtgtccttccacctgtatccgttgttccctgaaaacgcagggaggagtcagacttcacactgcaagagcctcggtgtccacctggccccatgtctctcagaattcttcaggtggaaaaccatctgaaagccgcgttccttactgcagaatagcat

SEQ ID NO: 8 - DNA, 776 bp, Macaca Fascicularis
  misc_feature (1)...(776): n = A,T,C or G
cttgcacacaggttttacannnnnggattctgagtttggattgtattcatatttaaaagggaattgggtggnntgcttttgnataatgcacttaaaacaaggaaccgtgtcaggccagcacagtggctcacgcctgtaatcccagcattttgggagactgaggcaggcagatcgctctagcttagaagttgcagagcagcctgggcnnnnnnnnnnnnnnnnnnnnnnnnnnnnnnnnnnnnnnnnnnnnnnnnnnnnnnnnnnnnnnnnnnnnnnnnnnnnnnnnnnnnnnnnnnnnnnnnnnnnnnnnnnnnnnnnnnnnnnnnnnnnnnnnnnnnnnnnnnnnnnnnnnnnnnnnnnnnnnnnnnnnnnnnnnnnnnnnnnnnnnnnnnnnnctcagatccttatgaagcagctgatgcctgccttgattcctcaacagctccagcatagactcggggctttgtccacgtctcgcactaaacatgcnnnnnnnnnnnnnnnnctggaggatttccccacagggagccacgcacctccccgtatctannnnnnnnnnnnnnntggctggaagcgctgttgataagtttcacgtgctggctcgccagctctttgtctctagacttgtagctttaagtgaacggtgtggtgtgggttgagtgtggccacctgcgggatgtgcagggctgcctcggaagctggctggggactccagcctctgtgttcgtaaagacatttagaagtggatggatgtttttccttttctgaagttggta

SEQ ID NO: 9 - DNA, 717 bp, Macaca Fascicularis
  misc_feature (1)...(717): n = A,T,C or G
gataaacatcctttcgtgtgttcccttctgtgcttgtgtggcatgtgtacccagcgtgggcttataggtcacagaggtcagtttctctatgggtttccagattttctttagaatggtgactgacccccatacttaaggccgcccttttctccttatccttgnnnnnnnnnnnnnnnnnnnnnnnnnnnnnnnnnnnnnnnnnnnnnnnnnnnnnnnnnnnnnnnnnnnnnatatacattcatctgatcagcattcatttggggaattttttcatttagcctttctggtttcctttcctgtnnnnnnnnnnnnnnnnnnnnnnnnnnnnnnnnnnnnnnnnnnnnnnnnnnnnnnnnnnnnnnnnnnnnnnnnnnnnnngcaaataattccaagaatgcacatttgggctgggtatggaggttcaccagtaatttcaacactttgggaggctgaagcggaaagattgcttcagccnnnnnnnnnnnnnnnnnnctaggcaacatagcgagaccttgtttctacaaaaaaaattaaaaagggggctttgggaggccgaggcgggtagatcacgaggtcaggagattgagaccatcctggccaacaaaattagctggtcatggtggcacatacctgtagnnnnnnnnnnnnnnnnnnnnnnnnnaggggaatcgcttaaattctggaggtggagattgcagtgagccaaggttctaccac

SEQ ID NO: 10 - DNA, 2527 bp, Macaca Fascicularis
agaatattcttagttccgctggccaggattttcctacatagtcagaacttacacattactagaggcacacccgccaagggagtattgtgtctacttttatctgtgcaccagccacaaataaataccctcattggaaagacccatttgtgctgggtaaacatcccttcctgtctgccacaacccccgtgactgccctgcatgtgttcatgacctctgaaggcccaaattcatgaagcagcaaacccagcagatccccagcccgcctgcctcaggacctctgctgaagacagggatgaagagggtctccagggaggcagcgggggccttgttggcggctggctcaggagccggcttacaggagggcagctctgcagtggggaggagcgccgtccggaggagaccaggcctctgcatgccccccactctgcttaccatccctgctcacacccccttggccaaggctttgtgcagcggatttaattttccaaatgaagaggacagagtgatagatgcattttccccaggctgtctcggaaaggtcgctaaatgtatactgttagaattgctgagatctccccccacttttggtttttgcagcagcaaaaactctctctccactgcaacttcttttctctctctcaggcagccagctccctggtcccttgtgctgactgtagtacaggggccaagagctgatacgaagccaggggtgaccgcaggacggtgggctcagtgggcttctccacctaccccagtcgccaaggccctgacgcactccctcctgcgccgtcagcacatccatgtgcacagctggaagggtgcatggcccacccgcctttgtccagacgggtggaaatctgatgatgccagctcctccctgccgtgcccctgccgcgagcaggcattgtgaactggctggtgttcgcagtcccacgtggtgtggcctccagcccaacccatggtggagactggagacagagcaatgagtcctggtggagggcacgtggacatgccccacagggcctcacccaggcttataggcaaggtcctgggcactgcgtgacgcagcactcactgctaaagcaagcccgcctggctctgtgccagggcccctcttctgattcacacgtcgcatttttacgcagacccttccttcttaataaaagctgacagttctgttggcacccaaggacccacaccgtgaagacagggagtgaggggcctttgtgcccaagcccagcacagctgtgttctggggtgcgtgagatcgtgtccgtgcgctgctggtctcctgacacagttccgaggacggggaaattgctgggtggcggggctgtgaggctcgtatgtggaactgctgcagagtttgccggcagacggatctggatatatgttatgtataattgttatgtgtaatttaagatatatctgtttgccatcgtcataagattatatgtaagactcttaagggagagggagatgtacattctgccaggctcctgtggactttgtttgagtcatgaaattgattactgttgatccagtggtgcgagaagctacactccatgtgtcatcacgcttatgactcctaatggatttttaaggcaaaaaatgccagccgactccatcctcacccctcaattcctcgagtccagcctttctgtgccagtgcatccctgagccacaatgctctcgccatcgggacccggctgggcctggagtctcggggcacagttaccatggagccctcctgggtcattctacaaatgtgctgagtgccagctgaaagccccacaggagatggagtgccttggccaagcttaaagagaagattttctcagggtatttattagtgtgtccagcagggtcaggaagcagggatggaaagatgcattcagactgttaatttattaacaaggcaaatggttttgtgtttcttgatgacaagctattaagtttgggacttattttcccatttgagaagttataatatatatttaagataagtttcctgcttaagttgtgcctttcagcttcaatgagtttaaggagcactaagggtaatgataccaatgagggttggtttattatcaaacctgaatagctgtggtctctccggtaaatgttttcttctactgaacatggagccattattaagagttgtatgttttttattatgtacatttgtatatttttttgcttgtttgatgttctatttttctaatagttttcttagagtttcttaaagttgtgatactagatttagattccgatgctaactgcaaatcaggttggtctctgctgggtctctcctgcttttattttcctttaaggacaagtgtagttgtcgtccaccacctttcaaaacatgtgaaactgccctgcctcccctttttgctaacaaccctgtgtacattgacaacttcttttatgttgtaaaatcgaactattttgtggtacattatctcgcgcttccgcaaattctaataaattctgtggcttccatgtgcaaaaaaaaaaaaaaaaa

SEQ ID NO: 11 - DNA, 366 bp, Macaca Fascicularis
cctctggatccccccgtctcggcctcacaaaatgctggcattacaggcttcgagccaccctcgcccggctggcaggacggttttaacgcattcattacgccctgttgtgtgctggcctcttaatcatcactgaacccttgtacacaaagtttatccaatttgacaaaagaggacagcgagacccggagcttggtttgctcatccggtggagagggcatggcctcagtgccaaggacagtgcccgccgtggtaggatccagtgagttgtcatgagccaggtgcagatggccaagccaggatcaaactgagccttccaccacagcggggcccttaccactgtgaccctggcctcaaagcggggccgct

SEQ ID NO: 12 - DNA, 679 bp, Macaca Fascicularis
  misc_feature (1)...(679): n = A,T,C or G
gacgagagggtgtgacagtcgtccagggagagaaagagcgnntnntgttgaagatgtagcaaatagatttccaaagtctacatgacattcacttttcaaacttcccaccagttgaatttcttttttttttcccgtaagaaataggtgatgtcttggaaaacagctccttgtgtctctctgtgcatctccattttcctagtctctggagtctcaaaaagagtggcaaagcactttacagtaataactgaggaatcagattccctgcttcagcgataccgagtttgtacagttgggtgatcttttataattcctaggaggtcatgcatttttaatgttttctgaagctttttaagtgtgagagagggacaagaagtgcagttctgttctggaattctttattgctttcaacggacactctttgtgaaaaatccaagtaatattttagttcaaacttgatcttgagccaaggcccactgccacctctggggtgggagctggacctacataccaagtgccaagttcatcttaacatctgcttccagaatggctttgattcagctgtgccaggcaacagaacagggtcagactcctgatctgtcatatgttatcaagccaataacggctccaagactaggatcccaaaggggttgcaggcagggaatatttggaaattcagact

SEQ ID NO: 13 - DNA, 799 bp, Macaca Fascicularis
  misc_feature (1)...(799): n = A,T,C or G
ctggaaagattgtgagttctagagatagagccgttagcatccatctcctccctgtaactcttaggaaatgcatcaaggaccattatagaaaggatcccctgacctcaggatgaaatcgacctagggttaatcatgacagctgcatcagttgtatttgatgcgagtcacctctggaggtgagtgcccgcaagcagttcccctgttttgaaagaagatggtcagcccactgcctccccagcagccacagctcccttgagtggggggggnnnnnnnnnnnnnnnnnnnnnnnnnnnnnnnnnnnnnnnnnnnnnnnnnnnnnnnnnnnnnnnnnnnnnnnnncctttggatttattagaaatggtttttcctccctgtatctttaaattcttggttctctttagtcctcatcccttgaatggacttgtcagctacctccccaggaggagttcagaagcttctgttgnnnnnnnnttgagtagatgacagctgtatctgctgctaacatggctgcttctccgagagcacattgaggtccagacagttccaaaccttggccctaaaaaatgtgtgctgtaaagttacttgatgtatatttattataattatttatggttgcatttaacaaacttttcattcaatctgatgctatttacaccatgctgtgtaaaggaagctcactaaaggaaaaaagtcacaccaataaataaccttcatctaattttgatttaccttaagagttgtgtgatcatctactcttgctgagcaagttcaaagactggcatgcttggatggctctgat

SEQ ID NO: 14 - DNA, 1348 bp, Macaca Fascicularis
tggccaggacctcggccctgggagttgtaaagaaggctggcctctaccatgagcctctgcaccaaggtgtgcccatgtgactgtgtgctcggcgtctgccctggcacgggtgcatggcctgtcctcgctcagtctccccgactatggggcccaggctcacagaggtgtgaaagaggcaagcacggcgcaggggcctccgagcccagccagcctcgcttcgatgctgggagactaacgtcttccattttgtcttctgcccaggccagttgcgggccgtccaccggctgtgctacttctacagcaccgtcatgcccaccgaggcccagtgtgtcatctaccatgagctccagctctccctggcccgcaaggtggccggcaaggtgctggaggggcagctcctggagaccatcagtcaactctacctgtccctgggcaccaagcgggcctgcaaatccactctggactacaccaaggaagtgtggggattttcattgaccttcagaaggaagagaaggaggcgcatgcctggctgcaagcagggaagatctattacatcctgcggcagagcgagctggtggacctgtacatccaggtggcacagaatgtggtcctgtacacaggcgaccccagcctggggctggagctgtttgaggcagctggagacatcttcttcaatggggcctgggagcgggagaaagccgtgtgcttctaccgggaccgggtcctggccctggcagtgactacgggcaactgcaaggtggagctgcagctacagctgtgcaacaagctggtggcactcctggccacactggagaagccccaggatggcttggagtttgcctacatggccctagcacccagcatcactctgggagaccggctgaacgagcacgtggcctaccactggctggccgccctgcaccatcagctgggccagggcaagctggcggagcacttctacctcaaggccctgtagctctgcaactcgccactggagttcgacgaggagaccctctactacgtgaaggtgtacctggtgctcggtgacatcatcttctatgacctgaaggacctgtttgagtactaccagaaggccaggaccttcgccacagagctcaacgtccgcagggtcaacctgcctcctctgccactctgcgggtgggccccctggttggcccccagccaccctcgctgaggacggcatgagggagtgggttttgtgcaaggaggacggtctcctccctctcctggtgtctcccgtggctcattttctgggaaatggggcatgaaagcagggttcaaatagcaataaatttttctttgcaataaaaaaaaaaaaaaaaaaaaa

SEQ ID NO: 15 - DNA, 271 bp, Macaca Fascicularis
acttgaccttttggcatacaccccctgtggacttttgcctcttctgtaatggctggcaatgacatttctaacttacaatctggaattgcatttggtacactggcattgcttgttccactgggatggggaccagtgttaagatgcctgttacacaaactgcccacctctactttctctactttttctttacagcacttaacattaaccaagtcttgatgatgtatgatatacattattcagactttaagttgaaatacattactctttgatt

SEQ ID NO: 16 - DNA, 1198 bp, Macaca Fascicularis
gcaatgttccgcttgtacgtgttggtaatgggagtttctgccttcacccttcagcctgcggctcacacaggggctgccagaagctgccggtttcgtgggaggcattacaagcgggagttcaggctggaaggggagcctgtggccctgaggtgcccccaggtgccctaccggttgtgggcctctgtcagcccccacatcaacctgacatggcataaaaatgactctgctaggatggtcccaggagaagaagagacacggatgtgggcccaggacggtgctctgtggcttctgccagcattgcaggaggactctggcacctacatctgcactactagaaatgcctcttactgtgacaaagtgtccattgagctcagagtttttgagaatacagatgcttccctgccgttcatctcatacccgcaaattttaaccttgtcaacctctggggtattagtgtgccctgacctgagagaattcacccgtgacaaaactgacgtgaagattcaatggtacaaggattctcttcctttggataaagacaatgagaaatttctaagtgtgagggggaccactcacttactggtacatgatgtggccctggaagatgcgggctattaccgctgtgtcctgacgtttgcccatgaaggccagcaatacaacatcactaggactgttgagctacgcatcaagaaaaaaaaagaggagaccattcctgtgatcatttcccccctcaagaccatatcggcttctctggggtcgagactgacaatcccgtgtaaggtatttctgggaaccggcacgcccttaaccaccatgctgtggtggacggccaatgacacccacgtagagagcgcctacccgggaggccgcgtgaccgaggggccgcgccaggaatattcagaaaataatgagaactacattgaagtgccattgatttttgatcctgtcacaagagaggatttgaacatggattttaaatgtgttgtccgtaataccctgggttttcagacactacgcaccacagtcaaggaagcctcctccacgttctcctggggcattgtgctggccccacttgcactggccttcttggttttggggggaatatggatgcacagacggtgcaaacacagaactggaaaagccgatggtctgactgtgctacggcctcgtcatcaagattttcaataagattttcaat

SEQ ID NO: 17 - DNA, 1786 bp, Macaca Fascicularis
atgcgcggaatcccccggtctgagggcggccgctccgtggaaccgtctccccgccgcgtctgcggacacgcgccttccacgaagccgctctggtgccagaaacatcacggaccctgctataaagggcctgttttggaacacaaatgggcgtttgcatcgggcatcgtctcctactttgagctctggccagaaccatagggaaccggggattgggccggggagctgcccccagctcccggggcttccgcagaccagtgatcggaacccacggccggaacatcaaggggaagttagagaagttagatgccttttattcttcttcacgaacccgcttttcgtcttaaatcacgtaagctgttcagtgcactaagatgcgatgtgattgagtccagcgtgggggtcgctggtttgccagtaataattctgcattaccacgtacccgtgaccgaattcgcaggaaggcgcaggctgcaggcacggcccgacctggagcacgggagccgtttgaggaggtggcacaggcagcccccgcatgcgggcagaggatgtgtaagtttccgtagtacctactgatcctgtattatggatcgcctgagcttttgtagaaaacgtgggacatacaggagtatacagagggatatacaggaagcctgtaccgccgcccaggagaccaccgtctgcacttgtgtgggggctgttttcagtccagcagtgcttctgttttctaaccaaaaggaatatgccagtgttctggacatgagcagttcccgataactcctggggctgatactagcaagtttctgagacagtggctgtgatatttcaccttctcctggtctccttttacagcctcaagcagcctgccaccctgccatattccgggttgttgatgagatgttcaggtgtgcactcctggaaaccgatggggccccggaaatcatagccactattcaagtgtttatgcagtgcttcctagaagctctggggaaagaaaacaagcagctgcggtttgcactcaagacctactttccttacacttctccatctcttgccatggtgctgctgcaagaccctcaagatgtccctcggggacgctggctgcagacactgaagcacatttccgaactgctcagagaagcggttgaagaccagactcatgggtgagcaaacactgaccactcccaaatctactgcacacacgggttccctagatcctcatctgccctttgagcagggctgacaggacagaggaaggcgttactggtctgggaccgtcaccaaacaggtgagcaccatggtgaagtgagaagtggaggaagcacatggccgcacggatggcttggagcaggtcaggatgaacaggcatgcgcgtgtatgcgtgtgtgaacacctgtatcgaaacgtttctacataatgtccgattttagatttcaaaatatacaggcataacaatgaagagaagagacgctggaaaaagcagcacccacctgctgggaagccctggccgttcagaaggaaaaggcgtttgtttggtcgccctttggtcttctctcttcctctctagggaaggaaatttgcaacttctgcacagtagggtggaatgttaaatgcttgttttccttctctttaataaatacctctaaaatgaaaaaaaaaaaaaaaaaaaaaaaaaaaaaaaaaaaaaaaaaaaaaaaaaaaaaaaaaaaaaaaaaaaaaaaaaaaaaaaaaaaaaaaaaaaaaaaaaaaaaaaaaaaaaaaaaaaaaaaaaaaaaaaaaaaaaaaaaaa

SEQ ID NO: 18 - DNA, 1538 bp, Macaca Fascicularis
aaaagcttctctgcctctgccatggacaagcgcagtgggagcaggccccggtgagtactggggctcctctctcccctgccttcccgtcttgtctctctctacccctcctctcctgggcacagccatcccaggagctgtgctgactctgcctggctcctctctgcccagggagaccattcacacgcctccacttcctgtcagcactagggctccctgactcccggctttcccagggcaccaactcatgcagttatgcgcccactggcaccagctctgcccccagcctcctcctctgctgccctgctcctagggcctctgtcagtcacattgtcatggatgtgaatgttccacaacacagcgtctgtctcatacaaactcaagggccccttgggcagagttgactagaatgtgcttgtaggctgtggccaccgctcccaccccccagatgtgtagactccccaggttggagagaagatgctcccagcccttcctttctgcctgccccagggacttggagacacaaggcccaggaggaggacgaggaggagaataagtacgagctgccgccctgtgaggctctgcccctcagtctagcccctgcccaccttcctggcactgaggaggactccttgtacctggatcactccggccccctgggtccgtcaaagccatcgccacccctgcctcagcccagcacgagcagggtgcatcgtccagagtggtgctaggccctccaaagaaacctgatgaggacctctacttggaatgtgagcccgatgcaggaaggaaatcgtcttttccctctgtagccccagttgggagcgcctccactgctgagacagggacacctcttttttctgcctgcgggggactcagttgaacaaaggcggtgggaatgcaaataactgcaccctgtgtcctcggctccccatgccggatcgagtgccctggcacgtctctgagtggctgtgtgtatgcacaggacagtgacctgctggctcagccttggtactcagggaattgtgaccgccatgctgttgagagtgccctgcttcgcttacaaaaggatggggcctacaccgtgcgccccagctcagggcctcatggctcccaacccttcaccctggcagtactgctctgcggccgggtcttcaacattcccatccggcggctggatggtggacgccactatgccctgggccgggagggcaggaaccatgaggagctcttttcctccgtggccaccatggtccagcacttcatgcggcaccctctgccccttgtggacagacacagcggcagccgggaactcacctgcctgctcttccccaccaagccttgaggccacagtgagactgacaccctcttcccagcctccaagaatgcaggtgtctgcccagttcactaagtcctggatgaaggaaccgtggtgacctctcacatctacttgggggcctagggcaccctgagagggactggcctgccttgtacaagtttgctttcaataaataagaaaaaattgaaaaaaaaaaaaaaaa

SEQ ID NO: 19 - DNA, 750 bp, Macaca Fascicularis
  misc_feature (1)...(750): n = A,T,C or G
taganctgagnnnnnggttactgtnnnnnnnnttttccaatttccttgctcccaggatccccatcttgtataaagtttccaaggtggtcctcttcaaactccatttttacaatatctgtattgtaaaattttcattttcactaagtaacacccagtagataatttttccaaggcaatcctcctcaaatacctgttttttacaatatctctattgtaaaatttcattttcactaagtaacacccagtagataattcctgtggagcagtggtgttccaaattctccattacctctatgcttaatattcatcagccttcattactctagcatattcacgttgatnnnnnnnnnnnnnnnnnnctacagccttctactgattcttacaagctcttgcctctgtgcctttctcatgctattctttttgcttagattactctttggtcccagctcatgttcatcactcccttcaaagcttatctttatatcttctgagttagctctccctgattgacatcaccttatgtggtgacctccctcattctgtgctgcctcagcacttatcttttgagtttatactgtggtccatgtacttatatgttgctttgtaattattttctagcactctgtgttatagtttcatatttgtatttatttccaaaattaaattgtaagctccttgagggcaggaataataacttttacatttgtatctctgcacccccgagtgcctagtatagtgctgagcacatag

SEQ ID NO: 20 - DNA, 696 bp, Macaca Fascicularis
  misc_feature (1)...(696): n = A,T,C or G
ggccctagacctactcactgcagaaaaaggtggtacatgtatatttctaaaagaagactgttgtttctacataaatgaatcaagacttgtaaaagaccgggtccaacagttacgcaagttaagcactgaagtaaaaacacggcagnnnnnnnnnnnnnnnnnnnnnnnnnngaattcctctatgttttctctgttagcccccttccttggacccctgctaagtctactatttctgcttaccgtaggaccttgtgttgttaacagaattttacaatttattagggagagatttgacaccgtacaactcatggtcctcagagcccaataccaacctgtaaacgctgaaacagaatcagacttataagacccaagattggctctaaagatacctgaaaagaaggggggaannnnnnnnnnnnnnnncattcctcagccccgggctcaaaactccctgagcctagcacaaacacatcccatcctcccatcccaccaccatatatctctcaaactccctgagctcagtacaaacaccacctggaaagtctccgataaggagacannnnnnnnnnnnnnnnnnnnnnnnnngagccaaaagaatttctttgttcccctacaactttcgggctataaaaagcaaacgctcgcattgttcggggccctcttgtatactgtgtaaaggagggaccaagttcgaac

SEQ ID NO: 21 - DNA, 747 bp, Macaca Fascicularis
  misc_feature (1)...(747): n = A,T,C or G
aagttttaaacataagaaaaatgtcttttgttntatttgcnnncatgaatgaagatcattgacatggttggtaaattctagaattttgatttttgttttttaatttnnnnnnnnnnnnnnnnnnntttattttttccaaatggtctgacattttaagaatgaatgctaataacttaacttctaaatttatcgtcattggcatgtttaatagcatatcaaaaaacattttannnnnnnnnnnnnnnagacaaagcaatgggaaactagtgaaatacacacggatgttcctgaggcacttaggaagctctcagttgtctcttacatagttcaaggaatgttttctgaatttttttaatgcttttttttttttgaaagacaaaaacatacattttaaatgtgattatctnnnnnnnnnnnnnnnnnnnnnnnnnnaataactttttaaaaattactgttctgtataaataaaatatttgaaattcaagtgcagaaaatatctgaaacaaaaagcattgttgtttgagcatgatacaagtgcaatgtggcagtgcccctnnnnnnnnnnnnnnnnctgcagcccctctgtgtgtgctccctcataagttcatttgctgttattacacacacaggccttcctgtctggtccttagaaaagacgggcttccaaagcactgttgaacactgaggattctgttgttagtgtggatgttcaatgagttgtatttaaatatcaaagatcacataaaa

SEQ ID NO: 22 - DNA, 872 bp, Macaca Fascicularis
  misc_feature (1)...(872): n = A,T,C or G
ctgatacgtttccagactccagcgcaacctggggcactctccagacccatgcaggggccgcctggggtacacggaaggaagctgnnnnnnnnnnnnaaatgcaggtggacgttgccagagtgtgcacagcaaatgaccttcattgccagttgcgccccactcctctcattttttatactaagcaataactttccaaagcaagaagttcaggatggagagagtcccctcctgtctaggcatggggtggacgcggtgcccgcctgggctgtgcggggagtaccgctggctctcgggatgcgcgaatttttttttttctttttgtnnnnnnnnnnnnnnnnnnnnnnnnnnnnnccaaaattgtcatgactgaattcttgctgtggggacttcctgagttttctcagtttttacatctaagattagtcttggctgaggagaaacgagacgtgattatactactttcaattgcaggtttaagcagttcagatttaatgaccaaagtcatgcagatccatggaatctgtcgtcgtgttatacagtgtcagcctcgagtaaatttattgacgttctggggctgtcagttttccactaggattaagattttggctaggcacagtggctcacgcctgnnnnnnnnnnnnnnnnnnngtttgaggcgggcggatcactttgagcccaggagttcaagactagcctgggcaacatggcaaaaccacgtctctactaaaaatacaaaaaaaagaaaagaaaaaataaaatactagccaggcacatagtggtgtgcacnnnnnnnnnnnnnnnnacttgggagctgaggtgagaggatggctagagcccaggagacggannnnnnnnnnnnnnnagaccatgcc

SEQ ID NO: 23 - DNA, 1515 bp, Macaca Fascicularis
atggggtgcatgaagtccaagttcctccaggccggaggcaatacattctcaaaaactgaaaccagcgccaacccacactgccctgtgtatgtgccggatcccacatccaccatcaagccggggcctaatagcaacaacaggaacacaccaggaattggggagggctctgaggacatcatcgtggttgccctgtatgattatgaggccattcaccacgaagacctcagcttccagaagggggaccagatggtcgtcctagaggaatctggggagtggtggaaggctcgatccctggccacccgaaaggagggctacatcccaagcaattatgtcgcccgcgttgactctctggagacagaggagtggttcttcaagggcatcagccggaaggacgcagagcgccaactcctggctcccggcaacatgctgggctccttcatgatccgggatagcgagaccactaaaggaagctactctttgtccgtgcgagactacgaccctcggcagggagatactgtgaaacattacaaaatccggaccctggacaacgggggcttctacatatccccccgaagcaccttcagcaccctgcaggagctggtggaccactacaagaaggggagcgatgggctctgccagaaactgtcggtgccctgcgtgtcttccaagccccagaagccttgggagaaagatgcctgggagatccctcgggaatccctcaagctggagaagaagcttggagctgggcagtttggggaagtctggatggccacctacaacaagcacaccaaggtggcggtgaagacaatgaagccagggagcatgtcggtggaggccttcctggcagaggccaacctgatgaaaactctacagcatgacaagctagtcaaacttcatgcagtggtcaccaaggagcccatctacatcatcacggagttcatggccaaaggaagcctgctggactttctgaaaagtgatgagggcagcaaacagcctttgccaaaactcattgatttctcagcccagattgcagaaggcatggccttcatcgagcagaggaactacatccaccgagacctccgagccgccaacatcttggtctctgcatccttggtgtgtaagattgctgactttggcctggcccggatcattgaggacaatgagtacacagctcgggaaggggccaagttccccatcaagtggacagctcctgaagccatcaactttggctcctccaccatcaagtcagacgtctggtcctttggtatcctgctgatggagatcgtcacctacggccgcatcccttacccagggatgtcaaaccccgaagtgatccgagctctggagcgtggataccggatgcctcgcccggagaactgcccagaggagctttacaacatcatgatgcgctgctggaagaaccgtccggaggagcggccgaccttcgaatacatccagagtgtgctggatgacttctacacggccacagagagccagtaccaacagcagccatga

SEQ ID NO: 24 - DNA, 750 bp, Macaca Fascicularis
  misc_feature (1)...(750): n = A,T,C or G
agtacacaagtgctagccctagcagctcgcgatgtgnntcagcnnngcagacgccgaggataactacccttttggaannnnnnnnnnnnnnnnnntttttcctcacttccatcccccaaatttgattgggaacaagtttgtccctcnnnnnnnnnnnnnnnnnngagggcctgggtgttacttatcagatggatacggcttggcatacgacttatctaagatcccaaccagtataaaaggatatactttgggagccagaacagctgtgannnnnnnnnnnnnnnnnnnnnnnnnnncacctgctgcaggcatgtaccagaaagtaagtcctcagcaggagaaacacaaacaaaattttgctccatttaatgtcttggtgcctcgatttaagagctacccaaaggacacttactatcccagccctggcgcatacaacccagagaagaagccacctccaaaaattgcctggccaatgaaatttggatctccagactgggctcaggttccatgtctacagaaaaggaccctaaaagctgagctgtccacggacaaagactttagaaagcatcggaaccgtgtggcctacctaagcctgtattataattgagcagctgtgnnnnnnnnnnnnnnnnnnnnnnnnnnnnnnnnnnnnnnnnnnngaggacagagctgctcttcttcttctgcattactgtgcccccttgtctggcagcctggagcccagggagggacaaggggcttatagctgct

SEQ ID NO: 25 - DNA, 2093 bp, Macaca Fascicularis
  misc_feature (1)...(2093): n = A,T,C or G
gatatactgagggtgtacagtccaggacccacagcatcgatcttacgcgggaacttgttagaaatccagattctcaggccgaccccaggcccactgaattagaaagtctgggagaaagttctggaatttgggttttaacaagccctgcaggtgattctgatgcatgctagagaaccaccggatggacaaaggctgcaggacttgaggtcagtccatttgacccccacatctctcactattttgtgaccttgggaaggttactaagccccgtgaacctcatcatctccctgtgaattgctttgtcatgaggtccatgtctggaatgcagctggccctccctaaatgttagctctcttcccttctcacttgggttcatgtttgttatcatcaggagctgccttggtgtagcagaaagagcactggcctagattccagtgttggcttatgcactggctatttgtcaggatttaatagagcttgttaataattatggaacactgattaggtgccagggaccatgctaacagctttccatgcattatctcatttaatctgcccaacaagtgcaagagaaatgttcaggtgttatctcaattttattccagaaaaaaacagactttacttgggtaattaacttgcccaaggctgaacagctagattggtagagttgggcttgaaactagtggtctggctttggagcccacattgtttaaccactaagtggtggtcaacatttctgatctttactatccacattcaaaaaaagaatccactattaaaaggtgctaatatttattcagcttcctacgtgctaggcatttggttagacacatttcacttactctcagtgtccatcataaggtattattatgccagtatcacacatgcagctgctgaggtaggaaaataataccctaaacttgtgaaaatggacaaagatagtatatcctaaatgacacaggtctatacaaattagcaggtgattatcatctggatagtaaggtgctatgtcccttaagatgcagaagagttccaataaactggcaaatgcctccaggaatgtcctggatttgccatttccaccactaccagctgtaggtgcctgaaggcttgtgcctggaccgccaggccccctgatcttgggcaatgccagggccccctccagccccgccctatacttccctccctgactctgctcccatcgcctcctgcctgctgcttccctgcagccactccacctgctccttggccatcgggccatctgggcttcaccagctcttcttggccagtgacattcaaggctgttccaccccattatgcctgttatacaagccacagctctatttttagattaaccctcgtggatcataattactttcaaaaatatctacaccctcacctttacatgtgaatacagatgaacttggccttccttcggtcgcattgccctgtgtgacattataaaagaacactgaagtgggggtcagcagatctgaggtcgagtcgtggcttttctactaaacgactgtgactttcagcaagtcatttgttttattggttcacagtttttcccacaaaccagtgaataacaacaagatgttccttaaataaggtcatatatgtgcaagtgctttctgaatggaaaagtactttgtaggcattactcactacttatcccactctctgatcatcacctccaaagacaagcctccttttgctgcaattcttaaccgtggcctcacattagagtcacctaaagagcttttaaaaactgcctatggggccaggcacggtggctcacgcctgtaatcccagcactttgggaggccgaggcgggcagatcacgagatcagnnnnnnnnnnnnnnnnnnnnnnnnnnnnnnnnnnnnnnnnnnnnnnnnnnnnnnnnnnnnnnnnnnnnnnnnnnnnnnnnnnnnnnnnnnnnnnnnnnnnnnnnnnnnnnnnnnnnnnnnnnnnnnnnnnnnnnnnnnnnnnnnnnnnnnnnnnnnnnnnnnnnnnnnnnnnnnnnnnnnnnnnnnnnnnnnnnnnnnnnnnnnnnnnncaaaacaaaaaacaaaaaaaaaaaaaaaaaa

SEQ ID NO: 26 - DNA, 589 bp, Macaca Fascicularis
  misc_feature (1)...(589): n = A,T,C or G
agagacaagatgaaatttgagtttgttttggaagcatgctcatcttctcacactactgccctatggaaggtccctctgcttgagcttaaacagtagtgcacaaaatattctgcttacatgcccccagcccactgcctccaagtcaggcaaactttggtgaatctggaagcaagaggacctgagccagatgcacaccatcatctgatggcctcccaaaccaatgtgcctgtttctcttcctttggtgggaagaatgagagttatccagaacaattaggatctgtcataaccagattgggagagccagcacctaatatatgtgggataggactgaattattaagtgtggcattttctgatgacccaaactgcccatgtcatttgtttccagaaacgaggaccaataattctctcacactggcatttgtgctggtagtgcaagtcctttaatatgtctaggaagtgagccattgcccagtggtcnnnnnnnnnnnnnnnnnnnnnnnnnnnnnnnnnnnnnnnnnnnnnnnnnnnnnnnnnnnnnnnnnnnnnnnnnnnnctgtaattttataccannnnnaccaaaaacag

SEQ ID NO: 27 - DNA, 2147 bp, Macaca Fascicularis
  misc_feature (1)...(2147): n = A,T,C or G
aaaatcatttcctgggacttttctctgtgggctgtctcctccagcgtttttttcgtggggtttatttcatgatctgatcccctctggggaagtgaaccatctgggtgcttgattttagctttgttgactttgaagattagattgacaacaattaaaaggggaaaacaggaactcctccggttcactggatctcgcgaggtggccaaacaactatgaaaacaaaactggttaccaatgacacaggagctgagcttccaaaaatttattgaacaatctgacttactaggagaacttaaatatgacttcaatgaaaaagctgaattcagacacactgaaacacaaaggccttttgtctttaactattatgaaaatgtgcttgagaaaaatagcaagcgctaccaggcccttggccatttgcttgaacaatatatttatgagcttttggagaaggtgtgcaaattacaaaaagtatatatcccacctgaggctgatgaagaagaaccaagaagcttcttttttatgagtgagaaagcattaacaaatcaccattctgctcttcttgtccttcttcaagaccatggggtctttcgagctggtcagtggagtcagcaggcaatagtacatcatggtctccaacatggaagtcagataccatgtatcaaatggcattgcaggcacattatgatgtaatggtgctaaaccccaatgataattttgtggagctaaagatggaaaaagagtggcaaggccttttaacacaaaatattgagtcgtcttctctaaaaatggttccaggtgggagctttttctctctccagcatcctcccaaatgcattccaaaaagatgcagcaacacccccgaagaacacatggcttacatatgggattacttcattgtacatggttatggaggcttggtttttatggacttgcttgctcgtagaaggtgggaagtgatgagcaaagtatatgctgttgcacttattgactctgaacatcatgtaggacaccagctgggaagtgatgtacaattattagcatggataaagcaccactgccgtgaatgggtgacaagtcctaagcctttggataaacctgcagctactgttttcaaaaaggaatttcctatggtttctggtggtacagaaaagtacagcttagccccttcctctagccttcagtcaatttttaagtactttaaaaaagctttaaaagccagaacaaccattaatttctctcaaatgccaatagtgactagaggttccacaaaaagaaagcaaagtgcttaaactacttttgtcatctaaggttttttttgtccttctgcaactttgccaatatagattctggaaggaaaaaaaaaacactttcaactcacacacaatatgatgttctggcttgaggtttgatttgttactttttattattttgtttttatgaggcagggtctgattttgctgcccagggtggtatggaaatctggctttnnnnnnnnnnnnnnnnnnnnnnnnnnnnnnnnnnnnnnnnnnnnnnnnnnnnnnnnnnnnatggccacagttgttgctttttttttttttttttgaggaggaggaggannnnnnnnnnnnnnnnnnnnnnnnnnnnnnnnnnnnnnnnnnnnnnnnnnnnnnnnnnnnnnnnnnnnnnnnnnnnnnnnnnnnnnnnnnnnnnnnnnnnnnnnnnnnnnnnnnnnnnnnnnnnnnnnnnnnnnnnnnnnnnnnnnnnnnnnnnnnnnnnnnnnnnnnnnnnntgccatgttccccagactagtctagaactcctgacctcaggtgatccacccaccttggcctcccaaagtgctcggcttacaggcataagccactgcacccggccatttcgttgcttttttgaaaagtgaacatattctcttttgtagcctattgatgaactgggaattcagtgccatcattaatattttacagtgttagttaagtgtgaagatctttttttaaaaaagctatggtttgatataatgacagcaaaatggcaattgataaaaattagatatagaatcaatctttgatttctgtaatattaatatcatagtaaaattacaagtgaacataaagattaaacatcataagcaaactgcaaaaaaaaaaaaaaaa

SEQ ID NO: 28 - DNA, 747 bp, Macaca Fascicularis
  misc_feature (1)...(747): n = A,T,C or G
acannnnnnnnnnnnnnnagaaggactccctatcttgccccaannnngacattcccccatttttatgcggcttctgcttcaaggagctcagattcaagtcttaggttaattggtttcagtaaaagtccccccttttaggttagccaacattagtctccacttagccccagtgaccctctctacctggagcctccacctcctcctcttccttctcctcctagggcaggctcaccctgcctcttcccaagccctcacctgccaagacaaacctaaattacaagacaattttttagactccaggctaagggtcgattccatggctctgcccattacgtgttaagaacgacctgcgtatttgctacagaaagcatgacagtgacgtgctttgaaaaccctcattttctattccaaacatgagttttaattgctgtttttgggatgcctgatgtctcatcacggcagtattatctctctgggacctctgacagcaggaagagccaatggttcattactcgagcctgcccccgcctcctcggtgctggggccctgtcaatcaagcaggccaagatggactcctcccccaggactgactttggaaggtcaaccccctctagaaaaagagagccttccgggcgggcgaggggtagactgccgaacgcaggctgctgaacttctcagctgaattcctgggcacttccttactcggtctttctgtgtgttctttggcttctctctgcaaattttatg

SEQ ID NO: 29 - DNA, 1182 bp, Macaca Fascicularis
atggaggagccgcagtcagatcctagcatcgagccccctctgagtcaggaaacattttcagacctatggaaactacttcctgaaaacaacgttctgtcccccttgccgtcccaagcagtggatgatttgatgctgtctccagacgatcttgcacaatggttaactgaagacccaggtccagatgaagctccgagaatgtcagaggctgctccccccatggcccccacaccagcagctcctacaccggcggcccctgcaccagccccctcctggcccctgtcatcctctgtcccttcccagaaaacctaccatggcagctacggtttccgtctgggcttcctgcattctggaacagccaagtctgtgacttgcacgtactcccctgacctcaacaagatgttttgccagctggccaagacctgccccgtgcagctatgggttgattccacacccccacccggcagccgcgtccgcgccatggccatctacaagcagtcacagcacatgacggaggtcgtgaggcgctgcccccaccatgagcgctgctcagacagcgatggactggcccctcctcagcaccttatccgagtggaaggaaatttgcgtgtggagtattcggatgacagaaacacttttcgacatagtgtggtggtgccctatgagccgcctgaggttggctctgactgtaccaccatccactacaactacatgtgtaacagttcctgcatgggcggcatgaaccggaggcccatccttaccattatcacactggaagactccagtggtaatctactgggacggaacagctttgaggtgcgagtttgtgcctgtcctgggagagaccggcgcacagaggaagagaatttccgcaagaaaggggagccttgccaccagctgccccctgggagcactaagcgagcactgcccaacaacaccagctcctctccccagccaaagaagaaaccactggatggagaatatttcacccttcagatccgtgggcgtgagcgcttcgagatgttccgagagctgaatgaggccttggaactcaaggatgcccaggctgggaaagagccagcggggagcagggctcactccagccacctgaagtccaagaaggggcaatctacctcccgccataaaaaattcatgttcaagacagaggggcctgactcagactga

SEQ ID NO: 30 - DNA, 775 bp, Macaca Fascicularis
  misc_feature (1)...(775): n = A,T,C or G
aaacaattagttggtgggcntaaatcacactgaaaagaacccattcagtaaattttctacattaaaaactgcctgggctcatacagaatcttatcaggactggaaggctcctgctagactatactggatatgtgggcacagagcctatattcggttacataataaatgcataggtagttgtgttattggcactattaaaccgtcctttttcttattacctgtaaaaacgggtgagctcctaggtttccctgtctatgcctcctaagaaaagagaggcatagttataggaaactggaaagataatgagtggcctcctgaaaggatcatacagtattatgggctggccacatgggcacaagatggctcatggggatactggacccccatttccatgctcaatcggatcatacggttgcaggctgtcttagaaataattactaatgaaactggcagagctttgactgctttagctcggcaggaaacccaaatgagaaatgctatctatcagaatagactggccttggactacttgctggcagctgaaggaggagtctgtggaaaatttaacttaaccaattgctgcctacaaatagatgatcaaggacaggtggttgaaaacatagtcagggacatgacaaagttggcacgtgtgcccgtacaggtttggcatgagtttgatcctgagtctttatttggaaaatggtttccagatataggaggatttaaaaccctcgttgtaggtgtatcgctagtaataggaacttgcttgctgctc

SEQ ID NO: 31 - DNA, 2939 bp, Macaca Fascicularis
ggcgagagagccgactgccgggtcctgctgccctgctgggcttgtagggtcttgaggctcagacacaggcccaccaaggtggtgcaaggcctgcccctgcccccatccatctgcaggtccagctccggggcaggacttgctgtgggctggtttggggtccagctccggggcaggacaggccgcaggacttgctgtgggctggtttggggctatgcagttaaatagctttagtgatgtcaaaaagcatcgtctcataaaacagtgacctttgtcacgtaacaaaactgcttttagtctcttaccgggcagagttttcttgaaagctgggcagctgaacagtagccttgtgtcataaagtgactggagcctgcacgtgggtgacggacaaggcgctgtcctgatgggcagtcagtcagcgtggctgagatactttttgctttttggagcctccccagggctgttgctggtgtttgaggagacgataaggtccccctcagccaccatggggaagtagccgtcggcacggccctggctcaagagaatctgatttcagtttattgtccgaaagtagatgaggaacgctgggatgatgcaaccaatccttatgtcgtgactagagatggaaatttcagatgttgaggagggagccgtttcccagggtggcacagggaaaccttgtcagcgatgacacaggtgcaggagtgtccctgcccccaccaagtggggctgagtccccacagcggtgccgagagctgggaggagtgggggcaggggctgcagctgtaaggcaggcggggccgtgtcgggctgctggtccttggggaaggggcagtcgggcaagacatgctgggacaagggttcacggtctgctgagcctcctgcttggctcttcccagggtagtttcggcccctcctgatgccacattcacgtgcagtcagctgccggtttctgtctgggctggagtcgaagctatagattggctgggggaacgttggccttctgtcccatatttgcgccttgcgtctttttgtgccttattccgtggtccgggatgccactgagatgcctgccttgctccagagccggcatggtgttcggcctcccgttgggtgcgctgcaggcttcctagatgccctttctcagatgaggtgtggccccttccatgcctgtgaagagagattgcattttgtcaaataccttgtccgcccccactgggggtgatggtgcagtctttattcttgtcacgtggtgacattcctatcatcagagccttccctacagatacggggttgagtggaaaagaggcctcagccgaggcccagggccacatggtgtgtggagaacgtgcccaggtggtgaacaaactaccaccgcagggaagatgctggggatgggacgtggtggccatccttatagccgggctcggtggcggtgtcagaatggcaggtactcccggctgtggaccccggctgctggggcccagcccctccagtcccccagccccacctccctcctgcgccataggcatcctggagttcttccaccaccagctgaaggacatcgtggagtacgcagagctgaagacggtgtgcttccagaacctgcgggaggtggggaacgccgtcctcttctgcctgctgatcgagcagagcctgtctttagaagaagtgtgtgacctgctgcacgcggctcccttccagaacatcttgccgcgagtccatgtgaaagagggggagagacttgatgccaaaatgaaaagactggaatccaagtatgccccgctgcatcttgtcccactgatcgaaagactggggacccctcagcaaattgccatcgcgagagagggggacctgctgacaaaggagcgcctctgctgtggcctgtccatgtttgaggtcgtcctgacacggatccggagctttctggatgaccccatctggcgcgggcctctgcccagcaatggggtcatgcatgttgacgagtgtgtggagtttcacagactgtggagtgccatgcagtttgtctactgcattcctgtggggacacacgagttcacagtcgagcagtgcttcggtgatgggctacactgggccggctgtatgatcatcgtacttcttgggcagcagcggcgttttgctgtgctggatttctgctaccatctccttaaagtccagaaacatgatggcaaagatgagattattaaaaatgtgcctttgaagaagatggtagagagaattcgcaagttccagattctcaatgacgagatcatcaccatcctggataagtacctgaagtcgggcgacggggagggcacaccagtggagcatgtgcgctgcttccagccgcccatccaccagtccctcgccagcagctgagggcatgcgctgcactctgtaactcaacgtggcatgcctttctctccggcaactattgagtgagatttttagggactatttttcagtatctctgtacctgttaaagggggtgcttttcaatctaaaagcttaattttataaaattatttttctagactaaattgtatatgcttttggtaattaggaactctgagaatactggctgctgattgttgccatcacgttcttacaaaattgtttttctatgggatgttctggcagctctctctcaaaatgctgctgtgttcgttcattcactcattccataagaaacttaataccagcaaatgtattaaatcccttgccagttaccattaactgtaactatttagcttttgtttagggatctttctgatggccttttatgagcagtcttagttctaagtcattgttcccatcccttttttgtgtcagtgtttcagaaaatagtgaacttgattcctctgcttccactaaatccggttgtgacaaaatctaacgtgagatcagatcgaaaggttatagaaataaaactaatgagatcg

SEQ ID NO: 32 - DNA, 678 bp, Macaca Fascicularis
  misc_feature (1)...(678): n = A,T,C or G
acgctgcccnnnccacccnnntccccgcgaaaaggggcaaatgtgctaatgggctttccgggccggggcatccgtggtcggcgcgtctgcaccagtctcagcggcccgaattgtgcggggcggtggtggcgggaagagggagccccagcaggttgtctgggcttcgtttgcttttctgcccaggccccggtccctcttggagcggaaacctctggacctggtgctcctaagaaggcaagcggcccctgacgcctactgtggcctggtgtgaccctcgtagccagcccctgttctgtgaggtatgaagcgccacgcagacgccacgataaagtgagatgaaccaagaccttttcttgattctaagcaaggaacgcacagctcaccctgtcacgtgcagcgaacgtaagctgagaattaccctcttaccttcccacagcgtccaatcttttatttttatatttttgaggcaaggtctccctccgtcgcctaggctcgagtgcagcggcgatcaccggcccaatgcggccttgacctcctgggctccagcgtgcgtctaatctagaagcatatcctccttccttagatcatcccccaaatcacccaactacaggtgaaatcctgtaatagtttcctcggaacactctgttgctgacacctcactgtcttagcctggtgtgg

SEQ ID NO: 33 - DNA, 2004 bp, Macaca Fascicularis
acctgctcgcgcgctcgccctgtggggacccggggcccatggacatacacacccagtcctgctgtcccgcgtgccagctctccagccttaaccaaagggacacaattcacgcctgggcccctccgccggctccgggagcccaaggtcgcggctggaccagcgctgaccatcagaggaagagagcaggaggcttcccagtcgccccagcaggcccaggcgcataggtgcccagagatccctggcttctgatcgcccggacgactaagaggtgttttgttttactgcattttaccaactaagcggcattatcgctgtgctctgattgcccttgaacatggtgcagatgtcaacaattctacctatgaaggaaagccaatattccttagagcttgtgaagatgcacatgatgttaaagatgtgtgcctggtatttttggaaaaaggagccaaaaatccaaatccactgtgggcccttagactgcacgattggtccgtagaacgtgaggctttcctccgggaagccttttcggttttagacaggggtgatgggaccatcagcaagaatgacttcgtgatggtgttggaggaaaggcaagagtatgcgagctcagaacagctgactgccatcgctcaacttcatgagaaaactcggggaggaggggtcaatattaatgaattctttaaaggaaccagatatttaaacaagtcttttgtattaggatcttatggacctaagaaaaagaaaaaagggatgggcaaaaaaggaaagagagggaaatttgtcttaccccttccaatttgcgtcattcctgagtacgtgtttccacgccggcaggatggtgggccaccgtattacatgattgagacctacaggaatgtcactgatagcagccggtttaacagagatcatcccccagaacatcctattcaggatgactctgcttggtacattgatgattcagaggaagtattttcaaacattaatattatcaccaaagcaggggatctggcttctctgaaaaaggcctttgaatcaggaatacctgaggatatgagggataattattacaaaactccactaatgacggcgtgtgcaagtgggaacatagatgcggtcaagtttcttcttgaaaaaggagctaatgttaatgcaacagataattttctgtggactccacttcattttgcatgccatgcaggccaacaagacattgttgagcttcttgttgaatctggagctttcatagacgcagtttcaatcaacaactcaactcctttaaatagagccattgaaagctgcagactggatactgtaaaatacctacttgatattggtgctaaattccagctggaaaatagaaaagggcatactgccatggacgttgcaaaggcatatgctgattatagaataattggtatgattaaagaaaagctagataacttgccaaaaccagcagaaaatcaaaaactaaaaggcaagacacctcctatactgaagactgaaggccctgaaattaagaaagaagaggaaccactgtcatcaatttatggtgtaccaaccacatcagagggaaagaaagtacggaaggataatgtggttcatctcaattcattgattaccagtggttatactaagaaagtggatatcacatttattccacggaggatttggagtcctgaagccgcaacagcagagctgatcaggaagagggaactacggcgagagaggtttacgcatgaggtggacttcgaagattttatgatgccttttcagaagaacatcacagagaaagctcgagcactggaagctgccttgaagacctaagttatagcagttacttcttggggtaaatgccttgaggcccagggaccaatctttggagaaagtagatatttccatcaaagccaaagcaatccatacaccaagaacttcttaccaaatgtttcgttttgctttaacaactataaatattctgagctgtctagagaaaaaaaaaaaaaaaaa

SEQ ID NO: 34 - DNA, 1260 bp, Macaca Fascicularis
gccggcggcgggggcgggggcgccgcgcccacggaaactcaaccacctgtgacaaatttgagtgtctctgttgaaaacctctgcacagtaatatggacatggaatccacccgagggagccagctcaaattgtagtctatggtattttagtcattttggcgacaaacaagataagaaactagctccagaaactcgtcgttcaaaagaagtgcccctgaatgagaagatttgtctgcaagtggggtcccagtgtagcaccaatgaaagtgagaagcctagcattttggttgaaaaatgcatctcgccccctgaaggtgatcctgagtccgctgtgactgagcttcaatgcatttggcacaatctgagctacatgcagtgttcttggctccctggaaggaataccagtcccgacactaactatactctctactattggcacagaagcctggaaaaaattcgtcaatgtgaagagatctataaagaaggccaatactttggttgttcctttgatctgaccaaagtgaaggattccagttttgaacaacacagtgtgcaaataatggtcaaggattatgcaggaaaaattaaaccatccttcaatatagtgcctttaacttcccgtgtgaaacctgatcctccacatattaaaaacctctccttccacaatggtgacctacatgtacaatgggagaatccacagaattttattagcagatgcttattttatgaagtagaagtcaataacagccaaaccgagacacataatgttttctccgtccaagaggctaaatgtcagaatccagaatttgagagaaatgtggagaatacatcttgtttcatggtccctggtgttcttcctgatactttgaacacagtcagaataagagtcaaaacaaataagttatgctatgaggatgacaaactctggagtaattggagccaagaaatgagtataggtaagaagcgcaattccacactctacataaccatgttactcattgttccagtcatcgttgcaggtgcaatcatagtacttctgctttacctaaaaaggctcaagatcattatattccctccaattcctgatcctggcaagatttttaaagaaatgtttggagaccagaatgatgatactctgcactggaagaagtatgacatctatgagaagcaaaccaaggaggaaaccgactctgtagtgctgatagaaaacctgaagaaagcctctcagtgaggagataatttatttttaccttcaatgtga

SEQ ID NO: 35 - DNA, 755 bp, Macaca Fascicularis
ttggtcagaggagtgattgaaccagctcatctccaagggtcctctccgctccatctttgcaatgcttttatatggcccagccttgtgaataaccacaaggtccactccttgctccacaaagccttaagccataggcccaggatatttctgagagtgaaaccatgactgtgaccaccttctgtccccagccctgtcctggtcccctcctgtgcccagataccacccttcagaccccagttctagaggagaagagccctggacacccctgccctacccaggagcctgcccgctgcaatgcctagacttcccaacaaccttagctgccagtgctggtcactaaccaacaaggttggtaccccagataccccttctttgcagggctaaggcccccaaacacagcccctgcccctgaggaagcttggggagcctatgagttgtcagctgtgattttatctcctgctctttctacatgactgggcctccctcaggctggaggaaggggggattctctattgaaggagatcacagcctgcagggcccccccccaaatcccagagaaggacttggagagaatcatgctgttgcatttagaactttctgctttgcacaggaaagagtcgcacaattaatcaacatgtatattttctctatacatagagctctatttctctacggttttataaaagccttgggttccaagcaggcagtagatgtgcttctgaaccgcaaggagcaaacactgaaataaaatagtt

SEQ ID NO: 36 - DNA, 696 bp, Macaca Fascicularis
  misc_feature (1)...(696): n = A,T,C or G
aagatactgctgaacgtgnnnntcatgctgtaatccctagcactttgggaggctagggcgggtgggagtatctcttaaagccagaagtttgaggccagtctgcccagcatgacaagatttacatttcaattttttttcttttttaaaggaatatttagcttgatctggttcacagtttattgtggtttgcttctgacctccatgtctttcacagaaagttgaaaataaggaagttgtagttgaccaagcacaggtaccctgtatctaccatatgagtgtcttagagatccttacaaacatgcgatctgtcaatgtccatgacacccccaccttattagactgcagtcagtcgtctctcactcaaacccatatgtgagtgggaaatccaggttattactatattgattttagtacagtgctgcttaattaggaattttgttggattgaaagaggtatttcagaatagatacagccagactcctggctcattgacttagtttttcagggtgacctaaccctgtgtaattttgaggagttctacatgataaatactcatggtgatgtgagaaccactagtttagtatattgtccaagtatgtttttttcagagttgtgaatgagatttagttgtcatatnnagttggtggtaatctctctatagttnnnnnntttgtattgccagnnntgttgccttct

SEQ ID NO: 37 - DNA, 732 bp, Macaca Fascicularis
  misc_feature (1)...(732): n = A,T,C or G
cccaaataataannntnnnnagtataatannnnnnnnnnnnncagtgattctgaattaaaaggataatgttttgcaatctttaagttgtaaaaagggctgagtattggctgtgtggaagactaaagctttcattctaacattcagacatagcaatccaaaccctgttcctgctgtaaatgaacttgatggagcatggnnnnnnnnnnntggtacgagaaaggggactggtcatctatagaaaaatctgtgagagaacttggacatggactgcatttatcaatacagtcacaatgttaaatgaacaaaattcttgaacagttttttttcaaaaaatgttcaggtttatttgtggaaatgcaagatttctatgaaaatagtttttgtatggaaatttttgtaatactttttatcaacaaaacaagaacatgtgttcctgtcaggggtgtgnnnnnnnnnnnnnnnnnnnnnnnnnnnnnnnnnncaacgtttggtgaaaactatttttatcaagagaaaaggaatcatagaagagaaatattttcaagttagataatataaaagctaggtgcactaccaccannnnnnnnnnnnnnnnnnncctggtttccacgatggctgacaacatactgtaatgaacaattgtgtgtaaaatggtaaaagacacagacctcttgacaacattgtgataacagttgagtgcnnnnnnnnnnnnnnntgaatccaatgcacaa

SEQ ID NO: 38 - DNA, 751 bp, Macaca Fascicularis
  misc_feature (1)...(751): n = A,T,C or G
aaaaatttttttnnncactctaaaagaggtgtggctcacatcaagattcttcctgatgtnntacttcatgctgtacaaagccttaatgttgtaatcatatcttacgcgctgaagannnnnnnnnnnnnncaaaatgtgcaataacatgaatttaatcttagagatctgtgcagcctatttctgtcacaaaagttatattgtctaataagaagagacgtcttnnnnnnntctgtgagtaatgtaactccagttaaacggtgacttttaatagcgtannnnnnnnnnnnnnnnnnaggtcaatgtggcgatgttgtggaaagttatctttcccgctcttggctgtggtcattgtgtcctgcagaaaggatggccctgactgnnnnnnnnnnnnnnnnnnnnncaaaaaataattcacactatcagactagcaaggcactagaactggaaagaccacagaaaacaaagaatccagccctttcatcttacaggtgaacaaactgtgatgatgcacatgtatgtgctttgtaagctgctgagcactgtaacaaaatgtaaatttgccattattaggaaannnnnnnnnnnnnnnnggagtacccaggccacttgactcccagtctggtgccctgtctacaccagacaacacaggacctgggtcagattcccctcagctgcttaacaaagttccttnnnnnnnnnnnnnnnnnnnnnnnnnnnnnnnnnnnnnnnnnnnnnnnagtttcnnnnnnca

SEQ ID NO: 39 - DNA, 698 bp, Macaca Fascicularis
acgacagctggatgagtcaggaaaaccatgtcccctctaggtattattaatataagcaggaagggatctactataggaaggaagtatttataaaaccactgaaagggatagagaagtgaaaattggagaaagccagtagcaactgtcagaaatcagcaacgtgcaggaggcacagaaaactcctgctgatggtcttagcttccagctgcacaaaagcagatgatgtacaggaaaatgctcagaagatgctccaaaactcatgcctactgtctgctactgctggaaaaggaatcatggtttctagaagtgcctctcattagtggactttaaagcaaatcctggctggcaggaaattctgaggaatatagttctcaggcttccagcctctactatgcaggagagaacacagaaggactgatgtatgttggtggatccatggatgtgtccagcacagtggcctgctggactctgagaactggaaaagatcagagcaagccttgcctcttatcttcgggaaaccagaataagtttggggtggtaggagccacacagactctcctgagtcccctaacccacttccttccccctgtgcctttcctttgagagtgaaggtgggtggagttgcccagagaaaggggagagaattcgggaaagacccaaagtgtttgtaattctcctttgtccttttacctacagaa

SEQ ID NO: 40 - DNA, 756 bp, Macaca Fascicularis
  misc_feature (1)...(756): n = A,T,C or G
cagagatctatttttatatcaatgtgncnnncgtgtatataaaaaannnnnnnnnnnnnnnnnnnnnnnnnnnnnnnnnnnagttgatggttcttaccacctcactaatttttatgcnnnnnnnnnnnnnnnnnntattgcccaactggtgctctctgtttaaagttatagatcttgtcaaactggaactattttataagctggggaagtgatttactttttttgttgtatcttttttgttcttaatctattnnnnnnnnnnnngtagtgggaaataattnnnnnnnnnnnnnnnctcttttcttctcccctcagcaccttcttcaagtaaacatttcttgtgtgctttgaaaaaagtttcagcttgctgtctcttttagtgttttaaagaagtgttatacaaagcattgtttgcaaaatgtagggagataatggagtccactttaatttggaannnnnnnnnngctatgatccaagttaccagctctttccaactttaaaaattttgttannnnnnnnnnnnnnnnnnnnnnnnnaatatttatgtctgcaacaattgtctcaaaataataaactgtgcaattcttgtcattaaaaaaaaaaaaaagatctgaattctccctaatgtgacttgttagtttctctcnnnnnnnnnnnnnnnnnnnnnnnnnaaagctttgcttgcattacgttttnnnnnnnnnnnnnnnacactcgannnnnnnnnaagctccggaaaaggttagatctaagtag

SEQ ID NO: 41 - DNA, 674 bp, Macaca Fascicularis
  misc_feature (1)...(674): n = A,T,C or G
ctggattcataatgcaagattagcaaaggatannnnnnnnnnnnnnnttcatnctggatactgttggatcaatactgattaagtagaaaaatccaagctttgcttgagaacttnnnnnnnnnnnnnnnnnnnnnnnnnnnnnnnnnnnnnnnnnnnnnnnnnnnnnnnnnnnnnnnnnnnnnnnnnnnnnnnnnnnnngagaggagtttctttccttctaagtaggcagaaatgggatcattatgttgccactcggccactctccaatatccnnnnnnnnnnnnnnnnnnnnnnnnnattcttttgctttttttctttctctttttcttttcctttttttttttttttttttgaggnnnnnnnnnnnnnnnnnnnnnnnnnnnnnnnnnnnnnnnnnnnnnnnnnnngattctccctcctcagcgtcccgagtagctggaacgaactatagttgcannnnnnnnnnnnnnnnnnnncaaccttnnnnnnnnnnnnnnnnnnntgcttcnnnnnnnnnnnnnnnnnnnnnnnnnnnnnnnnnnnnnnnnnnnnnnnnnnnnnnnnnnnnnnnnnnnnnngagagcnnnnnnnnnnnnnnnnnnnnncctttcctaaaacttgttttctcccattcactactccccaccccacttaaaatctatgagtttttactt

SEQ ID NO: 42 - DNA, 760 bp, Macaca Fascicularis
  misc_feature (1)...(760): n = A,T,C or G
gatggcagagctgccggtggannnnntgctgnccaaaatgannntagnnnnngagaagtacagctgttcagaggagatnntgacagtggctgccatgctctctnnnnnnnnnnnnnnnnnntaccgaccaaaggacaaggtcgtccatgctgacaacgcccnnnnnnnnnnntttctcnnnnnnnnnnnnnnnctggttctgctaaacgtttacacacagtgggccgagagtggttactcttcccagtggtgctatgagaactttgtacagttcagatcaatgcgccgagcccgggatgtgcgggaacannnnnnnnnnnnnnnnnnnnnnnnnnnnnttggtctcagttcctgccagggggactatatccgtgtacgcaaggccatcactgctggttannnnnnnnnnnnnnnnnnnnnnnnnnnnnnnnnnnnnnnnnnnnnnnnnnnnnnnnnnnnnnnnnnnnnnnnnnnnnnnnnnnnnnnnnnnnnnnnnnnnnnnnnnnnnnnnnnnnnnnnnnnnnnnnnnttgactaccaaagannnnnnnnnnnnnnnnnnggagattgagnnnnnnnnnnttctggaggtggctccccattattataaggccaaggagctagaagatccccatgctaagaaaatgcccaaaaaaataggcaaaacacgagaagagctagggtaagagaaggacgtaaacagaacctgtgacaccagctccttttccttctatacattatttaatacctattaaataaaa

SEQ ID NO: 43 - DNA, 708 bp, Macaca Fascicularis
  misc_feature (1)...(708): n = A,T,C or G
ggtacttgccccaanccctacttttgtatttatatgtgtgtatgtgtgtgtatgtgtgcgcgcgcgtgtgtgtgtgtatgtttggtnnnnnnnnnnnnnnnnnnncccctggcctttactttcttccttgcctatgcagggcaaacaaaatgtgaaattctgccctcagctgagctgagtaagggctcctgnnnnnnnnnnnnnnnnnnnnnnnnnnnnnnnnnnnnnnnnnnnnnnnnnnnnnnnnnnnnnnnnnnnnnnnnnnnnnnnnnnnnnnnnnnnnnnnnnnnnnnnnnnnnnnnnnnnnntgaaggagaacatggggataacatgggtgtgtgcccacaacactctaggtgcagagcccctgtggcaaagtattagagggtgtgggtggggattaccctgaagtggggattttaatgatggaagcaggcagagcctggtgggtgattctgtcaacagaaaattgcaatcatgcaggggcttactgtagggttaggatgaaaaaactggggccattggaggcccactgtgggtgggagggagctgattttggggtgggggtgggactagagggcaatactgaaggggttaaacaggtttttgctcctcgannnatttgtttgcctgggcccagggttggagggcttcacaccaataccctgtgtatacaannnatcannntttataatacttccccttttt

SEQ ID NO: 44 - DNA, 2899 bp, Macaca Fascicularis
cacctttctctactggcatttggaagacctgaatggaactacaaccctctttggggtctgttcagtcctgagtcatgtgtctgagctgacagcatatttttttagtcacaagcttattgaattgatcggccacatcagggttctgtacattggtctggcctgcaatacggctcgctatatttatatttcctacctggagaatgcctggactgttctccccatggaagttcttcaaggagtgacacacgcagccatctgggcagcatgcatttcttacctcagtgcagctgttccccctgagctgaggacatctgctcagggcatcctgcagggccttcacctgggtttgggaagaggctgtggtgccatgattggaggcgtgttagtcaattattttggggctgctgcaaccttccgaggaatcggcatggcctgcttggtgatcctactgctctttgccctgatccagtggctggcagtgccagatgaggaagaagacaagacaatgttggcagaaagaattcctgttccctccagtcctgttcctatagcaaccatcgacttggtacagcaacagacagaagatgtcatgccacgcattgagcccagacttccacccaagaaaactaagcaccaggaagaacaggaagatgtgaataaaccagcctggggagtcagctcttctccctgggtgacctttgtctatgcactctaccaaattaaagagatgatgcaactcacaagagacaaccgtgcttctgagatacagcctttacagttgcacataggaaaggagatgaaaggggaccaatgagaacaggaaaaattctcctgctggtagagcccagcctgtcccatgtgagactcactctgacccctgtagaaacctgccatcccctgacgcagcagcatctcagacacagaccagccctgctcaccccagtgtggacccgcgcacagagcagagtgaagagcagcaggctcagctggccgcaggaggacactgacggcatcctgctcatctcacatcctgcatggaatcaggctcctcagccaggacacagggcgaggccccccggccaggatacgccttccctggaggagcacagcactgcatatgcttctaaatatctaaactcattaacatggaaacacacacacaggagctacagtacatattggcaggaaaaggtaaactttcataatccccttggaattacaaaagggaaatggagttcaatgaggactttcagttctttgcttggttaggttaaggatgatagaatttctctgccagtgcagtaagagttgaaaccagcagttacactaagtaagtggagggagtgaaagtgttttgaggtgaatgtggatataatttccctcttctgattatttattcttattatttggttcttaatacaaactgggaagagatagaattcatctatactttcttttttcttgaagagaaccatttaaaaaattacaagatatatttaaaaagtaaccagataaaagttagtagcacatgtgcttttgttaaaaataaagttaaaagttaaagttaaaaaatgaagttaaaagtttcatcagaaactttacatatctttagcaaatatatttttatatgtgtatggtatataatggaaataattctttgagcaacagaagctattattgactactgcaagctaagctgagcttaaaaatgccttttgttttaaatgggctttgagaaaaaaaaacaaacgggggattatttcaaatcaaccaaccaactcagtatcctgtggcttgatagacaagagtttactacatatattgataatgtaaatagcctgtcttgctatttactatcttatagtgattcaggctctaattagctgagggaatgaaacacacacacaaatcactgaattcctaagagttccattaaataagcagtactatttacaaatcacagtataagatttaagtgcctggggaagggatacaatttttagaaattacatattgggtcagttttgttttgtttttggtgaggaaaaggtggtaaataggaaaccatgaatgggaaggatggcaataagtagcaactgtactttccaatgactaaagaaagaagatctcagtatattccttctcatgaagacacagtcagacactggacaatgtaacatatgcaactgcaaacgttacagctgcagccagaacaatggctgcgtggatcacatgtaaagcttgccgcccaaaatcaaagcagaggttaacaggaaatctggggggagtgtggaaaagggaacactgctttagctgactaaaggtgaattatataatttataatagctgtggatgagccacaggcgagagaggaaagaaaagaacagttagaaatgagcaactcaccttaccctgattagacaggatcaattgtaaagtgagggcttctccatgacaccatagttctgcccagtactgcatttgggataagaaattctacacttggatgtctagcttcaccacacagcttaaaaataaaataactgaaatagaattcagcaaatagttattttttgcacttgaactgaaacgtactgtactgtaaattatgactcattttaaggtgacctttaaaatcagatgtatttattatgcttgtgtaattatagaaataaagaaatgggtgacaggctgaacctcacctatgaatgtacaggtatgtggatttgtgaaactgactgtaggaagtcaaaaacttatactgtatcttgtgtttacagttctgatttattcctttgaaaagcctgctgttttggaaatgcacagttgacatgttgaaatataaataaataccatttttaaatgtttcttaaatgataaaaaaaaaaaaaaaaaaaaa

SEQ ID NO: 45 - DNA, 654 bp, Macaca Fascicularis
gctcagtccaacccctctccaaacggcttttctgacactccaggtagcgagggagttgggtctccaggttgtgcgaggagcaaatgatgaccgccaaggccgtagacaaaatcccagtaactctcagtggttttgtgcaccagctgtctgacaacatctacccggtggaggacctcgccgccacgtcggtgaccatctttcccaatgccgaactgggaggcccctttgaccagatgaacggagtggctggagatggcatgatcaacattgacatgactggagagaagaggtcgttggatctcccatatcccagcagctttgctcccgtctctgcacctagaaaccagaccttcacttacatgggcaagttctccattgaccctcagtaccctggtgccagctgctacccagaaggcatcatcaatattgtgagtgcaggcatcttgcaaggggtcacttccccagcttcgaccacagcctcatccagcgtcacttctgcctcccccaacccactggccacaggacccctgggtgtgtgcaccatgtcccagacccagcctgacctggaccacctgtactctccaccaccgcctcctcctcctttattctggctgtgcacgagacctctaccaggacccttctgcgttcctgtca

SEQ ID NO: 46 - DNA, 742 bp, Macaca Fascicularis
  misc_feature (1)...(742): n = A,T,C or G
accgaaaaagggaaattttttaaacaaaattatgggaggccatttttttttggactaagctcatgcactaggccccaacagactaaaccaaaccaaaatggagtcacctatgctaagaccttaagcaaacacatagatcctaaannnnnnnnnnnnnnnnnnnntgtttttctcctacaaatctctataacaaacattcctgatagcatatgtatccaccctctgaagttcccattaaatcttttaaccaaattcatttcctctcgccaaaagaccataaagcttcagatgatcatacaacaaaagttccagccgtttccaccacccctggccatcagggagctaccctgccttcactagacagagcagggtaggagttccgtgatcctcaataggcagggactacacctcaaggcagcnnnnnnnnnnnnnnnnngaaagaccattggcccctccacctcccataaagatttatagggatcacatctctggaggaaatgaggcagaagaataggatctggaggcagggaatatacagcagatgcatgctgacttcctagaactaaataaaatggaaacacttcagctatcatgggaaatgccttctctatttacatagggcataccctgagtaaccactggaaacctctagagggtatttaaaccccagaaaattctgtaactgggctattgagcccctatgctcaggccctctgccaccctgtggagtnacttcatttca

SEQ ID NO: 47 - DNA, 748 bp, Macaca Fascicularis
  misc_feature (1)...(748): n = A,T,C or G
gagaaaaannnnncaacaagaccagccngactgagagtgagattgcattttttgggggtatnnnnnnnnnnnnnaagaacagcattgacctcttcctatacgtggtgggctcatcctacgagannnnnnnnnnnnnnnnnnnnnnnnnnnnnnnnctgtttgagtctctgaaccacatgttaaggaagaacnnnnnnnnnnnnnnnnnnnnnnnnnnnnnnnnnnnngccttcttggnnnnnnnnnnnnnnnnggatggcggtgtgattctggagagtgacccccagcaagtgatccagaaggtgaattttagggcagatgatggcggcnnnnnnnnnnnnnnnnnnnnnnnnnnntctctgctcagactnnnnnnnnnnnnnnnnnnnnnnnnnccttggcgctaactccttgtgctgcggtggccttaccgagatgagcctgtgctgtctcgtgtggagtcccaggtnnnnnnnnnnnnnnnnnaacaaattaaatggtccttattgaaatgaaggctgtggattcaagnnnnnnnnnnnnnnnnnnnnnnnnnnnnnnnnnnnnnnnnnnnnnnnnnnnnnnnggnnnnnnnnnnnnnntctgcatccccaggtccnnnnnnnnnnnnnnnnnnnnnnnnnnnnnnnnnnnnnnnnnnnnnnnnaaggttggcctcaggnnnnnnnnnnnnnnnnactgccttggccttaactcataccttagnnnnnnnnnnnnnnnnggccct

SEQ ID NO: 48 - DNA, 745 bp, Macaca Fascicularis
tcagggcatggggagggagggagccagtgctccaaggccagggggctttgctcatgagagatgtcaggcttcctggaggcatcaggctttgagccctgctggggtccagctgacctgggaccaggtgtcgcacagagatgtgcctcattgtgtgcctcctgccatgttcactttaactgtgcctcagtgtgggttcactttaaccgtgcctcagtgtgggttagggaacaattttgttattgtattaagtttattcagttaattcacttgaggaactaaccaagttttactttctgtctagaatgatgtacatgtagtagagtaagccataatgctcccgaagtgccttgttttctctgatacaaacatatttataaggacgtattccagtgggttcttgggtgtgtttgccacatcaagattttagggaatgcgtgtatgtgtagtagggacgctgtttgaaaacaggccctcttcccttgaggatgggaaaggagttcttcagttggagatctgggcagtgggttaagccagacccctaaagtgaccctttcctattctgccctgttcttctcagaccctcagaaagacatccaatttttttaaagccctgtagctccaagcctggtcttacttgcttccctgccaggctcatcgtgtgtataccacctttgcgccccattgacctgaaggttccatgtaactggatacacatgaatacttaaatgccaacatttaaaataat

SEQ ID NO: 49 - DNA, 689 bp, Macaca Fascicularis
  misc_feature (1)...(689): n = A,T,C or G
tcacagaattccctatgccctaggaaacagaactnnnnnnnnnnnnnnnntccccatttgcttcttcctacttctgccttttcaaaaccagctcttctnnnnnnnnnnnnnnnnnnnnnnnnnnnnnnnnnnnnnnnnntggggaggccacaaggagaccttcagcattgagtacaagaggctccaatgagaggaagacagaaatnnnnnnnnnnnnnnnnaggcacgnnnnnnnnnnnnnnnnnnnnnnnnnnnnnnnnnnnnnnnnnnnnnnnnnnnnnnnnnnnnnnnnnnnnnnnnnnnnnnnnnnnnnnnnnnnnnnnnnnnnnnnnnnnnnnnnnnnnnnnnnnnnnnnnnnnnnnnnnnnnnnnnnnnnnnnnnnnnnnnnnnnnnnaaggctgannnnnnnnnnnnnnnnnnnnnnnnnnnnnnnnnnnnnnnnnnnnnnnnnnnnnnnnnnnnnnnnnnnnnnnnnnnnnnnnnnnnncaaaataaacaaacaccattttttcctgattaaaaacatatttctttgtgtaaaaatttataaatgcatttagaagaaaatatgattcactctaattatatgatccatttgtaactattaatatatagtacatagtttaaaaaatttttattgagcttaaagtgtatctagttttgtgtcctaattatttcacttaaccttc

SEQ ID NO: 50 - DNA, 752 bp, Macaca Fascicularis
  misc_feature (1)...(752): n = A,T,C or G
agcgacatggannncagnngagtgatgcagagggcagcgtgccccagtgggaagaggagtcacctccactggagaagagagagaaagtggagtggcggtggggtccatgtgacttaagtcctgagacaggcagggagcgnnnnnnnnnnnnnnnnnnnnnnnntcccaaggagggcagaggggatcgtgcttgtccctgtaggagccccacccccaccccaggccacctctcggagcctctgctggctgcaaaggaattcacccctaccctagcacttaacccattccttcctatcaggatggtgctgtctggtcctgaatttagaactgttgaaagtccaagtctggaatcagcagaaatgtattacattgaccagaaaggggctgaatcacccttggtccagcatctggcccctgatctgcagccaatggcaggaattgaggtcctcagatgcttcatggatgggaattgcagggagggaagccctcggatgcggtgattcctcgagtcnnnnnnnnnnnnnnnnattaaaagcttgtgtaaaactcatgcatgtcatccaaaaaggcctctgggctnnnnnnnnnnnnnnnnnnnnnnnnnnnnnnnnnnnnnnnnnnnnnnnnnnnnnnnnnnnnnnnnnnnnnnnnnnnnnnnnnnnnnnnnnnnnnnnnagctcatgtttagaccttgggcagccggggaagcctactcctggggcctccgggaagccatggagagaacaaaggca

SEQ ID NO: 51 - DNA, 705 bp, Macaca Fascicularis
  misc_feature (1)...(705): n = A,T,C or G
acannnagacataaaatttgggcatagtcnctggataaataaatgtaaatttaaatataaatcatataacaggaaacaaatgaaattaaagaaaataaatttttcaagaaaataagtaaatttatggatgataattctgtaacattgtcagtgcaaagttttttctttttattttaagggttttatgtttgttttttacttgttgcaacctcaaaggaccaaatggtatgatacacactgagataatnnnnnnnnnnnnnnnnnnnnnnnnnnnnnnnngaactttaatattaacaaggaaaattttgaaatggacaatgaaaaggtaacactttatgtatggggaagaatatnnnnnnnnnnnnnnnggtacattaaaagtcacacaaaaggacattttgactagcattcnnnnnnnnnnnnnngattataagattatctatgaggttttggaccaggcattacactactgaattatggataactttgattcgtgatctagaccacgtcacccaatccatcttggatttcagttttctggtttatgaaattaaggagctaagctaaatgactctcggtttcttctcgtgtatcatacatcaaaatgctgtaacttctccagtgaattcacagaacactgacctcttactgtcatgatatactttacgctgtgagcaggtatacatgtataatatatgtatacga

SEQ ID NO: 52 - DNA, 706 bp, Macaca Fascicularis
  misc_feature (1)...(706): n = A,T,C or G
ccaggcatgtggggggaacatgcctcccttggaaggggcaccccatannnngnnnctgccgnnncggccccntnagggaagcacagagctgggctttccccgtgtagccccagaggatgannnnnnnnnnnnnnnnnnnnnnnnnnnnnnnnnnccctcggcctcggcggcttcttcggcagcggcaggcgagcccctggagtgccccacctgtgggcacacctacaacgtcacccagcggcggccccgtgtgctgtcctgcctgcactctgtgnnnnnnnnnnnnnnnnnnnttctctatgagtcctgccccaagtacaagttcatctcctgccccaccnnnnnnnnnnnnnnnnnnnnnnnnnnnnnnnnnnnnnnnnnnnnnnnnnnnnnnnnnnnnnnnnnnnnnnnnnnnctgccgcccgaggcgctgacagccccatccgggggtcagtggggggctgagcccgagggcagnnnnnnnnnnnnnnnnnnnnnnnnnngtggggccgcgtgcacctgccacgtgcggaacccactgtccgcctgctccatnnnnnnnnnnnnnnnnnnnnnnnnnnnctgcccgctgagcctcactcgccgcttcttcagggacccagccctgccctgccacccgctgacccttccttccccaccatggcttctggccccaccccaagtggcattgtcgctgcagccaact

SEQ ID NO: 53 - DNA, 2313 bp, Macaca Fascicularis
  misc_feature (1)...(2313): n = A,T,C or G
atatttcaatttttcatcaaagtagtgatacacttagttttaaaagtgatgtacttagttttaaaagtcaaatgctagagaggttatatagcacaacagaccccttctctgccacttcctacccttgtattcctaaccttgagaggcaacatcttcgacttcttttcttttagcagtttcttctaatatttacctggaattttgatgccatttcctttattgtcttccagcttctagtattcctgattttggaaggttttagggttttgctttgtccctggagttctgaaatttcatttagtacatataatgtaacttggtgtacatcttttttgtttattgcccatggcactcatggtttcctccttttgatctgatatccttcagttctgaagaagtttctgtattgtttcttcgatacaaatgttctttgctgcatcttttctcttcttcaacttttcttatttttctcttctatttttagtttctgtctcattttctattttcagggagatttcttaggctttatcttctgaaccattatattgatttaaaaaaaatttcccctgatattttttcattaccaataattttttttgttctctgaatgcttcttgttttgttttttttaaatgtatttttctttttcacaggatgcaataactttttctctttaaggatattaactacagtttttttgatggttcctcccatttcctgtgagttcttttttttctatttgtttgagctctttcactttgttgacttttttttttttttttttgagatggagttnnnnnnnnnnnnnnnnnnnnnnnnnnnnnnnnnnnnnncaaaaaaaaaatatgattgaagatcctcagatgtcttttcatatttaagggtgatcaagaggagatcaagagcttatctaacctctagatttctttgtcttggatctagttatttaaagaacaatctttcacttccttgtctaggggaggagggtgggcaataagcccagctgccagtgttttgggagcctacagagagaatcagacatgaggctcaccattccttatgcaggtttcactcagcccctctattttcagtaagagtcctcatctccttccccacctacaccagtttcctttgagcccacagcctttctcgtttagcctcttcagagagcagcaggccttctgttttgtataggagaaagtcagttgcctagctctgagtttgaggaatgagacattattctctatagattttcaatgcacctgcctgttttttcagtcccacctcagccttccaaagtgctgggattacagatgtgagccactgtgcccagccctttgcccattttttaatgaggtggtttttttgtttgttgaattgtttaattttcttatagattctgaatattagaccttcattgaatgccaagtttgtgactattttctcccattctgtaggttgtctgtttactctgttgtttcttttgttttacagaagctctgtagtttaattaggtctcacttgtcaatttttgttatcaactttgtcaaacatcaggtggttgtaggtgtgtggctttatttctgagttctctgtcctgttccattggtctatgtgtctgtttttgtaccagtacaatgctgttttggttaccgtagtgtatctatggtttctgcgtctatggattcaaccaattgtggattgaaaatatttgaacaaaaaaatgcatctgtaccaaatatggacacacttttttccttgctgttatattccctgaataatatgacaatcactttcataatattaggtattataagtaatctagagatgattgaaagtatatgggagggaagtgcataggttatatgcaaatactacacaattttacatcaggaatttgagcatctctggattttggtatccgaaggaagtcctggaactaatcctccatggatactgagagacaactatacgtggttgctttttaagagttgttggtcggacgcgnnnnnnnnnnnnnnnnnnnnnnnnnnnnnnnnnnnnnnnnnnnnnnnnnnnnnnnnnnnnnnnnnnnnnnnnnnnnnnnnnnnnnnnnnnnnnnnnnnnnnnnnnnnnnnnnnnnnnnnnnnnnnnnnnnnnnnnnnnnnnnnnnnnnnnnnnnnnnnnnnnnnnnnnnnnnnnnnnnnnnnnnnnnnnnnnnnnnnnnnnnnnnnnnnnnnnnnnnnnnnnnnnnnnnnnnnnnnnnnnnnnnnnnnnnnnnnnnnnnnnnnnnnnnncaaaaataaaaaataaaaataaaaaaaaaaaaaaaaa

SEQ ID NO: 54 - DNA, 716 bp, Macaca Fascicularis
cagcgatgagctcatcaagctctatttgtaacctgtgggccctttcctgccaaggtgcagcttctgtagttgaggctgaggcagggtgagtagctgcttgacaccccagtgagccaggccaaacctgagatgcgttttaatgaagatttatggagtaaggacttaaaatcatacatcttggagaacctttcttattcatttcagtcccatctaaaaatgtgtcagttattctaaatcccaacctaaattgttcttatggtttctagaaactttccttttcagtttccagaaatacaagttagataattggctacttaactgatgaaagatgagcccaagtccatctctcctcatcctcccctgcactcgactgatctgccaaaagcatgcgagatgcaggggaaaagcagccacacccctctgccacaaacgaccaacagctggtcaggacgttacacgcggtgccttgtaagaggcaagaaacacttgccgaatctgcgtctggcttccagtggcaagcacattcctcagcaggatcaagccaaacaggaaaaactgtaccaagagaacatgaggcgggcagaaacatttagcaacagtattctgcatggctcactgcttaagaaaatgccttctggaatatttgtaaactaaagttctgtatgtgtaagagatgtttaaatatgtttgggtcctaaacagctttttaaaattat

SEQ ID NO: 55 - DNA, 744 bp, Macaca Fascicularis
  misc_feature (1)...(744): n = A,T,C or G
cagcactaaaagggaacgggcannnnnnnnnnnnnnnaattcatttgtgacacttaaatctctagatatttatcccacgtgggtctgattcaggctcagcactaaattaattctatgtggaaagtgtccattgcagagccttctgtatcgatgaggcnnnnnnnnnnnnnnnnnnnnnnnnnnnnnnnnnttttccttgggagcatgctttctgttcctatgtgagacagcctgacataagtgaaatgatttgggctcaagcaaacatgagatgtgggttcatatcttggcagtattcctgatagctgtgtgatcatggcaaaccttgnnnnnnnnnnnnnnnnnnnnnnnnnnnnnnnnnnnnnnnnggcacgtaaagtgctcagcatctgtgcttagcaggctatagtctccctgcctcctttttcttgagtaagcctttagaactttctgactcctttagagaaggcagagaaacgaatnnnnnnnnnnnnnnnnttggagtctgggtcttttgtttaaactgtattgtgttgaaaactgcctgtcacccccaggctctgggggcatctgtgatcatagaatactgccatgcttattttgcctctgtatgttgagattaattcactgacgcttcattttccatgtgcatctgtcatagtctgggtaccagactgtatttagagaatgacttttgccnnntgttatatacacacagatcgtgtgtgtaaacaagcaaagaaa

SEQ ID NO: 56 - DNA, 2073 bp, Macaca Fascicularis
agtaagccatggaacttctcattgtcattaaccccaaatcatattgttgggatcaacaatatcacccttgatttggggttaatgttagatctcatagttctcatagttagatgaccacctcaggctgcgtttgtgcctgtgctctgggttccctctctcactgcagttagaacatcatgtggccgctgttggtttatttctcggtggaaagtgagcctcttaaaaccaaggactgtgtatcaacccaggatttggcttgtagaggaggttcagctgtctatatatctccctagatacctaaaactgactacctgatcacgtcttcccattgctgagctatttccctgatatctggccatgcaacggagatcaagagggataaatactgggcttgttctactcctttctcaaatcttcaatgttgggatcaacaatattccacctgtcaccctagcaactttggccctcaacatctggttcttcttgaaccctcagaagccactgtacagctcctgccttagtgtggagaagtgttgccagcaaaaagactggcagcgtttactgctctctccccttcaccatgctaatgattggcatttgtatttcaatatggcatccatgctctggaaaggaatacatctagaaagaagactgggaagtagatggtttgccttggttatcaccacattttctatacttactggagtggtatacctgctcttgcaatttgctgttgccgaatttatggatgaacctgacttcaaaaggagctgtgctgtaggtttctcaggagttttgtttgctttgaaagttcttaacaaccattattgccctggaggctttgtcaacattttgggctttcctgtaccgaacagatttgcttgttgggtcgaacttgtggctattcatttattctcaccagggacttccttcgctgggcatctggctgggattcttgttggactaatgtacactcaagggcctctgaagaaaatgatggaagcatgtgcaggtggtttttcctccaatgttggttacccaggacagcaatactactttaatagttcaggcagctctggatatcaggattattgcccatttggctcattcctgaagcccctaattcattttaattcattttaaacaaaagcagagtacaccagtattgctccagactgctcacatcacctgggacagtcctcccatggcccctatgagtcaactcacagcttgctgggagtgggcccttctcctggccttgttcttgctcataaacaggtcacttcctccacgaagggaccagtttccacactccctcctctcactgctgactcagcaatgcctctgctttggtctgcttttgaagactgtgaccttcaccaggaggttttactttcaccagtcaggaagattagtccctcattctgcctggagagccccatgtttgacttggcagcgggtgtggagccatccccgcgtcctcctggcgcattgccactgcggctgtccaggaacaggatgtggctgcctcagccgaatgttgtcctactctccccaaccccggcacctcggcacctcgggcccctgcatctggctggtgtttgcagggcttttgctttgctctggtattgctctgcctttatagaaagtctcattgaagaagtgtaagaaagacctaaggtggggaagactcctacacacaccgttagtatcagtgacaccagcagtgtaggttcccagccacttcccagtggcagcttgtgtgcccagaagataggacatcatttaacaaaccagcaaagtaacagcagatgcaacatacagagtagagcaaaggcatttggtggattggtcactagagatctatcttgcagaaagtatgtttttcctcataaaagtgcctcttaattggccattgtaccagccacttgtcctagccaaatgtccaaaacacgcccttgggccccgcaacgttacaatccacagattgtctgtctgagtcatttaaggcatttcctggtgcttgtgttccatgaataaaaggacaaaagtcaaaaaaaaaaaaaaaaaaaa

SEQ ID NO: 57 - DNA, 724 bp, Macaca Fascicularis
  misc_feature (1)...(724): n = A,T,C or G
cgggcgaggcctaggggtgcgctnnngnnnnnnnnnnnnnnnnnnnnnnnnaaaaactggagtcctcccctcctccnnnnnnnnnnnnnnnnnnnncttttggctggattccctgcacccagtgcaacacaccctttccccttcactctcccttgnnnnnnnnnnnnnnnnnnnnnnnnnnnnnnnnggctgagctggggaacatgtcggtgcacagctgaaagtcagcgattatgccggcggttagaaatgtgccagggttaaaggagtccgaagctcccacggctgctgggaggacacggtcctgcccccttccttcctccctccctccgtctccacttctctctcccggcttttgacaaatttctttattccccnnnnnnnnnnnnnnnnnnnnnnttttgtgccactctgcgccccaccctcactgttggccgctccttatccggcctggcccggagggtgacaccatgtcaccctcaccaggactcgtctctccattcccgtccgagtttgctttgatttccctttcctttccttctcggggaccagttcttacttctttttatttttagctctgcactccatgtggtttcagggttcagtctgatccatcaaaaggttctttttttataatcccttttgaaaatgataatcaaaggaagagacgtggtgtttggtcatgggaaaactcaatgtataattagacgtctgtcaaaaatcc

SEQ ID NO: 58 - DNA, 171 bp, Macaca Fascicularis
tcggcagctagtctccttggagggcaccgtgaagaggctttcaatcctgccgcctccgtcctactcctcttctggccccagcacccgcccgtgccgcgcggccagcagatggcgatgcagcaccaccatggctcgaggaagccgcggagcaggagcagtgtggtggctgga

SEQ ID NO: 59 - DNA, 705 bp, Macaca Fascicularis
  misc_feature (1)...(705): n = A,T,C or G
tnnnnnnnnnnntttccagcctataacatattaatgaataatgtttagatgccatgtgggagagtagaaagctgctcaatgcactatgaataaacaaacatggattattaacataggtattccaacagaagatatgtgaaaagcagataaatataaaacaccacctaacctaagtcattaagtttaaggctaagattcccccacccacatccagattcctgtgagtagcataacatattatagcaatgaacaataatgaatcttcataatctctcagtggaaaggtaggaaaggttaacatgttataaaaatggtgtttttaaaagcatgaaatacttaatacattctagaaaatgcttcaatgaaaaggtannnnnnnnnnnnnnnnnnttcagatggtttaaaagttgcttacagaacaaactatagtttataaagaatgggtctctaatgacacaattcttcgttggaaaattcatatcaagttaacacaaaatatctaagatataaggttatgcaaaattacaataaaacttttaaaaatcaatagacctgttacagaatatgctcttggattctggcaggaacttggtgacaaagggatatagaaaacaaaaccatgcttccacaagtctttgatgaacccatagtttttccctnnnnaaactctttccaacaagcttcatttccttaagcttccatgtc

SEQ ID NO: 60 - DNA, 725 bp, Macaca Fascicularis
  misc_feature (1)...(725): n = A,T,C or G
aagcaaaagannnngaaagaaagaaagttnnnctctaaggctactgnnnnnnnnnnnnnnnnngctaaatgctcttgctcccttcccnnnnnnnnnnnnnnnnnnnnnnnnngtttatctagacccttcccatctgaagaggaggatagaaaaataggtaaatatgtaatgtaaaatatgtcattcaaggaccaccaaaactttcatgaagtaccctatcattaaaaatctgtttttaaaagtagctcaagcaagggatgctttgtgacccagggtttctgaagtcagatagccattcttgcctgccccttattctgacttactgggaaagggagaactgcagtggtgtttctgttgcagtggcaaaggtaacatgtcagaaaattcagagggttgcataccaataatcctttggaaactggatgtcttactgggtgctagaatgcaaatttaggtatttattgtcagatgatgaaattcattgtttttttcaaaattggtgttgaaatatcactgtccagtgtgttcacttatgtgaaagctaaattgaatgaagcaaaaagagaaaatagtttgtatatttgtcataccttttgtatttcttacaataaaaatattggtagcaaataaaaataataaaaacaataattttaaactgctttctggagatgaattattctcctggctattttcttttttactttaatgtaaaatgagtataactg

SEQ ID NO: 61 - DNA, 787 bp, Macaca Fascicularis
  misc_feature (1)...(787): n = A,T,C or G
agcggggaacagatnnnnnnnnnnnnncnnnaggttgtgcatccagagggttctttttccatgggagctcctggtgccccctcggccccagcctgtccctcccgcctccagccnnnnnnnnnnntgcagcagcatcttgtcactgcacaacagtggcctggtcccccagaggcagctagggccccaggtcagacctcaccgtgatgattcgttcagttttcccagggcagagaggcggagaggctttcgctgagagagcagccaaaagcctcttcccaggagcgtcgggcaagtgggtgctagagtctgagcctcaggctctcctgccctgggcctcccaattggtgctatctgttactgcccgtgttcacggacatggatacagaccctgctatgctccataccctgcaggcgcctcgggaagcgcccagaggactccccttcacgttggtgcacctgctccatggctctgggcagtgtcccgaggggccacagtctccatttnannnnnngcatggcctggcaccgggtggggtggcatgccccaggacccttgtttgtgtcaaaaatgactttccctgcccctgccgtgagtctggcattcttcccagccgggagcacagtgggcagccggcacccagcaccactttggtgagcgccctgcttccgccctcaccctcatctacgctgctccgctttcctcagacccctttttgccatgcaaagggaattcttgacattaaataannnnnnnnnnnnnnnnagactgcatnnnnnnnnnnnnggg

SEQ ID NO: 62 - DNA, 694 bp, Macaca Fascicularis
  misc_feature (1)...(694): n = A,T,C or G
gcactnnnaggatggagatcnnngtnntctnnnatgtctnnnncatcccagaggccactgccagccccccttttcccccagagtcatggcgtcacccccgtcaccctctgactgcaggcctgggcaactgcggggagctcgcttttccctccccctcatcacagtggccttctcacagcacccaaatcttcccctgccgttcccctgccctcgggctggccaggcggatgaggtccctcctcctgagcccccagcgtcacccattgcaaggccaggctctcagtcacccctgcaaaatggtgcctggttcacagctcccgtgcgtctgcctcatctctcccgatcagtgtctgtctcttgggagtagctagagttccttgtgagcttgtccccaagcgaggcacgcaccagccggtggtcagtgagggagttaagtggcttctccgtggaaacacagccttctgctgcagcagaggctcacccagcgtgatctgccccgaggaaacactgggtcatgtctggggacattgtggttgtcgggactggggatgcttctggcctggagtgggtggaggccagagacactgctcagcagcaccctgcagcgcccaggacggccccatcccagagaacaatccagccccaaatgtcaacaccttccccctacccaagttgtgaaaataaaaagtgtttc

SEQ ID NO: 63 - DNA, 723 bp, Macaca Fascicularis
  misc_feature (1)...(723): n = A,T,C or G
tcacaagttaaaaattaacagttgtttcagtgctagannnnnnnnnnnnnnnacttgtgataccactatatagtataatnnntccagaaatcttcattttaaatagaagtgtttacaatgccttttttcccccagtattggttttcagtacctgttttcacacagtcacaaacctttcaaacctgtattccttctttatactcaggaaaatgtcaccaagcaccctcctccccagtcaacaaaaggaagaannnnnnnnnnnnnnntccctgttcaccctccccagttttccaaagtgtctgagcggatgcctggctgtccccagatcatcaccatgccacatccctgctccccacttcctggcagccaagaaaagccctnnnnnnnnnnnnnnnnnnnnnnnntccaaaaagttagcactggggtgttagaagctagaatagagctctctgccaccnnnnnnnnnnnnnnnnnnnnnnnnnnnnnnnnnnnnnnnnnnnnnnnnnnnttcttgatccaccccttctcctaccccggatcccagggactcatcctgtgactttgtaaccacactcattcttttcaaacacagaggannnnnnnnnnnnnnntatgantttattcaaatctagttatgtattagcctaaattatttgtgcaaaatttgaaatgtttttttatttaaatattagaaatagcnnnnnnnnnnnnnnnnttaaaaaa

SEQ ID NO: 64 - DNA, 708 bp, Macaca Fascicularis
agaatctcagaaagattgtgctgtgtttctataggtaatgaaatcctgtcaattaaggaaaatgctgtgtgtaatttgatttggtggtagcctttatttagagctctctttgatctatatagcaaaaatagactaaatttctttttaatcttgtactgagtacataatttcacaaaaataccttgggtataaaatatttataaaaggaattgtggattaaaatactcaagatacttttaaaatttagtcaaaatgttgattcccagcctttttcctacacgtctatttcaaaaaagtatactttattctgacagccattactgcttagtctgtgatgaaagctttactgcttctatgctgtgctcaggagaaaaccaacaacagaagcgaaggcttgctccttcacagaattgcagcaaagctctctgctggcaatggtgacaggaaagtgtgtaattgacttgttgaagataatcatgagatcatctgaacattacttgccttataagttagaaatagtatggatatcactttttgtaaataataatttttgtgttttttgttcataattttcccaatcacctatttcacaaaatcctgaatatgcaattatttattatgacacattactgcaactagggctcccattccagaacaaagtttaattctatatgtaagttgttactgaaatgtgatttctttttctgg

SEQ ID NO: 65 - DNA, 773 bp, Macaca Fascicularis
  misc_feature (1)...(773): n = A,T,C or G
cannnnnnnnnnnnnnngggttctcaaggactgccccagcagtcataccaacagccaatcatgctacctaaccaggcaggtcaagggtcacnnnnnnnnnnnnnnnnnnnnnnnnnctgtaatgtcacaccgcccacccctcagaacaaccttaggctgattggcccacactgcccctccagcactgtcncagtgatgttcggctannnnnnnnnnnnnnnnnnnnnnnnnnnnnnnnnnnnnnnnnnnnnnnnnnnnnnnnnnnnnnnnnnnnnnnnnnnnnnnnnnngatnnnnnnnnnnnnnnnnnnnnnnnnnnnnnnnnnnnnnnnnnnnnnnnnnaggacttaattattcactcaacactcaaatnnnnnnnnnnngtattctgtaaaaaaataaacaaagactaatatacacgttagctggttaatggtgcatatttctgtcatgtctgctaggtatgcctttatagcttagctagtgacatgaattcatcaaggtaagattttctcctaccactgannnnnnnnnnnnnnnnnntaatatccctaatttggattagttttgtactttgtgttgagtttgtgatgctaaaagtatttaaaaattatatactaaatcacattgtaccaaagctgtaatggaaaagaaaagaagaactgatgaattgaaggaataatttatatacattatagagttttcttttttaatggatatatactgtattgtagtgtttaatcataataaaactatttgaccttatggaggaag

SEQ ID NO: 66 - DNA, 758 bp, Macaca Fascicularis
gagacaagcttgctgatagtctaatcaaagaaccaagggatgcgctaaccctagtcttcccagtgacaacagattcattctgattaattcattaatcaactgtgagctgattaatagttgattaattaccacattttgctgaaggcattcgagtggtgttcctgctatttttaaccagagtcctgttggatacagtatacacaactgtgagccctcatctcctctgtctacctctaggtacagaacagagggaaaggaggcaatggggctgagccccatccctgtgtgtactgtttttgccttactgcagatagcactgcctcgttctggtctgtggcttttgtctctggagacagaatccttggcccccaacagtatctatatcctaatccttgggacctgtctcctggcacaggagactttgcaggtgtgctgaaggtaaggatttcgagatggggaaattattatggattatccaagcaagtgctaaatataatcaaaatagggagacaggaggatgagaaacaagacacatatatgacagtggatgcagaggtgaaaggaagggagagggagaaagaagaagagagggagacatttgactctgttggccttgaagatggaggaagttactctgagccaaggagtgaagatagcctctagaagccggaagaggcaagaaaaggatttctctcctggagccctggcagggatgctgccctgctgacaccttcattttgagaattatgacctccagc

SEQ ID NO: 67 - DNA, 728 bp, Macaca Fascicularis
  misc_feature (1)...(728): n = A,T,C or G
gcgctgctcgcagnactgcgacaccggcggccnnnccacgctgcagtaccggctgctgccgctgcccctgggcgttcgcgcccaccacgacgtggcccgccttgccgccttctccgagtctggcgtcccagccaaccgcaccgagctcagcgtgctggagccggacccgcgcagccccttcgcgctgcgcccgctgcgcgcgggcctnnnnnnnnnnnnnnnnnnnnnnnngctcacccgctctggcctctaccggctcaccgtgcgcgccgcggcgccacgccaccaaagcgtcttcgtcctgctcatcgccgtgtccccctacccctactaaacgggacagggcattggcagctgccctggcgtgacccccgaggaagggggcgaggaggagcttggtccacgccacctgctgtggcaagcggagcgtcatcatctctcgccccatgagtcagcgagaccttgggtcaacacgaccctgcgcgcagccttgacccccgacagcgaggacctgagctcacggagggaggcgtccggggcggtccttgggtggccaggcccgcaggcagggcccggggaagcctccaagtgtgatccgcccctcagtgggagcgggacagggacacagggcacctggacgcctgggggaggaggcagactccgcgttgggggtggcagcggctgtcgcccgggcacacctggnnnnnggtcnnntgaaccctgtacaa

SEQ ID NO: 68 - DNA, 725 bp, Macaca Fascicularis
  misc_feature (1)...(725): n = A,T,C or G
atgggttggaagaggcctcncttcattggagcatgagtggatgccagaactgtaggttataaggcagtcactttttctctctnntcccacccacacctgcctccctcttccccctgctcccccacactgcaggagggtttgtctctaagaggtgctgccccaaagctccccaagcatcaagatctcctggggnncaggacaagtggctcccctggcccggggagccacagccatgatacaaggctcttatggagccctggagttgttgggcaaggatgctgtcatatttttgaaccaaaagacaaacaagttaaaaggaaaaaaatctcctgaatttcccaagtgcctacgctgcatattccccttgttagatcccattttcatgttactttgtagccttggccagaggctcaaaaaggacacaaccagtttgggggaggggtggctaaggaagatggtataggtgaaggtggctgtgtgaccacttccccccacccttcccaccctctatacaactctctcccttacctgtttnnnnnnnnnnnnnnnaggtgttttccctctgccccactccctgccatnnnnnnnnnnnnnnntcctattttgggcctagggtgggtgcacctggggctggtcttaggagggtgctaggttgcagactgccttgtaccccctggacaccctcaaatggggttttctgtgttatttcataagactcttgaagt

SEQ ID NO: 69 - DNA, 117 bp, Macaca Fascicularis
ttcacatcgagagtgagtatgtgggggtatgtgtatacagaatgttttgtttttgctcatcacaaccaggtttcatcagtatttaaaatatttaagattgtggcttggaatgtggtc

SEQ ID NO: 70 - DNA, 1572 bp, Macaca Fascicularis
tactggatacgtgcttaatcccggtgcagggggcgagcatggcggctccgcgagtattcccactttcctgtgcggtgcagcagtatgcctgggggaagatgggttacaacagcgaagtggcgcggctgttggccagcagtgacccactggcccagatcgcagaggacaagccctatgcagagttgtggatggggactcacccccgaggggatgccaagatctttgacaacggcatctcacagaagaccctaggccagtggattgctgagaaccaggacagcttgggctcaaaggtcaaggacacctttaatggcaatctgcccttcctcttcaaagtgctctcagttgaaacacccctgtccatccaggcacaccctaacaaggagctggcagagaagctgcacctccaggctccacagcactaccccgatgccaaccacaagccagagatggccattgccctcacccccttccagggcttgtgtggcttccggccagttgaggagattgtaacctttctgaagaaggtgcctgagtttcagttcctgattggagatgaggcagcaacacacctgaaacagaccatgagccatgactcccaggctgtggcctctgctctgcagagctgtttctcccacctgatgaagagtgagaagaaggtggtggcggaacagctcaacctgttggtgaagcggatctcccagcaagtggctgctggaaacaacatggaagacatctttggggagcttttgctgcagctgcaccagcaatacccaggtgatatcggctgctttgccatctacttcctgaacctgcttaacctgaagcctggggaggccatgtttctggaggccaatgtgccccatgcctacctgaaaggagactgcgtggagtgcatggcgtgttcagacaacacagttcgtgctggcctgacacccaagttcattgatgtgccaaccctgtgtgaaatgctcagctatacccctagctccagcaaggacaggctctttctcccgacacggagtcaggaagacccctacctctcaatctatgacccccctgtaccagacttcgccattatgaagatggaggtccctggctctgtcactgaatacaaggtcttggcactggactctgccagcatcctcctggtggtacaggggacagtgatagccagcacacccacaacccagacaccaatccctctgcagcgtggtggcgtgctcttcattggggccaatgagagtgtctcactgaagcttactgagccgaaggacctgctgatattccgtgcctgctgtctgctgtagaggctgcagcctccctagctctcctctgccagccaccctaaattccagccagccttgcctcctgaggcccagctcaagcccccttccttgctctggactccttaggtatatcctagaagagctggggtggaggagggagcgtgaagatagtgactcctgaacacagccaggtagaaccatctttggggatgaaaggcctgtgtaaggggtctgatactccccttgtcttccctctctactcctcactacacctgagccaggc

SEQ ID NO: 71 - DNA, 430 bp, Macaca Fascicularis
gggaaaagcatgtgacaaggccagttagaacagaggatgggaaggatggtgactcccgggtttggaaggctaggaagaaggcagtcttgttgccatttcaagttgctagataggcccattaattcctcccacaaccatgacccattatcctatggactagctgtgcctcagtttgttcccgtcaatggaatgagaaatgacagcacccgcctcagccaagagatgaattttgagcactttccacgggcactttatggacataaaatacctttcgctgtgggacagataacctgggcaccagagtagtggtgaagagatgtgaggtttaagaggagtcacaggcttcagagtacaagttcccctgtgcctcccagttggacagtgcgtagaagccaagttgagaatgtcctgatccacaccctatccttac

SEQ ID NO: 72 - DNA, 755 bp, Macaca Fascicularis
  misc_feature (1)...(755): n = A,T,C or G
tgcnnnnnnnnnnnnnnnnnnnnnnnnnnntgccactgctggtgctttcctctccgggctccaaggctagtctcgcaggcgaagtgtcgattcctacattccgaaggaagcttccgtcttggcagatatttcnnnnnnnnnnnnnnnnnnntttatgnacagggccaaactnnntaacggtattttttctgcttcgnnnnnnntccgcgctctgttaggtcccatcaaaatacaaaccctgcctcctcgctttgaagcgactctccccgtccccgccccccagcctctagactaatggctcagctcaccgactgtggcgagnnnnnnnnnnnnnnncttcatgccaaagaannnnnnnnnnnnnnnnnnnnnnnnnnnnnnnnnnnnnnnnnnnnnnnnnnnnnnnnctttccttaaataaatcggccatcacgtctcccgttagcgtcttagtgagaccccaagaggtgtcatgtgtataaaaagaaactctgtatatgcaatagagttgagaagacatatagaaaggagactggaaaagtgtgctcaaaacgctggtaatggttaccttcagagaggagaacgatgggcacgatggtcaaagcagactttacttcgagtttcttatttatctttttatttttaaacaaacattactggccgggcgcggtggctcataactgtaatcccagcactttggaaggccgaggtgggagaatcgcttgagccaaagatnnngncnnnnncgcgcccgc

SEQ ID NO: 73 - DNA, 721 bp, Macaca Fascicularis
  misc_feature (1)...(721): n = A,T,C or G
tatnnnnnnnnnnnnnngatgattttttttccttgttcattccacttggtcttaactcttcccttctattgtttggggatgttaactgcaaagnnnnnnnnnnnnnnnnnntaaagtgtctttttcccaatctggtaaattaagtatgtggtaagacttctggaagagtagatctgaggtactttctttggtgcacactaataggaggtgtgaagggaaagcagaattgcaatttccagcctaaggaggccaagccagtcggccnnnnnnnnnnnnnnntcttggataaannnnnnnnnnnnnnnnnnntattggctgatgggacctccagtgccttcttcagcctgttggtggggatgacgccctcagagtggcaggttgagcactctcctcccaagcatcgctgnnnnnnnnngtgtggaagggttgcctgatactgagggtggggcgcctggaagatagnnnnnnnnnnnnngctcttgccttgccctttatggttaaatgttctttggaaagcttctatatctctcaaatcctgggggcattatgatctttcttctgcctatcctaaaccatcttcagccagtactgttgggagaatacaagctccagggcagggtccctggtccgtctggatgacccctctggttctggcacatagctggcgttctatggaaccaggtatttatctaaaagcagggacagtggaatgtgaaacgtt

SEQ ID NO: 74 - DNA, 2959 bp, Macaca Fascicularis
  misc_feature (1)...(2959): n = A,T,C or G
aatctttattcccaaatatctgcaaagcctccccactgtgaagagtcaattagatccatctgagaaggatgtgtgaagcttcaggcactgggtgtgagtatcaatgagaaagattcaaggagctaagccagaggatgggctagtctacagtatggcggccaacccagaggtcttggtcacagggatgttgttgggattgacagaggaaatttataggggtttcactgaagcttgacctgaggctagagaggaggttgtagaaccaaagcagtggatgcaggcatgcgtagggctcaagtgtgatcaaggcaaggatctacactgggcaggggccacctgtgggagctgagcccacatatatcagcaggtgcttaggcttgaatcaggtgtgagggaccaagtccatggagaaagtccagagggaagagtgtttaaggactgtgtgtgcgcaggtcgtgtacagaagtctgattttggtctgaccctaccctgcctttgccactttggacttggtggtccctctgttgttacccagactcctacagttgtagcatcctgcctgcatgtgctgctccctgcctcctgccttggccgcttcacctggtgaggcctacatccagacgtgctgccaactgagcagcccagcccagatacaaagctgcatgtttccagaataaagtgaaacagggattacttcatgaaaacaaccgtaaactctttcaaataagaaatgcacaccacgaccctgtctctattgtgcagctttaattctcacatgggaataaccaagtaagtgatatgcaatctcttcattcctaggaattcaaaaatagattagttggatcaaaactaaagaagaaatatcagaactctgaaaatcaacgcagctggaatgttaacctcagaaagtttccagagagtccactggaaatcccagctcacagtggaggatcaggttctagaccacccacccgccagtcccagtctcccggttttgcacacataagtggcctgaagtgtttgacaagcacggagataatgagaattcaaagggagacagactttctcaagtgtgcccactgccttgccccctgcccatcagatccctttgctcgcttctgtcaagaatgtggctctcctgtcccacccatatttggctgtcgtctcccacccccggaaggagctcagatgggcttatgtgcagaatgcagaagcttggtgcccatgaacactcccatctgtgtggtgtgtgaggcccctcttgctctacagctgcagccacaggcaagcctccacttgaaggagaaggtaatttgccgggcctgtggtacaggaaatcctgctcacctgagatactgtgtcacctgtgagggggccctgccttcatcacaagagtcgatatgcagtggggataaagctagtcctccgcccactcagaaagggggaaccatctcttgctccagatgtggtcgttggaatctctgggaggcgtccttctgcggctggtgtggagccatgctgatggcattcctgctggctgctctgtttgccctaaatgtggggccagcaatcacctgtctgcccgattctgtggctcctgtggtatttgtgtgaagtcgttggtgaagcttagcttggatagaagcctggctctagctgctcaggaacctcgccctttttctgagccccaatgtgcctggcagtccctgaatattcctttgcccagatctgatgctgggactaagagggacataggcacacagactgttggcctgttctacccatccggcaagctgctagcaaaaaaggaactggaaatagcctctcaaaagcagaggcaggagaaaatgagtgaccataaaccgctcctcacagccatcagcccaggaagagggtactggagaagacagctggatcacatctctgctcacctcaggtgttatgctcagaacaaccctgaattccgggccttgattgcagaacccaggatgggaaagcttatctctgctactgtccacgaagatggttgtgaagttagcatcagactgaattatagtcaagtctcaaacaagaacctctacctgaacaaggcggtgaatttcagcgaccaccttctgagcagtgctgccgagggtgatggggagctgtgcggcagcaggtccagctgggtgagtgactacagccagagcacctcagatactattgaaaaaatcaaaaggataaggaatttcaagaccaaaacttttcaagaaaaggaggagcagcttttacctgaaaacagactcctgctgaaggaagtcggacccacgggggaaggaagagtctctgtgattgaacagctgctggatgagggagcagaccccaactgctgcgatgaagacaatcgacccgtcataactgtggctgttatgaataagcaccatgaagcgattccggttctcgtgcagagaggagcagacatcgaccaacagtgggggccgctcagaaatacagctcttcacgaagctactctgcttggctttgcaggaagagagagcgtcgccactttactgggatgcaatgcaagcgtccgaaagaagaatgcagggggccagacagcgtacgacctggctctgaacactggagatgacctcatcacctcactctttgctgccaagtttggccaaggactcgaggaccaactcgcccaaactaggagcctcagactggatgactgttagacctgaggcctccccgggacttcatttaagaatatgtgcggaggctggcagatcacctgaggtcaggagttcaagagtagcctgaccnnnnnnnnnnnnnnnnnnnnnnnnnnnnnnnnnnnnnnnnnnnnnnnnnnnnnnnnnnnnnnnnnnnnnnnnnnnnnnnnnnnnnnnnnnnnnnnnnnnnnnnnnnnnnnnnnnnnnnnnnnnnnnnnnnnnnnnnnnnnnnnnnnnnnnnn

SEQ ID NO: 75 - DNA, 760 bp, Macaca Fascicularis
  misc_feature (1)...(760): n = A,T,C or G
gagttgtacaatgnnnnncagtcnnnnactgaatcaggtcatagactatggaattgcccccacagtaaggaaaaaaaaaaacaaaaaactttccaactctagcacacattttatctactcttaaacttaggaagtattacaaatagcattttctcatgttctctggcctatacctcccctctcagcttccttcagtgttcattctcacctcgtaaagagatgaagtgaagagacaannnnnnnnnnnnnnnttcctttagtggcttctggtttagttagtttaggccagactctgtggaccaaagtaccttttcaggcaacttttttttcttcttatttctatgtcctcaacacctagtggagtatgtagccaatagtaggtgcttaataaacatttcttaaattaatattgttgaccttttctgaccctgttcttgacagtaagatacataatctgccttcatccccttagtccttaggaacagctagagtcatggatgtgaaagtgattactgtcattaatatccagactaaaattgctcgtgattttagtttctccacaatcattttccctaaacaatgaactcttttcaccttatttttaaaatatgcacagtgaatattactggtagcccaaatcttctaacataaaatttccattttgtaaaagcttctgataagtatgtagattatgaatttaatgtttgattattatactgtaatgttcttgaaaatattgatatctggactggaaagaaaa

SEQ ID NO: 76 - DNA, 754 bp, Macaca Fascicularis
  misc_feature (1)...(754): n = A,T,C or G
attttatgcttcaattcatatcatgtacattaagtaccatataaacttatctttaggctatcaatatttannnnnnnnnnnnnnnnnnnnnnnnnnnnnnnnngaaatacagcttaggcatctgctaacctgcttaggcatcaaaagaggtgccaaattacaaaatagggcattaacaatcaaaatttttaaactgacccacataccttctactggtttcgcttatgtttaagcatttactctnnnnnnnnnnnnnnnnnnnnnnnnnnntattatgcaagagtttacatcttttgcataaatggtccgttgggttgcacctacccttgaccaaacaaaannnnnnnnnnnnnnnnnnnnnnnnnnnnnnnnnnnnnnnnnnnnnnnnnnnnnnnnnnaaacccaaaaatctgtaaggttggagggactccagttaatctttgggcttagaggaggaaaaaaaannnnnnnnnnnnnnnnnnnnnnncatctcttaaaaatagttttagcagcttaaacctttttagttataaaacnnnnnnnnnnnnnnnnnnnnnnnnnnnnnnnnnnacaatcaagtataacatacgtacactggcactttagcacaagggcaaactttaaaaacaaattattttggacctttaaaattaggccatactataaaaaacagtccacggtcttacattcagcaaattcatactaaaatattccatttttgtannnnnaaggccaataaaactttacatatgct

SEQ ID NO: 77 - DNA, 722 bp, Macaca Fascicularis
  misc_feature (1)...(722): n = A,T,C or G
cagggctgtcccagagagaaggcagctgagctgaggatttggattggttctcagggccagggcaaatgaaggtacatgtctctcagaactcagcatcccgggatgctctgggcaggcagactgtagctcgttctcatgtggctcttcttgcctgcttttctgctgcttagcccagaagggacacctgccatgcccacctctgtgccttggcacctactatttccactccagcctattctgtgcctaactccaaggctgacttgtgagatgccttttccaccctgcctctctcatggtttcctatcgtaatcagtggtgctnnnnnnnnnnnnnnnnacatgttcctctctctccttttccttccacatcccaccagtcaccagcactattggtttaacctgaagcttatctctaatgcacctccttttccactcctgctaccttatgtgagccctcattgcccctgcctggattatagccggggtctccttcctgaccccttcctgcccttattctctgcccctgtatcactctccatgggactcttgctattactcaaatctgattgtgtcactccaaggnnnnnnnnnnnnnnacccatctccttctacagcannnnnnnnnnnnnnnnnnnnnnggaagtggcttagagaatgtaactgattaaccaaagtcacannnnnnnnnnnnnnnnnnnnnnnnnnnnacaacacatccaaata

SEQ ID NO: 78 - DNA, 765 bp, Macaca Fascicularis
  misc_feature (1)...(765): n = A,T,C or G
cttcatgatgtcagcatcnttccaccagagtacaggatggaaccctccctggggagggtcttaagacccacaattagaaaggtgagggaagattagagtcctgctttggggtagatgaaaggaaaggagagagattctgtttcctgaggcttaacccacccaacattatnnnnnnnnnnnnnnnnnnnnnnnnnnngagnnnnnnnnnnnnnnnnnngggctaaaaccaacatacatcttaataccagataccctaatctcagtcctaacttcannnnnnnnnnnnnnnnnnnnnnnnnnnnnnnnnnagtggctcaagtatnnnnnnnnnnnnnnnnnntcagtgccctccctgatttgagggtaagaagtagataatgaggccactgtgggtgttatttttcatgtctggacctcagcctatatcctgagactaagtggaagtgggaaaagagtacaagagaagagacaaagtggggggatttgtaaggcttagatgagatagtgtttttttagaaaaaatctttatctaccattaagtaaaatgtttgccataagcttcctcgggctttctttttttaaagtcagactgtagaaggtttcttctattcttatttgttaagagttttcttttattgtttaaattgtgaatgaatattgaactttattaaatgcggtttctgtaaatattaacaagatcatattacttttattcttttatttatatcattataaattagattatgttttcaatgttacactacc

SEQ ID NO: 79 - DNA, 824 bp, Macaca Fascicularis
  misc_feature (1)...(824): n = A,T,C or G
gccgaccttcatcagtgggagaacaaagcagcagcnnnaagccaagttcaccaagtccattgctgttttttgaccacagtgggacactggtcatggatgcatatgagcctgaaatatccaggctccatgacagtctcgccgtagaaagaaaaataaaatagccaattctaaaagtagccctctttctgctggatcttgctgaattactggcttgcggggtgggggagataaaaagaacttaaaatgggtaaagtaagaaatgtttaaaagtccctgttttgtcctgaaattttagtctattctggataaataggattttctgacacggatatgagaagttgtagctctgatgtctagctgtagtctccttgatctgctgattacattattttaatttgcttttctgagaaagtagttttgctaaaagctgtacagatgttttcttttgtacctagcatactttatatagtatagctttgggccatgtagcattttaagactgaattttaaaaaattattaatctgttgctgactctgttaattcctatttcaatatgtgtttccttgaagaattcaggatacaacgtcttgtgtatgacagctttccttcacacactatttttgtgggtgtgtatatatctgatttggggagaatttaaaaaaaacatagctttttaatttgtttgaaacagactttctgcctgttacattttgtgcttttaaccagttaaagaannnnnnnnnnnnnnnnttttatattgtgttttccacttagtatatccctgttgatttgtttgtgccttttattaactgccattttctaa

SEQ ID NO: 80 - DNA, 2488 bp, Macaca Fascicularis
  misc_feature (1)...(2488): n = A,T,C or G
gcaaagatgtccgcgcccgctgctgggaggcgaggtgagagtgtttgaccgtaaccaggcgcccggagctgaggcagttcctgcacgtgtcgcggggccggagacgctagggccaggtattccaaggatgcaagaatcctgcaaattcgacatgtaaactgcttcctcagcctccaggcgagccctgcctttgcctcaggccccttccttttccttttcggggaatcgacctcgggaaggggtgtgggcaaaaagatgaggactctcccttttcgcccaggccaactcgggatatcccggagcctctggggaggcggtcactccgacgtctgaggacctgggccttgggcccggactcgttatgaagagcgactgctcgacctctgcagcccccttcagggggcttgggggacctctgcgcagcagcgagccggtgcgcgcggccctggcccggtcgccggccgtggaccttctggaggaggcggccgacctcctggtggtgcacctggacttccgggcggcgctggagacctgcgagcgggcctggcagagtctggccaaccacgccctgccagaggaacccgcgggcacctccttggaggtgaggtgctccctgtgtgttgtggggatccaggccctggcagaaatggatcggtggcaagaagccctctcctgggtccttcagtattaccaggtccctgaaaagctaccccccaaagtcctggagctgtgcattcttttatacagcaaaatgcaagagcctaaagctgtgctggatgtggtgggtgcctggctccaagacccagccaaccaagaccttccaaaatatggagccttggcagaatttcacgtgcagcgggtgctgctgcctctgggctgcttgtcggaggctgaggagctagtggtgggctctgcagctttcggtgaggagcggcgactggatgtacttcaggccattcacacagcgaggcagcagcagcaacaggaacactcaggctctgaggaggcccagaagccaaacgaggaaggctctgtctcccacaagttcctgtcactaccgatgttggttcgccagctttgggactctgcggtgagccacttcttttctctgcccttcaaaaagagccttctggctgccttgatcctctgtctcctggtggtgaggtttgatccagcttccccttcctccctgcccttcctctacaagttggcccagctcttccgctggatccggaaggctgcatcttctcgcctctaccagctccgcatccgtgactgagggtccctgtgcaccacagcctctctgctcctcacgtctgcggcaacagaagcagagcgacagagcgacacatccacaggcgcccctggggaaatgggatcagcctaatctcgcagagtgcactgtgtcttgctgcctgggtgccctctcctttgcaccccactttggctggtcgtggtagatgatgtggaaacaaagcgggaccagcagacacagcacctccagaacagtgccccttgaaaaggaggggtttggggacagggactgtgtccatgaaactttccatcttctcagcaaaggcaaggggttggttcttcaggtcaggatgttaacggagctggaagttcagaaaaagcctggtggagtgaccctcggcctttcacttcttgagaaacatacttctttgctgggcatgnnnnnnnnnnnnnnnnnnnnnnnnnnnnnnnnnnnnnnnnnnnnnnnnnnnnnnnnnnnnnnnnnnnnnnnnnnnnnnnnnnnnnnnnnnnnnnnnnnnnnnnnnnnnnnnnnnnnnnnnnnnnnnnnnnnnnnnnnnnnnnnnnnnnnnnnnnnnnnnnnnnnnnnnnnnnnnnnnnnnnnnnnnnnnnnnnnnnnnnnnnnnnnnnnnnnnnnnnnnnnnnnnnnnnnnnnnnnntctcaaaacaaacaaacatgccgcacaggacagcaccttaattagctagagtgcgatctgagagggcctcttcttgcctgcgctgtgctccccagagctgatctaattctgtatcgagatgctgctcccatggtcttgccacgcgcctgaagctctgggagccttcttaccgttcagactggggcgtggttttcagaaccacccggttgactactgaaaaccaagtgagccttacagctcttatcactgggtaaagtgatcttgcctggtgcctcttggtcttcagctcaattttccaggttgtcctggccaagccttgctgtgttacgctcagtgcctctttccactctttccccgtcagcccctccctccctgccctgcaaattgtccattggctctttcaccaggttctgcttgtatccttgcctccttggtacacaccattgcaagttcttccctttagggatgtgggggcggggcagaggagagacatgggttttgaaggcagtgaacaataaaaccttggggaggtggcaccggaaaaaaaaaaaaaaaaa

SEQ ID NO: 81 - DNA, 402 bp, Macaca Fascicularis
  misc_feature (1)...(402): n = A,T,C or G
ggaggagcccagggccctctgccgcagcaaacnnnnnnnnnnnnnnnnnngctgaaagctccctgtgggttagggatgtggttcctttgtaagggtgggcaggcctcatgagaaagagggannnnnnnnnnnnnnntccacgaatccttctttctttgaggctggaacttgctctctctgcccccatttnnnnnnnnnnnnnnnnnnnnnnnnnttgggaatttcctccaggaaactcagggccgtcttctcttcccttagcttggggtggaccgttggatataaaaggaagcagttttagtattagaaaagatttattagaaacttctcacgctgaactggtgtagcatgtggtgcagcattcattgaaannnnnnnnnnnnnnnnnnnnnnnnnccagag

SEQ ID NO: 82 - DNA, 708 bp, Macaca Fascicularis
  misc_feature (1)...(708): n = A,T,C or G
tgatactaggtagtgatggtggatctagagacattcacttgaagagcaaggattggggtggggtgggttagtgaatctatctcaggccactgcactgcaaggtccatttctgtcacttctgcaacaccatgagacctgagcaagaatgtactgttgcagagggcctcttggtttcataaatgggtgtatacagcctgaactcaggaggcagaaatcaaaagaaatccttgnnnnnnnnnnnnnnnnnatagagagaaaatggagagaagggtgttcaaggtcaggattgatttttgcatttagcggaaaacctcaagtctgactcggtggcagaacacgcagcagaaaagctgtgaaggaaggaaatttacgtgattgtaatggaggctaggggtagagtgggaggtgagnnnnnnnnnnnnnnnnnnnnnnngcagagccaacccctatcatttgattaacacggaacccacacagataggggagggattaaggtaagaacttacagaatgcaaacacgagcacactctcttcgaacccagttgtgggtgtagcaatgaaagcaatatgatatgctgcagtgtgaagctccttctgggggttatcgtatgtacaaagtttaccttataatggctcaaattgtatttaatttttttgttttgtttataaatgaagaaaagctataagtataatgtaattattttatag

SEQ ID NO: 83 - DNA, 825 bp, Macaca Fascicularis
  misc_feature (1)...(825): n = A,T,C or G
ggtgtgnnnnnnnnnnnnnnnnnnnnnnnnnnnnnttgaggtaagtggaattagagggccttgctnnncttctttccattcttcttgctacactccctttccagttgctgtggaccaatgcatctctttaaagnnnnnnnnnnnccagcaagcagtctaccccatcctttgcaattgctcttctccacgtcttctctgctacaagtgttttagatgttactaccttattttccccgaannnnnnnnnnnnnnnnnnnnnnnnnngatactacacctgggcttaaggcctaaggaagccagtcaccttctgggcaagggctcctatctttcctnnnnnnnnnnnnnnnnnnnnnnnnnttctgctgctnctgcggaagagattcctattactgcagtacttctgtccgccaggggtaacttggccactgtccctgtccttctacagaacctgagggcgaagatggtggctgtgtctctccnnnnnnntgtcactgtctgtttttattctttccctctagcagctggcctaaccactcgagtcacaggtgtggcgtggagaggggggaggggcatttaatctgtaacccccaaggaggaaataactaagagattcttccaggggtagctggtggttgtgccttttgtaggctgttccctttgccttannnnnnnnnnnnnnnnnncaagcctgtgggcagcatgcccagattcccagaccttaagacactgtgagagttgtctctgttggtccactgtgtttagttgcaaggattnnnnnnnntgtggtggtgttttttgttactgttttaaannggtgcccatttg

SEQ ID NO: 84 - DNA, 741 bp, Macaca Fascicularis
  misc_feature (1)...(741): n = A,T,C or G
tagtattagaattcattaaatgtttaattcatttcatattctaaggaattaggttatttacgtactaattcaggatgttaaaataacatccaacacagacaaccaccaccaatgcacagagttaatgagattcctaaaatatagttaagtacaatgtaacaaacagaattttgnnnnnnnnnnnnnnatcagatgtttaattacagcttattggcatttgtgnnnnnnnnnnnnnnnnnnnnnnnnnnnnnnnnnnnnnnnnnnnnnnnnnnnnnagcatatctgcaggaaagtaccttgtttgtagtgatatgccccaatactgattgatttcactcttgaaatgagttatatcacttaatttgtataaacgttatgagtggagagacatgtacatgttaaaagcatgttgcattatatagagattcattttttaaactctataaatgttaagactaatataattgcagaaatatttttcttaactacagtgtgtaacaaaattcttcatagcaactcacccactttgcagtttatgtgatccacacttttaaagaaattccataaatgtatattttgtattatgtattatttcctggtccaaagaaaatatgtgaattcagttctaactttaagaatgtactgtttattttcaagttcattgaaaaattgcattcannnnnnnnnnnnnnnnnnnnnntatgttagatgaaaagtagaaataatttctagttgcaaaac

SEQ ID NO: 85 - DNA, 744 bp, Macaca Fascicularis
  misc_feature (1)...(744): n = A,T,C or G
aatgaaaaagcacanantcactannnnnnnnnnnnnntggtggagnncntcaatgttttcnnnnctggcaccccttttaggccccctaatgtctttactacttctattcactataggcccctgtgtggtaaataaaattttacaatttgtcagagaaaggtttgataccatccaactaatggtcctccgtagccatcaccagcctctcctgcacccagaaagtgaggctatattataagactctggaaatccaagattggacatccagttacttatgagaagggagaaatgaaaggacacaaagatagatgtgtacccgccccccacccgctacacccttgttctgctctctaatnnnnnnnnnnnnnnnnnnnnttgtaagttctgtaagtacatgtttctctttctgaggccaggtcacaaggaatgtttaagtaagnnnnnnnnnnnnnnnggtgtgtttaagcaagatagccataaactggtcgtgcaacctgatgcaatataattaactgcctttgtgtaaaactgctcttctgcctcaagggttgtannnnnnnnnnnnnnnnnnnnnnnnnnnnnnnnnnnnnnnnnnnnnnnnnnnnnnnnnnnnnnnnnnnnnnnnnnnnnnnnnnnnnnnnnnnnnnnnnnnnnnnnnnnnnnnnnnnnnnnaacattgttcggagctcagtaggggagctctcctgcccgtctcgtttcacgagcaagtgagagctccaggtc

SEQ ID NO: 86 - DNA, 709 bp, Macaca Fascicularis
  misc_feature (1)...(709): n = A,T,C or G
atattaatgttattcagtaagtnnnaagtttttcagaggatagattactaacaatgaggaatttatattccttggttaatttaggagtctaagatgcagagttcagaaagaaattactcagacctaactgagtnnnnnnnnnnnnnnnnnnnnnnngatgctatttatttgtgtctgtaagtttgtacatagtaatgcnnnnnnnnnnnnnnnattttttatttgtgggggatgagtttgaattttgtttgaaatgcttcagttgtcattttgtcattgcatttcaaatagctcatgacccttttcttgtnnnnnnnnnnnnncaccatagtagcccacaaagtgggggcagggtattgacatttggattttttctttgattctagttcttttattgatttttatttgtgactgtagtgatgacttcacagatggagaaagagtgaatggatgaatgaataattggtttaatgcttagttatgcaacttgagtgctttttttttggcaggataatttaaagtgtatatattttaactnnnnnnnnnnnnnnnnnnnnnnnnnnnnnnnnnnnnnnnnnnnnnnnnnnattttgtggctatagggtgcctggtaataatgtcttgatttttctttgggactcaactatatcgaaggtttttcccccagcagtatgggggtgtacaggtgatcgatcattaatgtcattgc

SEQ ID NO: 87 - DNA, 2859 bp, Macaca Fascicularis
tttaaaaatactttaataaggatctgtacatgttgaatctgtaattacctgtgtattatctctgctcagtcttgagtgaagtctgagtgaataatttcttcaatgatccagtttttctgtttttttcccctcaatcatttaatgcacatgactgtatcctaagtttagtgaagcagaaaacaaagtaaaatatattttaaagcacagttattacaaaatgcttccagtttctactctaaatgaataacgtctgcgggtttaagctatttcctctcatctggatcttctctttgtctctggatcctttgtcacataatgagaagttgatgaatgccgaaatttgaagtttcacaaaagagaagactaaattgaaaaataaatagttttctcagtttttgtattcatgataatgttaattataaagcaaaataacagtgactgagaaatttatttcaaatataagcacaatataaacactggctgtgttaacaactggtaagatattaaaatccctcctagttgcgcttcattactccaggtataaatatttacccaacttgagataaaatttttctcaaaaatggttaataatatatataagtttttttgtctgaatgcagtgccgaatatccattttacttcatttcatattttatgtcagcacagccaaactttttcccaacaaaaaaagcagtctgatttaagccactgtggcagatctttgccagactgttctaacttgtattagcgatgagtattttacatgcttaccatgatgccctcagttgagggttctttattgttattatttcaattcaataaaaaaaaaaagatggagcactggataaaatttcagttactaagcaaagtaagaagtaattacaattttcaacaatgcagaagcaattcaatgtatacactctgtattcccattttatagcaataaagatctttaaaatattttccaaacagttcattgctaacatcagtctcccctccactgtccccaaacattctcaaattatttcttttgtgataataactttgaaatccttcagatttttaaataacatattttctacaagttttgcttgaatacataatgttaaactgaacttcctaggttaggcaggatatatttgaatgttgctcgtactttctgcaatatagtacttcttaatgggactagaataaacaaactgaggatattggtttgaaagcttctgtaatgtttttctgttctctgtttttttaacctacaagtggctcctagcagtgaggactaaagatgattgacagaaaataatgttaattgcatggtatttaaagttgtagggatcttaccccatcctggtttcatcctttgatactaatatagcctatgactattcacttatgtggttgcctcaatccttagttttcacaattataaaactagagttatgggaacaagtactcaacagaaatattgtgagaaataatagcatagtgtacaataagcaatcaacatatgctaatgattattaatgctgttaatatagataacaaataaatgaacataattttcaaccacttacaaatatttcaatataatttggaagtgaattacaaattagacaaaaatagaaaaagactattgtccaataaaataggtattcacaatcaccctgttacactgaatttgattgcatatataggctctgccttaatgaaaaggggaggacaagaaagtggatactttcttttcctagaacatccattaaattaaaagtgctgagacttctggtttccagttccacttataagtcccaactctgttttaacaacagcaaaaagtggagtgactgataagtcaacttttattaaatcaataaaagaggtgatggaaaacagttgtctttactgttttggagattgaagagacagacaagtgaatacattgagtcacaggttaccagagcagagtctcaccagtggaaaccttggcaggaatgaggactggggttgtaaacctgaaatatagttgaattgctgggggcacaaagtggacaagtctgagaattaaaaactccaggggaacccacaaaatggagctcacacttttgtgagattcacctccaggaacttgacccacttcccttagtcaatatcagagaaaagtctcttcatcgttctggcgtggggataggaaaagaaatctccttagaatatgccagagcattatcttcttagaaaggtttgcactcaggagaaactctttaatcagagcttatcctcttggggttttatcagaacctaggggaggggaaatgcccaatttcagccacttatatcctcttacatggagggagggaaatacagaatctcagcccactctaaccatctacaaaggaggaggaaaatacccaccttcggcctactctaggcttcgttttctatttatgagatggtggtgctgagaagcacttttgaagttcacagtccacaggtgtaggcttaataaaagactgagactgaatcacaggactgtagaatgcttcctgtccctgacaccctactaccacattattaaagaactgtttacagcagtccttttactgccacatgctactgtctacatcatgtccagttatcaagaaagaattgcaaggcataccaaaaggcaaaaaagaaacccataatttgaagaggcagagcaagtagtcatgacagggatattggaattttcagactgggaatttaaacaaatatgattaatatgctaggggttcttaatggattaataaagtagataacatgaaaggacagatgggcaatttaaacagagatagaaatcctaagcaaaaaaaaaaaaaaaaa

SEQ ID NO: 88 - DNA, 722 bp, Macaca Fascicularis
  misc_feature (1)...(722): n = A,T,C or G
acttaggggtggaggggcgttggatttaaaaatgccaaaacttacctataaattaagaagagtttttattacaaattttcactgctgctcctctttcccctcctttgccctttttttcatccttttttctcttctgtccatcagtgcatgacgtnnnnnnnnnnnnnnnnnnnnnnnnnnnnnnaataataaaagacaagaaaccaagtgggctggtattctctctatgcaaaatgtctgttttagttggaatgactgaaagaagaaccactgtttctgtgttcttcgtatatacacacaaaaaggagcgggcagggnnnnnnnnnnnnnnnnnnnnnnnnnnnnnnnnnnaggagggggcttgtaggaatctgccttccagcccagacccccagtgtattttgtccaagttggcagtagagtggggtagaaggaaagcatgtcgctgcctccatggcttccctagaaagcctgcctgggccgggcagcgtggtggctcacgcttgtaatcccagcattttggntggccaaggtgggtggatcacaaagtcagtagttcgataccaacctagcccacatggcaannnnnnnnnnnnnnnnnnnnnnnnnnnnnnnnnnnnnnnnnnnnnnnnnnnnnnnnnnnnnnnnnnnnnnnnnnnnnnnnnnnnnnnnnnnnnnnnnnnnnnnnnnnnnnnnnnnnnnnnnnnnnnnnnnccatgcca

SEQ ID NO: 89 - DNA, 773 bp, Macaca Fascicularis
  misc_feature (1)...(773): n = A,T,C or G
agtatgtggtgcgagccgtgcacgtgttcaannnnngaaactgaggctcccctcaccaggacagtcacnnncaaacatttcaatgcacagaagggactggaaagctactgttcaaaggctgaagctatttttaaacattattttcactactaagtggggacagaaagatccatcctgagttgtggaaacattggtccatgccgtgagcctgtctgcctgtggacacgtgagcttcccgggctcagctgggctttatcacacatcccgtgaacactcattgaagtcagcctgtttgtgccatgtgggcatcagccactgttgtcttgggaggacacttaccctgttctcttatttctccttcatcctatttttaacttaaactgctcagatgtttgaaacttctgtcctctttggatgagatcagtgtccacaannnnnnnnnnnnnnnnnnnnnnnnnagtggctcctctgaatgttcactttattagtcatgtnnnnnnnnnnnnnnnnnnnnnnnnnnnnnnnnnnnnnnnnnnnnnnnnnnnnnnnngcatttaaacataattgggaacaactgacattctctagtcgactgccagggccttagactccacatgtccatttttgttcaggtatagctttttatagcaagggctgcatctagcttcttttattagaagtgtgtgctaaattccttatcaatgtgtaatcagtttacactgttttgtatagtgaaggtgtattttcagtgctacccgctagctgattttaac

SEQ ID NO: 90 - DNA, 743 bp, Macaca Fascicularis
  misc_feature (1)...(743): n = A,T,C or G
tagaaataagtagtaaattttgatatattacacatatacacgtgtgtgtgtgtgtgtgtgtgcgtttgtgtgtgtttgtgtgtgtgtttgtgtgcctctggtcaactctaaggatgacagacactgtgtaacaacacctgggtcaactcttttaatttatatacaaagcaaagaacaacattaatggagatatacaatgattattcaaacaagctatacatatgtacaaaggcaaatagacacataacaaaacagtctctgcagactgattgtatatagtaagaaaagatcaaaagactttaaaacctaaaggacttttgacatacaaactcnnnnnnnnnnnngtttgttttaagtggtttcaaaaatacaaattatagccaatcaaaacattgctttggttggtccatttaagtatccaattcaaaaagcatnnnnnnnnnnnnnnntactaggcagtttccaaagtagcatggtagtattacttgttaaaagggttctgttttcagtaacagtactgaatggaaagggtctgcagattccaaattggaataaggtctatcatattctgaaacaagaattaaaatgacttgagaatgggcaaataataaagcaaaccaattaattatatggtcattctgaccccagctcttatacaaattatacatatattttgtgtatgtttgtgagagttgtatgtatgtgaactgtgtgcatgtgtattcacatacaagtatatactg

SEQ ID NO: 91 - DNA, 218 bp, Macaca Fascicularis
acaaataaacacggggtgagaatataactcgcggggtataaatctggaggtgtaataaaatgttcttcacatttcccccccttcttttttttttgcccttgtcttggagagtcagaggttttgcatttctctactattctctctaaaacaagttttactctgtagagaatacatatgtgtaaacataggtgaaatatatgtgttctttatgaaaataa

SEQ ID NO: 92 - DNA, 774 bp, Macaca Fascicularis
  misc_feature (1)...(774): n = A,T,C or G
aatatctgtatacaagtgttgcttcaaagtaccaaggtcagaaattaattgagtacgatttactaaagtcatgtggaataaagccactgaaaagaaacggagagcctgtcgggacttccgggctcagaaccagctggcgcacgccctcacttgtcagttggacttctgccttgtgaaatggaagcagcctttgttcctctcgggctgagcaagttcctgaggctgggagacactaggaaggcttggtaggaggggaagaaagtcagggaaaggtgtcaaatcagaaacatggaagaagaagggaacagatttgagttggtgggtaaaactctaaaaatctaaatctgattcttatgtaagggttgagcgaattagggagattgctagtggaaattggagggaatttgttttgcatcatttgtctaggatctannnnnnnnnnnnnnnnnnnnnnnnnnnnnnnnnnnngccagccttgccttttcttacatgattttgtttacaaaattttactgggacttttaaatctagctatagagttgggaaaaaatnnnnnnnnnnnnnnnnnnnnnnnnnnnntgtttaaaatgaccattacttgttttttaaaaacacatgaccacatatgtatatgtatatctacctaaacattgtnnnnnnnnnnnnnnnnnttattcatgtattactgggagatgctaacaagaacccaacccaaagaaaattctgaaaaatacatttctatttatagaataaatgtttcatttatataaaagc

SEQ ID NO: 93 - DNA, 732 bp, Macaca Fascicularis
  misc_feature (1)...(732): n = A,T,C or G
aagcagtagagtctgagcaggaagncnnnnaaagaatgtaaacaatgtaaacatcactnnnnnnnnnnnnnnnnnnttgaatgctgaaagacaactctaaatgctctacgtgcccttactagcaagatacattaattctattttacacagacaacaaacacactctaattttgattaggcaaaannnnnnnnnnnnnnnnnnnnnnnnnnnnnnnnnnnnnnnnnnnnnnnnnnnnnnnnnnnnnnnnnnnnnnnnnnnnnnnnnnnnnnnnnnnnnnnnnnnnnnccacatttatgatgagtcagtgttgtacatttggctttatgaggatcttctacttctaaatcccaaannnnnnnnnnnnnnncttgattgcccaatgcnnnnnnnnnnnnnnnnnnnnnnnnagaaaannnnnnnnnnnnnnnnnnnnnnnnnnngtaatcaaatcgcccaagaatagtcacattagactcactgggtttaattttatctatatcatcttccatcttgccaggtttccagcacacaatggcattttcacaagactgttagttttatttggattataatcataagattccttaattgcattcatcattctctttgaattgatcctccaaagtttaagagagtgatccataccacaggacattatttttttcacccaaaannnnnnnnnnnnnnnnnnnnnnnnnnnnnnnnnnnnnttctacgcctccaaatattgc

SEQ ID NO: 94 - DNA, 768 bp, Macaca Fascicularis
  misc_feature (1)...(768): n = A,T,C or G
agtggatnnnnnnnnnnnnnnnnnnnnnnnnnnnnnnnnnnnnnnnnnnnnntaagagccatgtgttcatgtgtaacgaagaccagtatttaactgtgggaaccgtgggtggcgtggcgaaggagactgtccgtgactgtgccgctctccgcagccccgtctgctgtcctgtttcctcggctcctcggtgtctggactggcgttctgggtgtcccagcggaaaactaaagggccagagaggtgtaaacacacacaccacttggcaggtgaagatattaaagctagaaattggaaccagaaaatctaaagaattcaaggcatcttaatgtgacagttgaattgatctcatttgattacaaagtttattgcagttattgaatctttttttgagtgcagtnnnnnnnnnnnnnnnnnnnnnnnnnncaatctcnnnnnnnnnnnnnnnnnnnnnnnnnnnnnnnnnnnnnnnnnnnnnnctacaggtgcatgccacgccttgttatttttttatttttttcaatataaacgaggtcttgctatgtcatccagtctggtcttgaactccagtgatcctcccaccttagcctcccaaagnnnnnnnnnnnnnnncgtgagccaccaaacctagccaccaattttactttaggtaaacttttattttcaagcagcttttgttggtgttgcaagtacaaatcatgactgttttataaaatgttctataaatataaccactattctttgtaagccatttaaaattttagtcttcaa

SEQ ID NO: 95 - DNA, 925 bp, Macaca Fascicularis
  misc_feature (1)...(925): n = A,T,C or G
gaatgttacagcgagtgnnnnnnaannnnnnnnnngggtgttgnntcctggccngtccgcgtggctccatgnnnnnnnnnnnnnngccccagccgggcttcttagaggaggtcagttgtcctatgtatcatgnnnnntnnnnntcctactgtgaaatcatgtctgtatttttctggagcagttcacatagagtagaacgtggaatttcccgtgagcgtctccttcctgccccatatctgccgcctgtcacttcaccgccnnnnnnnnntactgttgtgttgttaagatgactannnnnnnnnnnnnnnnnnnnnnnnnnnacttagaaaccaaatgaaagagaggaacttgtcctttacccagnnnnnnnnnnnnnnnnnnnnaaagtataaaaaggcacggaaggttgtcatgggctgttccgtgggnnnnnnnnnnnnnnnnnnnnnnnnnnnnnnnnnnnnnnntgtctaaccagcacagcacaaaggtctcgatggcttttggtaacatctgtcattacagaagaaagtttacacgacgtcaaaaaagtgacgttaatactaagtgtttttccagaaatactggtttcatgtttcttattggctctgcctcctgtgcttattatcatccaaaaacttttttaaaaggtccagaattctattttaacctgatattgagcacctttaagacgttcgtgtgtgtgttgcactaattttaaannnnnnnnnnnntttgctgtgtgaggccagtcgccactgtaaaggtcctagagttgcctgtttgtctctggagatggaattaaaccaaannnaagagcttcctattgaaggcttatattgaccttgtaactatatgttaatcctctacgtgttaaaataaagtataacttttgaaaaaaaaaaaaaaaaaaaaaaaaaaaagg

SEQ ID NO: 96 - DNA, 3033 bp, Macaca Fascicularis
  misc_feature (1)...(3033): n = A,T,C or G
agaaatttggtctctgcctgtgctatagtttagacaaagccattatccctccaaactgtgtggtaatgacagaacacatgctgcttaatgtaaactcacagcccggtgctgggcagacatgattaagctgtcatcttccccaacagcatcagcaggagaaaaataaagaagcaaaatcatcttattcatatttattaggggactttgcagtgggtctgtgccctcatgcaattgacatttttgctcgtgtttatggctgatgagctgtggatcaatttaaattaatcctttgctagcctagaaaaaaaatactgacttttataaggtggcatcacccccatgtctccttcctctctatgtcttagcaaatacacacattcatttattctgaaagtttagcatggttagatattatttgcaaaatttaaaatatcgtaatatgggtcaacctatcggcaaataaagccttcagaaaatttacttgtttagtttttaatttacttgtttaggttttaattctgtgtttgtgtcctttaacccaatatacactaattcctgcatgcacagtcatacacacaaacaaatgtatgtgtgcacacacacctactcatgcatgtcttttgctgtcttcatcatttgtttttctactgcattagtgaaaatcagagctttcttttttttttttttttttttttgnnnnnnnnnnnnnnnnnnnnnnnnnnnnnnnnnnnnnnnnnnnnnnnnnnnnnnnnnnnnnnnnnnnnnnnnnnnnnnnnnnnnnnnnnnnnnnnnnnnnnnnnnnnnnnnnnnnnnnnnnnnnnnnnnnnnnnnnnnnnnnnnnnnnnnnnnnnnnnnnnnnnnnnnnnnnnnnnnnnnnnnnnnnnnnnnnnnnnnnnnnnnnnnnnctgacctcgtgatccgcccgtctcggcctcccaaagtgctgggattacaggcttgagccacctcgcccggccgaaaatcagagctttcaatgaggaaactcatgatcttgggtataatgaatgtgctctgactctctttttatttggaattgaagaaaaaaatctgtacctatgcattaattcttaggtataatccttgaataaaacgcttttccaacatgtacatgtgatggtgtgcaaaagtcagaaaggagaatacatgattgaaattataaaatgacagtggggttcctatcagttccaagaaaagcagaagtgcatttgtttatacaattttaaaggaacaagaagagggcttattctatgcccattgctttgattcaaagccgctacttcaactcccctgactcaatttggagtatagtaagactgacagagaaagagattaaagatctgtaaccttcctgcaaacaaccccaggctgccctgcccacctaatagacagcatctaagacaggggaagaacacattctcctagttcattcaattctgagctttcctatcttggactgtcaaggagatgccagcttctgccaaagtgcctgctctccaggagatgctgagattagaaactggccagaaaggctttacttgtttttgtcattgagcaatcagtgtcaggatgtcaggaacttacctcattggatgtagaggtgacatcttgatacattagcttgccaaggagttggcaggaccatgacagcttctggctgttggcatcctggattcatttacctcccaaactgttaatgcagcaaattaaccttgtctgatgaacttctgctacattttcaagggtcattggatatagacagagataataagcaaagtatttctaatactttttacatcctctctcactcatcatctcttaacttgcttgttgcctaacctcttctactagacctttctatgaaaaaaaaaaattgtctaatctctgatagaataatactgaatttgggtatatttctagtatctatgataggcagagcttttttttataaggttaatcatgatggaccatctccatgaggatattgatgagctagttggtaccaaaaccagatatgtaaaatctagacagggaaaggttacttttacttgtgcttctaaatgaaggtttttgtctatgtcacaggtgctctggagccactgcagattcccatgttccaatcacagcagagcaacctgtctgtaatttcatatttcaaagtgctaagaagaaaaaaatagagacccgggactttcatgtctttgcctccattttaactactgagataaaggcatgcatttatatcaccaccttttttcctgtctttgccaaatactgaaaaacaaattgtattttcatagaataaattaaaacctggaggagatttaatagtctatctaatatactttacctacaggaaacggaagtacagagtggtggttatgaattcaaaggtatgttcacagaaaataacattgattcccgtccctgggccaggaacactgctccctgtgtctgccttttgtatgtcactgggctctcacaacaactttatgagacaggtaatgatgagcttcattacttacagcctcagagaggcagactcaagaagttataaagagtatgtaagggctttggaaacagcttcccttttcaaattgtgacagtgtctcttactggttgtgcaactttggacaaggcataaattctcaaccctttaatttcttcagttatagaataccaataataataatgcctttctcatctgttagtggcttacatgagttaaaacgccaatctatgagtataatgcccagcacagtgcttctccaatgtagtctccagtccttcagcatctgcatcgctgagaacttcctagaaattcaaattcttgggttacaactcagacatattgaatcagaaattctgggggtgaacttcattaatatatgtgttaataagatctccaggttatttggatgcttgtttacatcttagaaccactggagtagaacacagaaatactttaaaaagtgctgaatttgaaaaaagtgctccttaaaaaaaaaaaaaaaa

SEQ ID NO: 97 - DNA, 386 bp, Macaca Fascicularis
gatttgttttccttcccctccccccccacccatttgttggcttttttgttttttaatgtcagatgtgttgagttgggtttttttgttgttgttggtttttttttgtttttttttttaactgagaaaggaagggccaagggatgaggtgggcaccagaccctgggggtgccacagactgagactcccccacctggcgcccagccctgaccagctggccgctcctgcccatgcttttttttttttttaattttataattggagcccttggtgaggttacgcgtgccatgagaacccactctacaccacgacgctggtgcctcagtgttggccaaactctggagtcactgactggtttgactttcatacggtgaatatgcatttggtct

SEQ ID NO: 98 - DNA, 702 bp, Macaca Fascicularis
  misc_feature (1)...(702): n = A,T,C or G
acagcactgatcannnnnnnatatcccannnnnagcgaacggtaagaaggccnctcttaagaaggggagacagatggcccnnaactanncaatgacagaggcagttactgtgagagacttctaggaatctttttcttctcatagcaaagtcaaagctctctctgaatgtactgtgtgatgatgcatcatnnnnnnnnnnnnnnnnnnngatatcattggtgaagtgatttcgaaaagtattcaaaatttgatatgctgtttagtcactacagtgccctcaaagggcagaagttgcagccttttttatattgcctgccaaaatttgaagtattnnnannnnnnnnnnnnnnngagaaaaacgtaaggagttttgaaaagtaatgcaaataacaaaanngcaacactatttttaaaagataaatatctaagttaaaattaccgaatctttattttacaccttctaaaaaaatatgagaacaaggtacatgcattatgtgtcacattattgggcaaactgttcaagtatttttttttaaacctccttgtatagaaaaaaatcattaaggatgtaaaagccatgcttgcctatttgctgtatacatgtaatgaaattgtagataantgtgtagtgcattgaaacaaatgaacaaaannntagatacttttactatacaagggtgctggtgcagaaaaaaatatata

SEQ ID NO: 99 - DNA, 717 bp, Macaca Fascicularis
  misc_feature (1)...(717): n = A,T,C or G
gtcaggtgccactggccgggatccagttcccattgtgtatgtgtgtgttttttttttttaactgcactcacagggtgctctgnnnnnnnnnnnnnnnnnnnnnnnnnnnnnnnnnnnnnnnnnnnnnnnnnnnnnnnnnnnnnnnnnnnnnnnnnnnnnnnnnnnnnnnnnacagtgggcagaaataactgcctgaaggttactcaggaagaagcactggatgggagactgaaatggacaatcttggannnnnnnnnnnnnnnnnncaccttacacattcaataataannnnnnnnnacctacactttgcctttacactgccccccctcnnnnnnnnnnnnnnnnnnnnnnnnnnnnnnnnnnnnnnnnnnnnnnnnnnnnnnnnnnnnnnnnnnnnnnnnnnnnnnnntacactgaaagctcctgggtctggctgttctctgtgaaacgctgtagtctctccctttccagaattcagtttcagggcacagaacccaggcttgtaccatggtggtgggagaaaatgaccactggccaagaggaannnnnnnnnnnnnnncagactagtactcatgactacaaattcttactgcttttctaatcaactctgagggaagagggcatctgatcattacaaaagggagggcttataagtgatctcccaagaaggctgtgatctgctagtgcctttggctctgtacctctgctgggcatctc

SEQ ID NO: 100 - DNA, 1358 bp, Macaca Fascicularis
acaatgcgttctcctttcttcctctccactaatctgtacttccaagaggtgttgagtttcggccaaactttctgctcggctcgcatcaaaggctgccctcttgtgaatagccagctctcacctaatgatctccctgctcactcctgaccaggatgcaggtcattccccagaataattagctcacaggcagagtttccaggcgcttccaggagcatcaatcaccgggatgaatgggaagcccgtgtgtgggaactgcagggggagctgggtgcatagccaccccagccttgtcaccctgcggctgtccttgccatgcttccttggacccccatctacccccagttttgggtgacaggacgagttgggccagttaccaggatcttgtcgcctggttctgatggtgtcttggttcccggctggggttttgtgttgaccacgaccgttgcctgctgtcggggagctgcgtgtgtttcacaacaaacagggagccagggagaccaccctgcggggctgccccttccctcagagctttctgcttgggtcgctggcgtcttgcggtgccttcattcgtctgtggtgtgaggtgctagtccaggcttacgcgctaacagtgaatgagaaggagaatacgctctgcgagtgcagcggaaggaggaagccccgagccacggaaattcggtaaggatcggataatggcaatgaaatcacagctctaaatcttttcatggagttgaagacagacattttactgtgggagccatctcatctttatctgcctgagtcgaagctggtaaagaggccaagaattcccaagctttcccaggcaagtggggaagaacactgggatgccttttcctcctcctctgtccatctgcaggccaagtgtgcatcggtcacaggcaaactctgaatcgagctttgtgcaagtctctggaaagagacccaagatcgtgtgaggagcaaaagtgacagtgctggtggcagcgacatctgcagagccagccccatccctgactgcagcagaatacgtatgggaatcctttgtgcgaacaatccacccagggtagaatggggcttttgacatcagctgagacccaggctgccttacaatgagaggcctgttggtcaaaggaaggactatttaatgaactgagaatctgaggccagctctggccatctgcacttagaatcattagagcaactctactgtaactggcaacattgaataatgcaacaaattcatatttcaaaattgtgaactttaaaattttgtgcttgtgtctatgatgaaaagcattatataaacatttgatactaccattttattagtaaaaaaaaaaaaaaaaaaaaaaaaaaaa

SEQ ID NO: 101 - DNA, 1973 bp, Macaca Fascicularis
gaaaggacagagacacccagcggcaactcttcaggaaataacacgaatgaagttaaagcagcaactgtcctcaccactgtgtcccaacaagaagcagggctgttgaactccagcacgctaggaccccagtctcctgatcaatcagatgagtggatctttcctgaaaatgctgatcacgtttcatatctggcatccagcagacagtctctacttctggatgatgactcctgccacccgtcacacctgtggctggaagccagcaaggagagtgaacatgaccagcaggcagaagaatcccagagtgttccaaaggacattttcactttttcatcaagaccacgatcagcacctcatggaaagactcagactatgtccccagaggaggtctcatttattttggatctaaaagaggataacagtgtgacaagcagagacacccaatcagaggatgacttttacggcggcggcagcagtgaagagggtgaccacagtatccagggttctcgaggcccaacaactggtccttcggagttaactcagttaacatcagagagcctgctgggggaggctgcaaagcggacaagtaaggaatatctaaagagcgcctacacagaagcaggagcaacagaaagccaggattcctcggcagagcaaatagatagaaacaactttcaaatgagtttgttgcctacaacatgcttttctccaactggaagaaggtgtggatcctgtcagaaaactccagaccctgtaatcaaagcgaaggacctaccagcccagcaagtgccagcttcactaaacaaaacctccctgaaagaaatctcaggggaaaggctgagctcgatccccgaagcatctgaatatgactggcgaaactatcagccgagccagatgagtgaatccgagttacagatgctggcgagcctacggcggcaacaaaatgaagaactggaggatgctgggacttcccatggcctgagtgcctcccaggtggacaactgtaatgtcagcataagtaccagcagtgacgacacaaccacctggaactcctgcctgccacccgtgagtccctggctttgcagcttcctctcattggttaagaaggagcaagcttcattgcttaacaaggagcaagcttttttctaacaaatcccagctttgcctggaaaagccaggaccaaaatgagaacactccctatgagaaataatcagagtccattctgaaatagtgttttagaatgggggacggaagttagaagatgacagtcttttcttaaattgttttatttaccttcagaaaagctttgtatgatgatatatcaaaccacacattgaaagaacaaaaagaacaattttactgtagacactgggtgtcccattgtatcccctgttcctagtacaagccctgtggcacatacaagaggctcaatatttgttaaatatatatgtatgaaatgaatgaacacagaggaaaagactgtagttatacaagtactgcttggatatgaagacagaaaagaatcttctgtagaagtcaccagatgttcactgactcttccctgtggatgatgggctatgataggcactgtggatgcttcagaagcttatattcccatgtgtttccatagttaaagcacttcagtatggcccattgccctcactatggcccagcagaggttggaataggtcttagtcttcctgtttttcaggtgaagaaactgaagcgtgggtccaagcttccacacctggtcagtggcagagcccagagcagagcccagttttttaactcagtccgttctctacaatactgttctcagggaccttacaacttaattggaaagacagagcataaacatcagtggaacagttcagtacagcacaagaaatgtcataaagcagaataataaaatcattggtataataatgataaaaaaaaaaaaaaaaaaaaaaaaaaaaaaaaaaaaaaaaaaaaa

SEQ ID NO: 102 - DNA, 712 bp, Macaca Fascicularis
  misc_feature (1)...(712): n = A,T,C or G
tcctggtctgtgctttacttgccttttttccttcnnnncttagcctcaccccctnnnnnnnnnnnnnnnnnnnnnatagcttgatgcaggtacccagtgaagtttctccataaaagattgggagtcgttgaaatgtttagattcttttaggaaaggagttattttccccccttttacagggtagtgacttctccacagaagtgccaatatggcaaaattacacgagaaaannnnnnnnnnatgattccattacatacggaacattgaactgttataggagtgctcttccaaacaaaacaaaaatatctctaggtttagtcaaagctttcgtaagtaataacctttctgtattgagatcagagtaaccctttctgtattgagtgcagtgtttttacttttttctcatgcacatgttaatgttggagaaaatgtttacaaaaatggttttgttacactaatgcgcaccacttatttatggtttattttaagtgatttttttaatgggttatttaggttttcgtcttagttgtagcacacttaccctaattttgccaattattaatttgctaaatagtaatacaaatgacaaactgcattaaatttactaattataaaagctgcaaagcagactggtggcaagtacacaacccttttttttgcagtgctaacttgtctactgtgtattatgaaaattacctgttgtccccccaac

SEQ ID NO: 103 - DNA, 540 bp, Macaca Fascicularis
  misc_feature (1)...(540): n = A,T,C or G
cagcannnnncaaaaggtgtgtcaggactgagttaatcagtaagttaatagaaacaactgcaatagattagggacgagattnctcaaagcagtttgatataatatgcggcaactccgtatgtactggagcatatccaatacattctcaaaactcctaaattaggtaanntgcaagacaaagagcagtagaaaaatccagctcttaggataggcaaaactttggcagannnnnnnnnnnnnnnnnnnnnnnnnnnnnntcggtttgaatttataaggttaatgatataatnnnnnnnnnnnnnnnnnttcccctggcaattgttaattccccttaaataaaaatatgttgatacattttaaaaaagaagcattttacgggtgaaacctttggnnnnnnnntttaaaatctgagtttttaaaatgggaaaacaagaagtgggcaacaataagnnnnnnnnnnngttgttttctagaagatgaagtagtaagttacaaaagnnnnnnnnnnnnnnnnnnnnnnnnnnnnnnnagggggaagag

SEQ ID NO: 104 - DNA, 261 bp, Macaca Fascicularis
ttctcaaacagctgaagcaatatattgtatattgccatatcctctggtgaaagggttaaattacttcacctcttgcacttttacatgcaaatcagtttttcatttctgtaatagaaaattattcacgtatttttacatcatttgtttttcctgaccactatttaagaccaaaaggatattctgaaaaatggcctacaatttttttataaatagcatcccaagcagcgtgcctaaacattacattgcatatggaaataaaag

SEQ ID NO: 105 - DNA, 1824 bp, Macaca Fascicularis
  misc_feature (1)...(1824): n = A,T,C or G
ctcaggtgatccacctgccttggcctcccgaagtgctgggattacaggcatgagccaccgtgctgggtctggtgtatatcatatatttttaacaaaaggtataaaccttgttgagtaactgtagtctttggtatgattgctggttacgaacaccaaatcccctgtctgatcttaatgggttacctaacattttgcaagtctaatcactgttttttctcctccaacttttccccaactggacccccacacagactgctgttgaagataatctgtatattcatgaactgcccatttggaaaaccagtacatcatagccccttatcccatctctaattttaaaacaaccccttaagggattctcattgaacatactttgaaagcatctagcttaaggagtttttctttatttcaatagattaaagaacaaaaaattgtggtggatgaactttctaaccttaagaagaatagggtgagttattataggaattctgaataacaaatatgtgggaggtttatttatgttaactatatattaaagttataagaattatatatgagatttaatcatactttaataaaatgtatagtatttcagcatctttttaaattgcaagtgtctattttttaaatggatagatctcatagttgaagatgtcttttttctatcatacgctattcacattgcatttgcaacaaatgatactagttgtattttggtatcttggagctgtaatcactgatgatgtttattttataccctgaatttggtgttttcttttgatacaaacaaactttatattgagatgagaagaaacttttctttcaaatgaatgtggataattattgaacaaaatacattgcttcccctccctccaaaaaatttttacatagatttttataaatgtgtaacatggttatttaatgccatttccattaatataaataagcaagctactgctttgtgtatagtttcagtgtcaaattacattttaacattcaggaacaaatgagtttgagctcttaaaagtattttaaagattatgtaataactggttagatatttctgatgttgtcacttatggaatattagaagttgaagcacataaaaaaattagctgggtgcctnnnnnnnnnnnnnnnnnnnnnnnnnnnnnnnnnnnnnnnnnnnnnnnnnnnnnnnnnnnnnnnnnnnnnnnnnnnnnnnnnnnnnnnnnnnnnnnnnnnnnnnnnnnnnnnnnnnnnnnnnnnncaaaaaaaaaaaaaaaaaagttgaggcagaattaatacagactttctctagagggcaaattgagggcaaatctcaacaactcaaactataacactttgacccagcagttccatttatagtagttgatacttaggagagaatcatgggagttcacgaagatttagttacaaagatattcatcacaacgttgatttacaatagcaaagagttggtagcactttaaatgtttagtatttgaagcgagcaaataaactgtaatatattatacctgtatagcagtaggtataatttggtcgccgtagcttgctttgccatttttgtgttcttgtaaaataacacttactgataagaaaaagtgttctccnnnnnnnnnnnnnnnnnnnnnnnnnnnnnnnnnnnnnnnnnnnnnnnnnnnnnnnnnnnnnnnnnnnnnnnnnnnnnnnnnnnnnnnnnnnnnnnnnnnnnnnnnnnnnnnnnnnnnnnnnnnnnnnnnnnnnnnnnnnnnnnnnnnnnnnnnnnnnnnnnnnnnnnnnnnnnnnnnnnnnncaaaaaaaaaaaaaaaaaaaaaaaaaaaa

SEQ ID NO: 106 - DNA, 592 bp, Macaca Fascicularis
  misc_feature (1)...(592): n = A,T,C or G
cttgcggacgcgctgtgagcctggagagcttcgaagagccgtggggcggggttgattagcacgtggagctcgggctgccgccccaagggacttgctnnnnnnnnnnnnnnnnnnnggcgaatctggcgggaggggcgcgtggaggaaaaggagggagacgttgaaccgtcgactcgcaccccagcagagaagtgagcgggcttagagagcccgggcaaagcnnnnnnnnnnnnnnnnnnnnnnnnnnnnnncctttggacctttctacaaggcctctagagttnnnnnnnnnnnnnnnnnnnnnnnnnaacttccaaggcccggagcagctgcctccaaggaaaaggctgctgactcccgggcgtggttctaaggccgtgggatgggcgtttaacatattttagcccttgcagcttgctgaagacccctagggaaagaacaaaggtcctgccaccgtgcaccaacggaaggtgccacgggctgtgggtggacgcgtgggacctttacatcccaacctatttctcagagaaaacccagtcgcggctgggtcaggccacccttttnnnnnnnnnnnnnnnnnnnnnatatttgc

SEQ ID NO: 107 - DNA, 758 bp, Macaca Fascicularis
  misc_feature (1)...(758): n = A,T,C or G
gccatggacgcaggtgggtgtgggggaggaggggtctcannnnntaannnntctatttccctgtttccagtgctttccagctgggtttctgacccagagggtggaaccagcctgggctcctcttcccaacttcctccaggtcatttcccagtgtgagcacaacgccaaccttagcgtttctccagccagacagatgcctcggcatgaagggcctgggggcttgtgggtcattccttcctccctgcaggagcttcccaagcggtcacagagtctcctgggcacaggttatacagacctcggccccattcccatctactgagacagggtctccacaagaggggccagggaatatgggtttttaacaagtgtcttactgatacgcttctctatcaggcagccggagagctggctgggagtccttttgttttagaacacacatccttcagcagctgagaaacgaacacgtatccatcccaaccaagaagccattaacattcatctaaaaatgttaggctctaaatggatgaaaaattctcttaccaccttaataacaaaacaaactacaaattcctgacctaaggacgctgtgttctaagcggcgtgggctccnnnnnnnnnnnnnnnnnnnnnnnnccctggcctcgcactcctctgcatgcagcacagaagggcgtgaccatnnnnnnnnnnnnnnnnnnnnnnnnnnnnnnnnnnnnnnnnnnactgggtacctggagattctgaagtgcctttgctgt

SEQ ID NO: 108 - DNA, 483 bp, Macaca Fascicularis
  misc_feature (1)...(483): n = A,T,C or G
gccgccgccgcgcnnnnnncgcnnnnnnncgccagcgccgcctctcgctcgccgagctacagccgaaggagaagggtggtaagtaaggaggtcttagttccatgggttgtacaaagcagactgcccgcaaatcgaccggcggtaaagcacccaggaagcaacaggatacaaaagccgctatcaagagtgcgccctttatccgaggggagaagaaacctcatcgttacaggcaaggtagaggggcaatccgtgaaattagacgttatcagaagtccaatgaagttttgattggctaaacttcccttccagtcgtatggtgcgaaatattgatcatgactttaaaacagatctgcgcttccannngcgcacatattggtgtnnnnnnnnnnnnnnnnnnggcctatctggttgcgcctttttgaagacaccagactcgtgtgctatccatgccaaatgtgtaacaattatccaaaagacatccac

SEQ ID NO: 109 - DNA, 736 bp, Macaca Fascicularis
  misc_feature (1)...(736): n = A,T,C or G
cgctccatgcacgagtnnnngcgaaagacatcgnnnnnnnnnnnnnnnnnnnnnnnnntaccggtgggcgctcgcctgcggtggggcgcatggccggggcctgggagggggcnnnnnnnntctgcgcttgacccccgccgactcttgcagggggttcgnnnnnnnnnnnnnnnnnnnngcctcccagtgaggcaannnnnnnnnnnnnnnnnnnnnnnnnnnnnnnctgcacgcccgatacgctgagtgcggtttgcggatcctggccttcccatgtaaccagttcgggaagcaggaaccagggagtaacgaagagatcaannnnnnnnncgcgggctacaatgtcaaattcgnnnnnnnnnnnnnnnnnnnngtgaacggggacgatgcccacccgctgtggaagtggatgaagatccagcccaagggcaagggcatcctgggaaatgccatcaagtggaacttcaccaagttcctcattgacaagaacggctgcgtggtgaagcggtacggacccatggaggaacccctggtgatagagaaggacctgccccactatttctagctccacaagtgtgtggccccgcccgagccccctgcccacgccctcggagccttccactggnnnnnnnnnnnnnnnnnnnnnnnnnnnnnnnnnngtgaggcagacnnnnnnnnnnnnnnnnnnncccgccggaggaaggtcccgtggcccgctgggcttggcttggcgccc

SEQ ID NO: 110 - DNA, 600 bp, Macaca Fascicularis
aggacctggagctccggctgcgtctgcccgcggtgctacccgccatgcgcctgcctcgccgggccgcgctggggctcttgtcgcttctgctgctgctgctgcccgcgccggaggccgccaagaagccgacgccctgccagcggtgccgggggctggtggacaagtttaaccaggggttggtggacaccgcaaagaagaactttggcggcgggaacacggcttgggaggaaaagacgctgtccaagtatgagtccagcgagattcgcctgctggagattctggaggggctgtgcgagagcagcgacttctaatgcaaccagatgctggatgcacaggatgaacacctggaggcctggtggctgcagctgaaaagctagtatcctgacttattcgagtggttttgtgtgaagacgctgatactgtgctgctctccaggaacctatggtcctgactgtctcgcgtgccagggtgggtcccagatgccctgacacgggaatggccactgcagcggataccgcagcagacagggtgacgggtcctgcctgtgccacgtggtgtaccagggcccactgtgacatgactgcatggacggctacttca

SEQ ID NO: 111 - DNA, 725 bp, Macaca Fascicularis
  misc_feature (1)...(725): n = A,T,C or G
gccatccccacnnnncgccacacaacggggcaggaagggtcctgccggtaggaccctgcccggcccagtgccactgccctccgaggctgctagacgtaggcgttaggcatgtcccacccacccgccgcctcccacggcacctcggggacaccagagccgccgacttggagactcctggtctgtgaagagccggcgatgcctgcaggaaccgggctgggcctcgtgcgcccgtggggtctgcgcttggtctttctgcgcttggatttgcatatttattgcattgctggtagagaccccaggcctgtccaccctgcaaagactcctcaggcagtgtgtgggtcccgcacactgccctcatttccccgatgtcccctgcgggcacgggtggccacccaggcctgctggctgcggccccctcttggccaggccttggctcagcccgctgcgtgggaggtcgtgtgggccagtccccgaggagctgggtccctgcacaggcacacagtgcctggccacacccatgatgcagggctggcctccaaccctgcggaccgcgccgggcaccaactccgtgtttggtgtttgtctgtgtttgtttttcaagaaatgattcaaattgctgctcgggttttgaaatttactgtaactgtcagtgttcacgtccggaccccgtttcatttttacaccaatttggtaaaaaatgctgctctcagcctcccacaataacc

SEQ ID NO: 112 - DNA, 713 bp, Macaca Fascicularis
  misc_feature (1)...(713): n = A,T,C or G
gatgcaatttgagaaattgtttacttcacaatgtagtcattcataaaaaaattcatgagaatactgaatatatgtttgaggatttttctnnnnnnnnnnnnnnnnnnnnnnnnnnnnnnnnnnnnnnnnnnnnnnnnnnnnnnnnnnnnnnnnnnnnnnnnnnnnnnnnnnnnnnnnnnnnnnnnnnnnnnnnnnnnnnnnnnnnnnnnnnnnnnnnnnnnnnnnnnnnnnnnnnnnnnnnnnnnnnnnnnnnnnnnnnnnnnnnnnnnnnnnnnnnnnnnnnnnnnnnnnnnnnnnnnnnnnnnnnnnnnnnnctgacctcaagtgatccacctgtgtcggccttccaaagtgctaggataacaggtgtgagccactgtgcccagccgaagatttttcttaattgcaataaatattcagcattttttctaatgaaaatgaattttgtttacgagtagaagtatgcattttaaaagactttcagatttatgctttttatgtgaagctgctaaactaaaagtaaatggaagaaaccaagtctagtaggttttttctttttttggtgggggtgggatgggggaggttagctacacttaaaatatcttctccagagactgtatgctcctatactagactgtaagctctttgagggcagtctgtcagatttatctttgtatcttccccagggccctagcatagtccccntgcacata

SEQ ID NO: 113 - DNA, 732 bp, Macaca Fascicularis
  misc_feature (1)...(732): n = A,T,C or G
caattacannnagtctgatttccatcttgtattgcngtaatacttgtcttaaaagcttttatgattgggaatttatctgcctaatcagacttattattgagactgtcaatgggatgcatttttctgttgagctattcagtcatcaaaacannnnnnnnnnnnnnnnnnnnnnnnnnnnnnnnnnnnnnnnnnnnnnnnnnnnnnnnnnntgtacatagaacatttttactattgctgaatgggaatgattaaaaacaaggtattcttcagaccaggtnnnnnnnnnnnnnnnnnnnnnnnnnnnnnnnnnnnnnnnnnnnnnnnnnnnnnnnnnnnnnnnnnnnnnnnnnnnnnnnnnnnnnnnnnnnnnnnnnnnnnnnnnnnnnnnnnnnnnnnnnnnnnnnnnnnnnnnnnnnnnnnnnnnnnnnnnnnnnnnnnnnnnnnnnnnnnnnnnnnnnnnnnnnnnnnnnnnnnnnnnnnnncaggaggttgaggctgcagtgaggtgtgattgtgccactgcattctagcctgagtgacagagtgagaccctgtctcaagaaaaaaaaaaaaaagcatttttctcttacnnnnnnnnnnnnnnnnnnntattactgacatagtcaaaatgattaactgtacaaactgtatttgctgtgtgttcttggtatcatattgtaaaacacagcttttaaaaatatttatattttaaaaacnnntatgtgacattaa

SEQ ID NO: 114 - DNA, 710 bp, Macaca Fascicularis
  misc_feature (1)...(710): n = A,T,C or G
aggatggtagctggaataccttccttcttaaaatctgatcatggcagggatatgcagggcactttttactatttggccttctaagcagattgggaaggaggtattttctggtttctctttcctccaacttaataggacttgccttctccctgggcagggagagaggctgggttggtgctctccccttactctactcacactgacttagaacctctggctgctgtttgggcatccaagaaagggaggggaaggaatgagctaaaaacaaaacagaatgaggtgggaaagggagatttccttctctacagaggaaaataggaaaccctccaagaattgtgcaagtaaagacattcgtcaaatgcactgagtcccttggtgtagtagcaataaggaaannnnnnnnnnnnnnnntgtgcacacagtccagcctaattggtgtgtgatgttgcacttagcagccatgtggtgggcatgtgtgactactctgggtttcactttagtttctaaactttttatccctctcaagtccagcatggatggggaaatgtctctggatccccacagctgtgtacttgtttgcatttgtttccctttgagacttgtgtttgtgtcctgctttgagctgtaccttgtccagtccatcgtgaaactatcccagcagctgtaatgtacagttccttctgaagcaagcaacagcagcagcagcagca

SEQ ID NO: 115 - DNA, 1978 bp, Macaca Fascicularis
caaaaactcatcagcaggggtatgctgcctgctatgcagaaacggccgtgcatcggactttccagataaaaacatttagtacagagttgaaaaaccatgtgatggtcatggattttgtgaagagtaactggtttccctcccagagaagagccaaagtttgtatcatccatatgtgtcaaggcttgaagatggctgagcagacagccagcagatatgagatccacagtcgactcttctcatcccccaaagatcattctgcctgggaaagaaatgaaagtctttcgaatgcaggattacgggacaactaccacagtacaagcgatcaaattgcccttaaaaatctccagtctgatgtcacagaggcgaaatctgacttcaccaaggagaccctggcatcacaaaacacaaaaatgatttcatccttagtcatctcccagatgattgatgagaataagctgagagaaaacaggacctccttgcccctgccttgtacgattggtcaggctcgtgcgcatcacaccaagcaatctctggctaatcgcagcggagtcaacattcacagggcatttgcgttacttccgggcagattaggaatcccagcaccgtcagatgagcgaggacctgagacagagctgccacccaaagagagccactgtgggggtccccgcagagggtttgcatctatcaccatcacggccagacgcgtgggccccccagccagcgccctgctgtgggggactgttggggactctctgtgccccaagtgcagggctgaggacacactgttccaggcgctcccagctctggccaatggcgcccatccaggtcggcatcagaaatcttttgcctgcacagagttctccggaaacagctccgtggtgcggctgaaggttcccgaggcccacacagggttgtgtgagagacgcaagtactgggtcacccatgtggatgacaaagggaccagtttttctccagacaccccactgtcaggaaagagcccgctggtgttcagttcctgtgtccacctcagggtgtctcagcagtgtccaaattcaatctattatgtagacaagtctctctccgtccccattgagccacctcaaattgccggccccaaaatgcacagatccgtcctgtcgctcaacctcagttgtagttcccacagattgacagcagatggagtagatggcctagtgaacagggagccaataagcggagccctgaagcaggagcccgtggagggagaccaggacctcgtaggccagcgctggaacccaggtttacaagaaagtcacttgaaggaaaccccatcgttggggcgggtgcatttggggaccggcgcatgtccttggagtggttcttttccattggaaaacacagaattggcaaatgtgggagctaaccaggtcaccgtaagaaaaggggaaaaggatcatgcaactcattgtcatgccagcggtcatgccaaccaactgtccattcacattcctggctggagttacagggcaggagattacacgtgctgtgacttggttgtaaaaataaaggaatgtaagaagagtgaggacgccaccacgcctgagcccgccacagcagcaccctcgccagcaccccctgagacagcagggagccctggcctgtccgaagactgttctgagcctcagcaaatgcctacaagatccttgaccttgcaagaagcactggaagttcgtaagcctcagttcatttctcgctcacaagaacggctgaaaaagctcgaacacatggtccagcagaggaaagcccagcggaaggaggacctgaggcagaagcagagcatccttcccatccgcaccagcaagaagcagttcacggttccccatcctctgagtgataacttgttcaaacccaaagaacggtgcatttcagagaaggagatgcatatgcgatctaagagaatctataataacttgccggaagttaaaaaaaaaaaaaaaaa

SEQ ID NO: 116 - DNA, 508 bp, Macaca Fascicularis
  misc_feature (1)...(508): n = A,T,C or G
ttccctgggagcttcaggaagttcagccttggccttcaggcctgagcaagtgcagggcggagctaccagcccaggctcagatgttggggtgtgaaagcctcaagtgactcagcctggttggagaactgccccacccagtatcttctgtgccatggttcccacattcccactcagtggcctcctatcctggaccccatgcctgcaaggaaaccccaggatcacggatacctctgtgattcatgctgagcccaagtccccacactggaaaactgggaaatggccagccatgtgtgtcccaggaaattcctccccttgttcttccttgaagtgcccaagcatgtaggtcaggaaggaaggctgaagcactgtccctaagaggaatttctccttcagggaagcctcagttttgcccgtttatctaattgaatcagttttctacccaatcccccgattttgtaggataatcttccttatctaaagtaactgattatggacnnnntcacatcac

SEQ ID NO: 117 - DNA, 779 bp, Macaca Fascicularis
  misc_feature (1)...(779): n = A,T,C or G
catagttgcnnnnnnnnccagggctacagcgggtgcttacattgnntcccagacggtgaagaaggtgatagagatcaacccatacctgctaggcaccatggctgggnnnnnnnnnnnnnnnnnnnnnnnnnnnnnnnnnnnnnnnnnncaatgtcgaatcnnnnnnnnnnnaaatannnnnnnnnnnnnnnnnnnnnnnnnnnnnnnnnnnnnnnnnnnnnnnnnnnnnnnnnnnnnnnnnnnnnnnnnnnnnnnnnnnnnnnnnnnnnnnnnnnnngannnnnnnnnnnnnnnnnnnnnnnnnntggacagtgaagggaaccgnnnnnnnnnnnnnnncttctctgtaggttctggctctgtgtatgcgtatggggtcatgnnnnnnnnnnnnnnnnnnnnnnnnnnnnnnnnnnnnnnnnnnnnnntggcccgtcgagccatctaccaagccaccnnnnnnnnnncctactcaggaggtgcagtcaacctctaccacgtgcgggaggatggctggatcagannnnnnnnnnnnnnnnnnnnnnnnnnnnnnnnnnnnnacagtggctctacnnnnnnnnnnnnnnnggatgcagctgcttgtgtttcttgaggnnnnnnnnattggtaatatggatacagtgacccatcccccatcctatttatagtggaagggccttcaattgtatcaatactttaagttctggcacattgacctctannnnnnnnnnnnnnnnnnnnnnnnnnnncagaggtgactatttgttttactttctttg

SEQ ID NO: 118 - DNA, 736 bp, Macaca Fascicularis
  misc_feature (1)...(736): n = A,T,C or G
gacttgtggagatcacccaatcagattgagatagnnnnnnnnnnnnnnnnnnnnnnnnnnnttnnnnnnnnnnnnnnnnnnnnnnnnnnngcaaagaagaaagccgacctttatgatgaacaagatgaacaggatatattgctggtgcaagatttggaagacatgtgggagcagacatttctacagttcaaactnnnnnnnnnnnnnnnnnnnnnnnnnnnnnnnnnnnnnnnnnnnnnnnnnnnnnnnnnnnnnnnnnnnnnnnnnnnnnnnnnnnnnnnnnnnnnnnntggnnnnnnnnnnnnnnnnnnactgcccnnnnnnnnnnnnnnnnnnnnnnnnnnncttcgaggaacagctgaacgaaccctggcaaccctctcagaaaacaacannnnnnnnnnnnnnnnnnnnnnnnnnnnnnnnnggcactacaaattcaagttcccccaggcagtgcagacagagagtaacctcggggccaaggtgtnnnnnnnnnnnnnnnnnnnnnnnnnnnnnnncttttcccaggccgggaataagggccatcatgtgtgggtcactaaggacgagcttggtgactatttgaaaccaaaatacctggcccaagttaggaggtttctttcggacctctgatgggctgagcnnnnnnnnnnnggtgctcagacaagtctgggattagagcctcaagaacattgtgtgattgcctcacatttgcaggtaatatcaagcagca

SEQ ID NO: 119 - DNA, 589 bp, Macaca Fascicularis
  misc_feature (1)...(589): n = A,T,C or G
ctgacactctnccaactgatttttaaattatgtttgcttggagatgaaaattacataagggactttatgcctgcattctagtgcaaaacatctgaagagctgtacacccacaagggtgactatttcccctgagtggccgtgttgtcccagtgccctggatcagtgtctcctgagtggatgacaggtcttcattctctatcttgaatgtattatggttactaatagttttataatggaggtctaagaattgaagttttgtgggagtttcaggacaaaggaaggctaaaagtttgtcaagaagttgcgcatattttggttacctatgagaagggttgtgaccgcgtacagtggcagctgttggccgcgctgcagaaatgagctggagctcatgcgttttcagctacatttttcatcactttatagtacgtccatcttgagtaaattaagccacaatttggtacctagggtctcaaaaactgaaatttatttttataaatgaattttaaaagaaaaaatatctacttcttttaaagttagaagaaaattaacctgccgacaggcaacatttttgggtgctttctgcactagt

SEQ ID NO: 120 - DNA, 2051 bp, Macaca Fascicularis
attctcagccaggtgcagcgctaggcgcggcagctccgagaaagccacgggaggggggagccacgactggagacgcaagaggagagaagggaagtagagaaggcaaaggtggagaagggaagaaggaggagcttcttgccctagccaaaaaattacctggccgcttaatccccgggactccgatacttgggccccagcccctggtgcctgaagccccccggccgatcgccctctcctcccccaccctttctgaccccactcgctcccccggggctgcctgggtgctgggactggcatgatcagctgaactttgtggggtcagcgcttctctctggcttccccccagcggtgccaaggcgaggggagcgcagaaccccggctcaggacggacaggcagacggccaaccgagcccaggctcgtctgcagaaccctttgcactccctacccccacccacctagccgccgggaccatgtccaaaccttcagaccacatcaagcggcccatgaacgccttcatggtatggtcccggggccagcggcgcaagatggcccaggaaaaccccaagatgcacaactcggagatcagcaaacgcctaggcgccgaatggaagcttctgtccgaggcagagaagcggccatacatcgatgaggccaagcggctacgtgcccagcacatgaaggagcaccctgactacaagtaccgaccgcggcgcaagcccaagaacctgctcaagaaggacaggtatgtcttccccctgccctacctgggcgacacggacccgctcaaggcggccggcctgcccgtgggggcctccgacggcctcctgagcgcgcccgagaaagcccgggccttcttgccgccggcctcggcgccctactccctgctggaccccgcgcagtttagctcgagtgccatccagaagatgggcgaagtgccccacacgttggccaccggcgctctgccctacgcgtccaccctgggctaccagaacggcgccttcggcagcctcagctgccccagccagcacacgcacacgcacccgtcccccaccaaccctggctacgtggtgccctgtaactgtaccgcctggtctgcctctaccctgcagccccccgtcgcctacatcctcttcccaggcatgaccaagactggcatagacccttattcgtcagcccatgctaccgccatgtaacccccagcccggcccggacctgaggggtggtctgaaagccgggtctgcaccctgtcctctgagcctagccctgccctgcagacgcctccggggtcagccctgccgctgtcccttacaccacccagacttttcctctctcttccagggggaagggaggggcgtcctcccggacccgaggcgcagacaggtgccggaaacttgcaaacgttatgacagctgcacagctgcccctatcccgactctcccaaaacaaatctccgactgtaccccctttggacaaaaaagtaggcagttttgctttatttatgtccccttcactctcctcggataggctttggactctgaactcccagattctgatattatatctagaatatgcacatattttttccttttgtcccctgaagaaaagagttagctgtgtctctatgttttgccatcagacacaactaggagccatttgctcttcatgtatgggggggaaaggcttcaaagttttaaactacagaaagggaaacatttctatttaaaactatgctatgatagtgtttgcttctttaaagggaaaacaaaaaggacctaatggttatttactttgtgtaaagcagtgcttctagagacctaagtttacttttagacagaatgtcgggttatgaagtcaggaagtagaaggtgaacgaaaaattaaaagaacaaaaacatcctaaatggtcacaaatgttttgacgatgtcttggaaatgtacctagaaggattttacctcgttactctgttcatttcctgaacaaagacgttttgaataaagacaatctgtcattgtaaaaaaaaaaaaaaaaaaaaaaaaaaaaaaaaaaaaa

SEQ ID NO: 121 - DNA, 728 bp, Macaca Fascicularis
  misc_feature (1)...(728): n = A,T,C or G
agttgagtgtacccctagcgcctgggcccccacatggtgatgtgannnnnnnnnnnnnnnggtgggacccagtggcagggtaccgggcctggcccgtgtatggccaggaagtagcacaggctgagtgcaggcccaccctgcttggcccagggggcttcctgaggggagacagagcaacctctggaccccagcctcaaatccaggaccctgccaggcacaggcannnnnnnnnnnnnnnnnnnnnnnnnnnnnnnnnnnnnnnnnnnnnncccaggagcccatttggagggcctgtggctggctccctccctctcaggaaatgctgaccccatgggcggaagactgtggagactgctcctgggccnnnnnnnnnnnnnnnnnnnnnnnnnntcaccatttccccagggcacgtggttgagtggggggaacgcccacttccctgggttagcctgccagctcttcctagctggagaggagccctactccctgcccccaagcccgctctgcgtgggactcccgcctccaacccctctcccagtcccagcagtcagccaaacacacagaaggggactgccacctcccctcgccagctgctgagccgcagagaagtcacggttcctacacaggacaggggttcctnnnnnnnnnnnnnnnnnnnnnnnnnnnnnnnnnnnnnnnnnnttggatctgtgttttaatgagtttcacggtgtgattttgattcttaa

SEQ ID NO: 122 - DNA, 752 bp, Macaca Fascicularis
  misc_feature (1)...(752): n = A,T,C or G
gacaggaggagtctagctggacaggttggggccagtcagggaggtgtccccaaaacgtgttaaactgcaatcaggacacagtccatttctaggactgggaacacacctgcattcagatgtcagtgatgagttaacatcccgaagccaaatagaaaggatgtggggattggctactgttcctggtgattcacatctgtaaataagagttgaactgattcacacgtgtgactgaaagtagttctttaaaaattacttaaaatagtgaactacaaagaggcacaaagaataacaacacccatgtagcnnnnnnnnnnnnnnngatagaaaatattctcacaactaaactaaatgtatggttcttgcttggattctttctggggtaaaataaagccatcaaggtcgctcttgggaccattgggagatatttgattttgtaacatatctagataataatattatatcagcnnnnnnnnnnnnnnnnnnnnnnnnnnnnnnnnnnnnnnnnnnnnnnnnnnnnnnnnnnnnnnnnnnnnnnnnnnnnnnnnnnnnnnnnnnnnnnnnnnnnnnnnnnnnnnnnnnnnnnnnnnnnnnnnnnnnnnnnnnnnnntacacttgtaatcccagcaactcgggaggttgaggcaggagaatcgcttgaacccaggaggtggaggttgcagtgaacccagatcgcgccactgtactccagcctgggcaacaagagcaaaactccatctcaaaaaaataaaaat

SEQ ID NO: 123 - DNA, 339 bp, Macaca Fascicularis
atagtctaggcgtgtaatagttataccatctagggttccgtaagtacactctgtgctgtttgcacggggacgaagtcacctaacaacacatttcagagaatgtatccctatcattgggcaacacgtgactgtattaatctcgtaaggagaatgcttaggtgttctaagtctaactcatgtgagagatgaaatatgttttgcatttttctcaggttatatgcttttccgctttagaggtttgaattaccagcatttttgtgatcaaaatcctatttagaaaaaataaaactactttttatctctttaaaaaaaaaaaacaagaaaaaaaaaaaaaagggg

SEQ ID NO: 124 - DNA, 708 bp, Macaca Fascicularis
  misc_feature (1)...(708): n = A,T,C or G
tgatgtgcgggtgtcggacaacgtggacgccatccttgcnnnnnnnnnnnnnnnnnnnnntgactcctgtaccacctcggagcataaagtgggccggctcatgcctagcgccttccctccctctggagcaggattccccagtgaacaaactgctctacgcccnnnnnnnnnnnnnnnnnnnnnnnnnnnnggaannnnnnnnnnnnnnnnnnnnnnngagctctcnnnnnnnnnnnnnnnnnnnnnnnnnnnnnnnnnnnnnnnnnnncgggagctacacttctgctccccactgtctggaggctctgcaagaactctacaaccannnnnnnnnnnnnnnnnnnnnnnnnnnnnnnnnnnnnnnnnaggaccctgtgggccnnnnnnnnnnnnnnnnnnnnnnnnnnnnnnnnnnnnnnnnnnnnnnnnnnnnnnnnnnnnnnnnnnnnnnnnnnnnnnnnnnnacagcagcaagccggatccaccaccaccgcagtgccttatgaccccggannnnnnnnnnnnnnnnnggggagctggcagagcctggggnnnnnnnnnnnnnnnnnnnnnnnnnnnnnnnncagtgggctccctgcctgccacctcccctgccagcccacccactttccccccacctgggattatttctaatttataaggacccccccttcttccccctctccccactatatttatttgcctgct

SEQ ID NO: 125 - DNA, 660 bp, Macaca Fascicularis
tcccatgttcaatacagcattattacaacagccaagatatgaaaactgaagtgctatcaatgaatacgtttctttaaaagtgataagtatgtgatagatatctatatctacctacacacacacacacacacatgaataccatttaatatttagcctttaattagcaggaaatgttgtcatttttgtcagcgtggataggcctagagaacatcatagtaagtgaaataagccaggcatggacagacaaataccacatgatctcacctatgtgtggaatctgaaaaactttaattcatagaagtagagagttgaatgtggtttccagaggctgggaggttgggagaggaggggagagagagaaaagggaaaaggtcttagccaaagggtacaagtttcagttaggtagaaggggaataagttaagatgatctattatacaatttggtacctatggttaataatattgtattgcatatttcaaaatagctaagagaatggactgtaaatattctcaccacaaagaaacaataagtatttgtggtgacaatctttggtagcactgatttgatcattccacactgtatacacgtattgaaacatcacattataatccataaatacataaaattattacttgtcaattaaaaataaactttaagag

SEQ ID NO: 126 - DNA, 578 bp, Macaca Fascicularis
  misc_feature (1)...(578): n = A,T,C or G
ccccaacccccacccaaccctctcctcccattcctcctgtagcatctttgctgggctacgcagaagcccnnnnnnnnnnnnnnnnnnnnnnnnnnnacaccccttcccacactgttccctgcactatacacaggccggagcagaggaaaccccagagtgggtgcccattcagcccaggtcccaggatccctgcatccgtttatgtgacctggggccccagccttgctgtgctgctcaccccagcagagggacctccctcatccagccacttccctttggccatagaaagaaacggtgagcatgaggctaggcacagcctgagggcgtgggcagcttccctccctccctgggccttggaatcccccaaggctggttttcttcctggagacccccatgggcaacttggcaggagagatggtgccgtaggtggtcatggatggttgacaccaagagaggccttccacccatggtgggcaaatgtccaggcctgggctgccagcccagggctgtttctgggtgctccctggccccagggtggtatctgggtaccatggctatgtgtgtccatgtctgtgagc

SEQ ID NO: 127 - DNA, 1270 bp, Macaca Fascicularis
  misc_feature (1)...(1270): n = A,T,C or G
atatacaaactcctctctgcattgatatctatgcaccccacaactgaaccacacaccacagttttgttaatacttgatttggttgttaggccattgcttggatgatgtactgcatttttcaaagtgtgtaacaatgatcactttgcttggaatcacctatgatcatgttaaaaatggagacttccagccccccaccccccgaccagacctactgaatcagaatcttcagagagtgagtcttggagctttcttttaaataagaattgttacccgcacagaagtctgagaatgggtgaatctgggactccacttcggtaatacaatccaaagtgtttacggggactatgaacttgctccttctctgcattatttattcatttgtttaaccagtaactagttgttgtgctctttctatgtgttacatactagttcagaataagagggcacagtattgagcaaaacacatgtggtgcctgcccataccagggcacttacatcctaatgtatcctactgtttcagaagattactctgaagagtttgagcagctgccacaagagtgataaccaagcttcaggcagacagcttattaaacatcactcatattcagtagatctggggtagattaggaacctacaaaattcacaaactttacacgtagttacaccttgagaaaccctattctacagagttggggtctaaaatacataatttgttgtatatgtttaatcttaaattaacatataatatctatgttttaaattcaaaaatgagcagatattttatatttgctcaacagttttccttccaattgttcaagccactactttttatgagttgtaattataagtatgtatatttatatattaactcatgtatttagcaactgttgagcacctactgtgtgtctggctccctgatggacaccagggaagcaaagattgaaaagatccatcaggaggcnnnnnnnnnnnnnnnnnnnnnnnnnnnnnnnnnnnnnnnnnnnnnnnnnnnnnnnnnnnnnnnnnnnnnnnnnnnnnnnnnnnnnnnnnnnnnnnnnnnnnnnnnnnnnnnnnnnnnnnnnnnnnnnnnnnnnnnnnnnnnnnnnnnnnnnnnnnnnnnnncagctacttgggaggctgaggcagagaattgcttgaacctgggtggcagaggttgcagtgagccaagatcacaccactgcactacagcctgggtaacagagagagactcacatctcaaaaaaaaaaaaaaaaaaaaaaaaaaaaaaaa

SEQ ID NO: 128 - DNA, 556 bp, Macaca Fascicularis
  misc_feature (1)...(556): n = A,T,C or G
ccccccccttatccccctctgaagacgatgggcagaggagtnnnnnnnnnnnnnnnnnnnnnnnnnnnnnnnnnnnnnnnnnnnnnnnnnnnnnnaggggggtggggggtggggggttagggcagggaggggactggggaagtgcgcacacagcccacacagacaacacgcacccacacagacacagagggaaggggttgggatggggacagggtgcacagcagggcggggtaggaccccagcccctcccaaaacagcctctcctcccttagaccccctttctcctccccttccccacggtaggaacatagnnnnnnnnnnnnnnnnnnnnnnnnnnttctgaattttgttgtccggccctcagtgccctgccctctcccttcccaggaccacagctctgttccttcggcctgtggtcctctctggtcccctcctgggtttcttacgtagttgatttttcctctttagtctcccccgacctgcgcccagccccgtggcccctgcccctctccnnnnnnnnnnnnnnnnnnnnnntgctaagacggaattgctcata

SEQ ID NO: 129 - DNA, 723 bp, Macaca Fascicularis
  misc_feature (1)...(723): n = A,T,C or G
ttacatagcagatattatcacatgagaaaaagcaaagtacannnngatatatttaaagctgctatttctgatttgannnnnnnnnnnnnngatgtgacaaaagtgctcttgctagctggctaaaaacaaaatctttatttcacagctaaaatgtaaatagctaagatgtaatcggaggactaaatttcacagccacaaaaacacagctgtgaaacataactttagagtttaataaaggcaaatagttttgcacactaataatggatattagaaataaagatgagaatgattttgttagaattttttagtgtttacataccttcactaatgttgcctgtttaattgagaatattctcaagttacctgccataaatgtgtttattggatgcttactnnnnnnnnnnnnnnnngaattagtgatgcaaaaatgaatgtgatactatatttttaaaaagtttttaaaattacataatatgttctgatttttgagttaattctttttatatttatagaactagtgcatgtgaatttgaaaaaaatactagaaaatacagaaaaaggttaaaaagtcaaatatacattattaaaaaatcacannnnnnnnnnnnattttatgttatattttaagttttcattgacctaattctaagtatnnnnnnnnnnnnnnnnntggtgcacttttaaaaacactgtggccacnnnnnnnngctggacagtgtcaag

SEQ ID NO: 130 - DNA, 702 bp, Macaca Fascicularis
  misc_feature (1)...(702): n = A,T,C or G
gcccagaggtnnnnnnnnnnnnnnnnnnnacgtgnnnnnttcgctctnntnctggactgggagaagggaggcttgggtttttgttttgtatttttgttttgttttgttttttagannnnagggtcggacttgantttgtactgggggctgtggtggcnnnnnnnnnngtttttcaagagttggttttgcgtttccaacctcgnnnnnnnnnnnnnnnnnnnnnnnnnnnnnnnnnnnnnnnnnnnntgtaagcggtcatcgttgcgtcatggggcaggcgtggggagcttcctgtcgccttgcgtgggtgtggggcctgggaggagggtctggggcgtgcacccgccctggggagtggggaggnnnnnnnnnnnnnnnnnntcatccnnnnnnnnnnnnnnnnnnnnnnnnnnnnnnnnnnnnnnnnnnnnnnnnnnnggggctgatctagtttcacattcaagtttttctnnnnnnnnnnnnnnnnnnnnnntaggttcccaggtttcagcgtgcccctccctcagacacggacacannnnnnnnnnnnnnnnnnnnnnnnnnnnnngagaatgttggaggggtgggggnnnnnnnnnnnagnnnnnnnnnnnnnnngagaccagtnnnnnnnnnnnnnnnnncaatctggggaggnnnnnnnnnnnnnnnnnnnnntcctgagggtctgttttgtttacc

SEQ ID NO: 131 - DNA, 557 bp, Macaca Fascicularis
cggtagagaacggctacttgcaccaggactgctgcgcctccgcccactgcccctgctgtggccagggcgctccgggaccgggcctgtcgtccgccgccggctgcaagcgcaagtattaccctggccaggaggaggaggaagacgacgaggaggacgcgggcgagctggggcccgagccccccgggggcgccccgttcgccccctgtaagcgcgtccgcttcgaggacttctgcccggactcgtccccggacgcgtccaacatctcaaacttgatctccatctttggctccggcttctcggggctcgtgagccgacagccggactcctcggagcagccgccgccgctcaacgggcagctgtgcgccaagcaggcgctcgccagcctcggcgcctggactcgagccattgtcgccttctagggacccccgagggcacagggacccggggccccgcggggctggggccagacaaagactcggccaaggggcgagaggggggaacgagcgggcgccgggccactcggggctgagctgagggcgagcaggggcaggggcagg

SEQ ID NO: 132 - DNA, 2027 bp, Macaca Fascicularis
  misc_feature (1)...(2027): n = A,T,C or G
aacaaaggctgaatggagctcacagccaaggcaacctggaagggtgtcccggctggccgctcccagcttggctgaagtgaactctaaagttgtgttttgtgcctcagtttcctcgtttgggtccacagagatgtgcaacccaatgaagggtggcggccaaggtgcccccagggcccaagcctcctctccagctgtgcctccctcctggcgcctttcaggctcaaagccggaagctcatcggatcttgttgcttggggttttccagagtgtggtctccagacccctctccgggagggcagcatttcccagaaagttcccacctggatcctatcactgctggtctccctgaggactcccgtcctggggcctctccaggggtcccacctgtccacctcattgccataaccgtggagttatcacaggcctcctcacgaataacaaaagatactcccgtcactcagaaccttcctggggtcagggatccccatcccacacactccaacaaaaccaagtgtgtttcataaaataccacaaacgaagaagaaaagaggggtgaattcctgggggcaaggggcatcagctgggcctgggggcagacgcctgtagtcgcagcgactcaggaagctgaggcaggagaatcgcttgaacctgggaggcggaggttgcagtgaaccgagattgcgcccctgcagtccagactgggctacagagcaagactgcgtctcaaaacaaacaaacaaacaaaaaaatagtgccaaaggagcaaactaaaactctctctggaggaagataaagtaaccctaggcctcaagtaatttccaagaatacttctgtaaacacagtagccagcacacaatttaaaacaatcaggcacccaaagagaaaagatcacactcataaaagccagcaagaaacagcagacaataggagagacgcgtggggccgcagctcgtggagttctcagacaggcttgtgaaggtggcccgcgcttgcccaccacgctcaacaacacacgggaatcagtcactcaaaaccaaagtccctggaaatccacatgattttgagtccttacgggaatcaacaacaggacctgactcacaggacaggcagctgcaacctttgttccctgtttgcagatcagccttttcttgaccaacattgttttgtaaaatgtagaaaactgaaggcgcccgggaagacccttcctcttccctcctgatctttgttagaattaactcgcctttcttccctgactgactgagacctcatgaccaccacatagtgtaaggctgtatgctcaatatgctcttctaaatggaaaacagaaaacaaacaaggtataactaatcaaattgctatcactcacgagccagccttgtatgaaaaatgttgtaacccttttaaagttctctgttttctgcatatataagggagatcttaacttttcggctttttctttggagtctgtgttatcctgatggctattttcagcttcacacttgaatatactcttttaaactggattctgatccttttgatgtttgagagttgacagacatagaaactaaggttgagaattttggcagagaatcagaaaccattaaaattttaaaataaaaggcctgaaaaagaaataatggaaaaaatccaatgaatgcatttaatggtagattagacataaagagagtttgtgaactggaagatagaccatctgaaaacatccaaaataaacctaaaagataaactacaggccgggcgtggtggctcacgcctgtaatcccagcactttgggaggccgagatgggcggatcacgaggtcagnnnnnnnnnnnnnnnnnnnnnnnnnnnnnnnnnnnnnnnnnnnnnnnnnnnnnnnnnnnnnnnnnnnnnnnnnnnnnnnnnnnnnnnnnnnnnnnnnnnnnnnnnnnnnnnnnnnnnnnnnnnnnnnnnnnnnnnnnnnnnnnnnnnnnnnnnnnnnnnnnnnnnnnnnnnnnnnnnnnnnnnnnnnnnnnnnnnnnnnnnnnnnn

SEQ ID NO: 133 - DNA, 760 bp, Macaca Fascicularis
  misc_feature (1)...(760): n = A,T,C or G
caccgggctgcatgcngncgccgacannnantgcgagaactgcaagaccacactcgggtggaaatatgagcatgcgtttgagagcagtcagaaatataaggaaggaaaattcatcattgagcttgctcacatgatcaaagacaatggctgggagtaaagtgcgaactttcccttctccttcgaatgctgttttgtgaaagaaactgaatgtaatggaaacgtaggagcagccggtggcagcctttcttgccctctgacctcaaaggctagctgcgcatagctcttgacactctcggccatctctgtgggtaaggtgtcccctccgatctgtcctcttcatgtacnnnnnnnnnnnnnnnnnnnnnnnnnnagctttttctaacttctcaagttctagagaattaaccaactgatgacttacccgcctagttaataccttcctttcacctttgtcttcaatacagttgggctctgcttttttaaggttcagttgaaaaccaaactgaggccnnnnnnnnnnnnnnnnnnnnnnnnnnnnnnnnnnnnnnnnnnnnnnnnnnnnnnnnnnnnnnnnnnnnnnnnnnnnnnnnnnnnnnnnnnnnnnnnnnnnnnnnnnnnnnnnnnnnnnnnnnnnnnnnnnnnnnnnnnnnnnnnnnnnnnnnnnnnnnnnnnnnnnnnnnnnnnnnnnnnnnnnnnnnnnnnnnnnnnnnnnnnnnaggcggaggttgcagtgagctgggatggcaccatcgcactccag

SEQ ID NO: 134 - DNA, 792 bp, Macaca Fascicularis
agctagctactggaattagactctagtctcccaaccactgattctgctactccacactgtgctgcttccattggttacatggacattgacaattcattgtgaaagcattaattagaagtcaagacaaaagaaatgtttgtgatatcttctcttacttaacatactttggtttcaccatttcattttagcattttaaagtatagtgtgtcagtatagaatgaagaacaaagctctttaagagtaatgatgaaaccaaaaggtaaaaaagtagaagaatagcaaatgtaagttattaaataaatgagcaagaagtatgtgtcagggaaaataaatgcttcttatattgttaataccatgattccctgcccgctcaccccctcactcacacacttgatgcatttgtcttagaaaatgccattttgagatactggtattgaagacttccctctttcccaactctatcagaagttctctttctctttggaagaagccaagggccttacgaatcagactgacctctcttgtgacaggcagcctcgcctgcccttggaaacaagctgccagactgtgagggccacagagacccaagagaagccagcactgctagactgaggaacttgtaaatatcttctgctttcttggtgaacaaggacagaggcaattgtgtgtatattgtgactgtagtttgtgaagaaaatgcaacggtttgctttgacagctcctcagatgtacttgttaagtgtgaatgtgcctgcctcattgccttgtgttccaaacacagtactgaatgcg

SEQ ID NO: 135 - DNA, 3396 bp, Macaca Fascicularis
tttcagaacctttcttttatgtcttgggacccaagtcccatcaacaccaacttggaggggccagagaagctagtcattggcacatgttcattttcctgcgctgagccctggacttcacacctgccattgagtcctatttctgtctctcagcaggactgtgcctagaccatcagttgggtgcagagaaatcaatattgctttcataagtgattgacttgctgtgtgaccactggcaatcattacccgtctctgagctggaatctttttaactctgaaatgaggtgggtggggtggatgagctgggtctgagattcttgctgcttctaaatgcctgtgatttgcatgcatggctgggtctaaacttagttacttcttagtaattctgcagtgaattagtttagcatcactgtgataaagaatcttgatcctaaggtaaattaggcagtgctgggcttgataacattcaaagggaactgggcagactctggaaccaacatcccgcagacctcaggctcatttggcagctggagtgcctggcgacggtgggatcgggagaccgagatgcagggaggttgtcagggcaggtttcagcaacagggaagtcagccagatggacggcagtgccggggaaagttggggtaggctaaaatcttggcaggtggggacagcttggcacagaggcacccaggagaaggtcagcctggcaggcagcggttgcaggaaggccaggcagctgtgaaacagcacctgccatagggactgaagtttcctagtctgtggaaaggtcacagtaaacgcgaggaaatgagtgctgagcagcaaacggagacaggggctcccatgggaggatgagcataagctgctgcaggcccacagtgtccacagcgtattgggcctgcaggcccccctatccccactatcccagcctctcatgaggcaagagcatctttaggtgtgcggacctcacactccaaggcaaacattctgagggtgaggcccaggcaccttccctttcctgggtgtctgctggcctggggtcctgctgggtggggcagggcgggtcctccccggcatgctgggtcaggtctgcaggggcagtggacattctcctccctggcctcccctgcacccagcacttcaacagggacagggaagtgtcctgctcggagccagaagctccctgcactctcctgagcccctcctaggtaaatacaggtcctcacagcaggattaactgatgcaggaagatcatatacttttccttcttaattaaagctttatgaagaaataaaccccaagcagaattcggaagggagcagtgttatttcttagaggcaggaagccagggctttctctttgtagaaggaaaggaaggaggcacatccaggccactgtccgtggtgccctccactccctgggtcttacgcggagctcaaatgctggggagcctctccgggggccttcagtgggtggaactcatgtccagccgactgagcggggccttagggaggtgaaaaagcaaacttcttctctctgtggagcccgtggggcacagggaaggggctgcaaaggagcctgtggacctcgtggctgccgtgggggagggttccacagttgcttggaccccggctggtggtgaggacctgggtccctcacaggatgttaacctgtgaccctgtatcggttttgctgagggtcgctttacagcccgactcagagcaccgggaagtttgccttctgccccccccgctccacggaaacgccttttcctcgtggtggagctacgggtgctgcatttagaaggctctgttgacgtcgcatgattgtattcatttcaataaaatggattccttccttaaacaggacaccattttccaaattttggtctagaaaacatggtcaccgtaagtagaactcaaaatgcaggaattttctggcccaagcagggccttggtcctcccaaggtgaggtgggtgcccataggttcgctccctcctgctctgttttcgttcccaaagcgagtcccagacactctacctaggtcctcagcacacggacatccagtggagcttggatctgctggaatttgttttcaactgagcggttactatgagccaagcactggaggcccaaacaggggcaaaatccagtccctgccccgcgggagctcccgtcacgtgtggaagaggactggaaatggagagaccacggaagaggacgggaaacggagagaccacggaagaggacgggaaacggagggaccacggaacaggacgggaaacggagggaccacggaagaggacgggaaacggagggaccacggaacaggacgggaaacggagggaccacggaagaggacgggaaacggagggaccacggaacaggacgggaaacggagagaccacagaagaggacgggaaacggagggaccacggaacaggacgggaaacggagagaccacggaagaggatgggaaacggagggaccacggaagaggacgggaaacggagggaccacggaagaggacgggaaacggagggaccacggaagaggacgggaaacggagggaccacggaagaggacggaaacggagggaccacggaagaggacagaaacggagggaccacgcgatacagcaactttgtgaggagaggcttctgaggacctggaactgagtcttcaaggaggagctatactggagggggcctgggcacaggagtcctatgcagggggaatgacagatgcaagacccaggacccaagggacatgtcatctacgtttaactgttgttcagagagtcagggagtgcatcttccacctctgctcctattttcctagaaaataacattgcagtgaaaaaaaccaacccacaagagtcccctggttccagcccagaggcggctgcccagctgtgagaggcaaagccaagccagaaaatagctggtctgcccgctgcccggtgatggagagcgccccggggaaggttagcgtcattagatcagcagagagtggctccgctcccaggccaggcagcctgctggatccgctctgatgacgggaactgggcactaattaccgtgaagtcaccccgcacgcagccacacagcagctgcagtgtccgtgggatccgtaggcaggttctcctctcctccgttctttaacaatgagagtcttcgcttgcctcttcacgacactttgagttgataaagaacgttcacgaccaccgattgcttattcgctgttggtattatttttctcattcgctggtgaagaaaggaaggttcaagagaggatcaaatttacattgttaggaggtgggggagctgggatttgacattgtttttggaccatatctctttctggtttatctctgtgtctggctggaaaaaaaaaaaa

SEQ ID NO: 136 - DNA, 727 bp, Macaca Fascicularis
  misc_feature (1)...(727): n = A,T,C or G
aagtgatattttactagagtactnnctgcattgtaaaaatgctttgctggtgctcttggcattttgtctttatctcatcacctaatttaaaaactcagcacttgataatataactgacagaaatgattgtnnnnnnnnnnnnnnnaatgaaaatgaagaaaaggaaaatattccttccttcaatggcataagtttattttttacttaagtggcatctatgtaagttagacaaactatatattaaaattggtcaactttgaatgtttctcctgttttgattcttagattatgaggaggatcagacagaatagtaatagactccacagttttaaaatttgataagtcaaaacgttttgacatatttaacattgtgaattattcgattatttttatcctctgtatgtatatggaactctatgccatatttttcaactttgcctatgtgccacaattaagaaaggacacctattttgatcttcatcagcattgccttcagctgaaaatttgggaacagttcacagtaaacctctcagtagtttgcaaactgaggtacctgcagaaaccatagctactcaccaaaatacgcagattaggtacatggtatcatggaaattatttggttaaaaaaaacaaaaacaaaacacacacaaatcttgtgtactgtattttaagtaatatctacaggtgaagctttgatttttgaacagaattccaaataatttactgt

SEQ ID NO: 137 - DNA, 1915 bp, Macaca Fascicularis
  misc_feature (1)...(1915): n = A,T,C or G
tttcattttggggtgatggtttcacagttctaagatgactgaattataggggcaagtgggtgaacttggtgtttgcaaacgacactcacaaacgttgtcacatccccagagccccgttctgctgggtctccttggagatactggtgctgttaatctttgggagccacaggacctttgatgtcctcttaggacttagcctgttgatgggctcagaggcagaggcctgacctactgtgggaagccttgaaggataggagggactcctcagcagtggaggttggtatggggaagagccctgcactggttttgatcagggcactggcagcccagttgcctcccttgcctgctgctctgccccagggttgtcccctctgcaccctggatgggccaggcgtgcccaacccaggttggaactgaggagaggcggccagatgcctggtgtaaggtagggtagcttgttttaggttcaaggtgagaagctgcagctccatcctacggcccagtgctttccctgcctttggaggggtgggggcaagtccagaagctgctccagaccctagtaaatgggggctcaacggaccctctttgcagtgcctggtatccctggagccaggaaggaccaacctgcaatctgcaaaaagacatggggcacatgggtctagacctggcagaggctttcagggaggggaggaggaaggggctgccctagagtcgtggggaggtcccctgctgacctctgggtggggcccagggcagtccttggatcactggcaaggctggactttcaggtccacaactgggaggttggacaggtgtgggtccaggagcccccttgccttgttctccctgcagcctgaccaagactctctgtggcagtcaccctgtaatgcttctgggaacagagggaccaccccatagaccaccaatctctgatcccaccaagcccttcatagtgcaatccattgcattcaaactccagttgacgaactatttgcagggctgatctgctgcactgggtttcaggttcgggttaggatccataaaggtggccgggtgcagtggctcatacctgtaatccctgcactttaggaggctgcagcaggaggatcatatgagcccagaaatttgagaccagcctgggtagtgtggtgagaccccatctctacaaaaaatagaaaatgagccatgcatggtggtgcacacctgtaatcccagctacaggcaggaggatcacttgagcctgggaggtgggctgcggtgagccaagattgcaccactgcactccagcctgggtaacagagtgaaagccctgtattgaaaaatggggaccgggcatgnnnnnnnnnnnnnnnnnnnnnnnnnnnnnnnnnnnnnnnnnnnnnnnnnncatgaggtcaggagatcgagaccacnnnnnnnnnnnnnnnnnnnnnnnnnnnnnnnnnnnnnnnnnnnnnnnnnnnnnnnnnnnnnnnnnnnnnnnnnnnnnnnnnnnnnnnnnnnnnnnnnnnnnnnnnnnnnnnnnnnnnnnnnnnnnnnnnnnnnnnnnnnnnnnnnnnnnnnnnnnnnnnnnnnnnnnnnnnnnngactgtctcaaaaaaaaaagaaaaatggggagaggccgggtggagtggctcatgcctgtaatcccagtactttgggaggccagggtgggtggatcacagggtcaggagttcgggaccggcttggccaggatggtggaacccagtctctactagatatacaaaatttagctaggcatnnnnnnnnnnnnnnnnnnnnnnnnnnnnnnnnnnnnnnnnnnnnnnnnnnnnnnnnnnnnnnnnnnnnnnnnnnnnnnnnnnnnnnnnnnnnnnnnnnnnnnnnnnnnnnnnnnnnnnnnnnnnnnnnnnnnnnncaaaaaaaaaaaaaaaaa

SEQ ID NO: 138 - DNA, 854 bp, Macaca Fascicularis
actcacattgaagatgcaagatgaagaaaggtacatgacattgaatgtacagtcaaagaaaaggacttctacccaaacaactcaacttacatttaaagattattcagtggtgttgcactggtataaaatcttactgggaatatctggaaccctgaatggtattctggctttggctttgatctccctgatcctattggtttctcagggagtattgctaaaatgccaaaaaggaagtcattcaaataccaccgagcatgaagatattggagacctaaaaatgaataacggcacaagaagaaatacaagtaataaggacctttgtgtttcgagatctgcagaccagacagtactatgccaatcagaatggctcaaataccgagggaagtgttattggttctctaatgagatgaaaagttggagtgacagttatgtgtattgtttggaaagaaaatctcatctactaatcatacaggacgaacttgaaatggcttttatacagaaaaacctaagacaatcaaactacgtgtggatggggcttaactttacctccttgaaaatgacatggacttgggtggacggttctccactagatccaaagatattcttcataaagggaccagctaaagaaaacagctgcgctgccattaaggaaagcaaaatttactctgaaacctgcagtagtgttttcaaatggatttgtcagtattagagtttgacaaaattcacagtgaaataatcagtgatcactctatttggccaattagttgctaatattaatctccaggtgtaagattttaaagtgcaattaaatgccaaaatctctcttttccctccatcatcgacactggtctagc

SEQ ID NO: 139 - DNA, 729 bp, Macaca Fascicularis
  misc_feature (1)...(729): n = A,T,C or G
gaggccctgctgggtgctgggagctcatctttaccntgtgcccgagtgagaactgtgattccagccggacaggtcagattggagcagtgctaagagtctgttgcaggagaactagacagggccagggcctgccgcatctggatcatgtttctgcgctctgccccgcgctagggactcagggtctgggctcctgccaggtgaggagcagagagactgttcccttgggtggagaggcgtgggcatgagagccacccactgccaagcaggaagaatgttggtgctttttttcagagaggggaaccccactggtttttatggaaacaatggaaacttacagatgcctgggatgatgaggcacattcagaacaaatgcttttttttctttttttttgagacagagtctctctgtgacgcccaggctgcagtgcagtggtgtgatctcggctcgctgcagcctttgcctcccgggttcaagtgattctcctacctcagcctcctgagtgactgggattacaccaccatgcccagcagatttttatatttttagtagagatggagtttcaccatggccaggctggtctcgacctcctgacctcaggtgatccacctgcctcagcctcccaaggtgctgggattgcaggcgtgagccaccatgcctggccagaacaaatgcctttttaaaccttttaaaaacattttaaaaatgcctttttctatgtcaaatgtaac

SEQ ID NO: 140 - DNA, 736 bp, Macaca Fascicularis
  misc_feature (1)...(736): n = A,T,C or G
cttaattagatgtttataaagaaatgggtttattttccagtataaatctcagaatttaaggaaagaaagtggtgtgtgttactgtagttcnnnnnnnnnnnnnnnnnnnnnnnnnnnnnnnnnnnnnnnnnnnnnttnnnnnnnnnnnnnnnngttttcagggaaagaacataaaagcttnnngaaccacagcctttttaaaagaggggtgggaggatattatagtaagaaatttggctttctaaaaatatgaaacatccttcaactgggctctcttgttaataggacatcatatgatgatagactggtttgactacattgttagctgnnnnnnnnnnnnnnnnnnnnnnnaggtaaatgcttgcatctataattttctagtaatagtcacaaccaatttattaatagtcagggccnnnnnnnnnnnnnnnnnnnnnnnnnnnnnnnnnnnnnnnnnnnnnnnnnnnnnnnnnnnnnntgatgagcatagggttgaccgataaaatgtttagttcccttgctaacttgtgggaancacatgagtccacgacatgctnnnnnnnnnnnnnnnnnnagagtattaagtggagcagaagagaagtgaacacatcttgattcccctttcacttgatggtgtttatgaacatgccgtagtgcctttatggccagttttgagtcctgcctactttgacttttacgttcccattcctgtgttaccaccttcctcnnnnatttg

SEQ ID NO: 141 - DNA, 711 bp, Macaca Fascicularis
ctagaaatagctttggagagttaattttaggtgcaaataacaggataaatgctatctgatcaagcattcattcgacaaatgtttttgaggattcactaagtgcaaggcacaatcgttggggctggtatatgtgtggatatgtttgatttgaaaaccttcatggtgtctctgtgtgttattgattatctgtgtcttttgcctaaaatggcattatttgtaacacaaacctaatatcatgtgtacagatatactgtgtgtagccgagaacactaaattggtaaaatgctttagaaaatatacatctgaatttgaatatctaatgcttcaagtaaatatattagagtttcagatgaatatatatttttgtaactgccaagtaaatgagtagaacagagctttttgcctaaaaatatttttataagtactcatttacatagtattcattattttaaatgacaaaatatcaaattggttctataaataataattgttttgaatatatccattttaacatcatatgaaatccaaaatttaatgataaatttcatctggatgtgttattataaaagtcatcgtttttcctttgtaaaatatccatgtaacatagcttccattactccatattttatgtatggttaaaattatcaaagtacattatgtattttatatcatttatttttgtctgcataaaagattggaatagtaaccatg

SEQ ID NO: 142 - DNA, 1989 bp, Macaca Fascicularis
  misc_feature (1)...(1989): n = A,T,C or G
atgactaacagtgatcccaaatttgaagtgatagagccccctgtacatagaagactgggacgaagaggggttcgcagcagtgtgatggaagaggctactgtattcactcagagggacattgaccaagggcagctggtattccaccaacaggcgtggggatgctgaacgactccttcactttcttgctcagggtagatcatgtacagtcagtgataggtcatctccccttcaccatagtgccacctgacccctcactttcgcaaacatttacaccagatgttcctttatttgtcactggagacaaccttgtaacctcagttctctctcaggagaagcctgtgttttcctcaggactcacggcacagacagaaactttagtgaaactgacccagaccagatggcagaaagcagatccctggggacagcacagtggtgaagagctcagtgtggatggagagtctctgccatcaaggtcatttggccaccagccaccactaatagtcagccgttgggcacccacgcagcccagagaaagcaggtaccctctgatggtcatcgtacccttggctgccatggtcttcctgctgatagtggctgcagtggttttgtctgtctggctgttgagccacaggtagaaaaggcaaaaccccttatcaagccccagaccagcctggaacacacaaccgcaagtcataggccagaaaggagcataacggttcccactgtcacagtgacaccccttctacaaagctccagcagcccgccagtctgtcttttcagggccccgcggtgtgaacaaatgtattctccagtggctgagccagtggacaaatgtgctgcttgggagacgtgaatgaacctggaccccgacatggtcaaactctgccaacaaaccaacccaacgctgaagcacaaccagtactgggtgtagattgagggctcacatttcttactgactacctaccgtgttccaggcactgggataggcattgggatataaagcaaataaatgctgattggatcaactgagaaaagccaggccctgctagtgattcaatgttcaatcctagctccatggttagatgtttgctggcttgttgattgtgacttgtacaacactcatgggctttccacaacgggctctttgtgtcatcttctggacctgattttctcagtatccatcagttggtcaatatttaacccctttactaaggtggtacacaacatgttagctccactgagaatgccagtattaacttggggcatagagttaaaggaggaaagctttgaatactttacactgataattccctctgagtgagtcagcaggaagtgcaagaactatttcagcatgtagaagaagtaatttatcacatcaatgagtatgtttacgtaatgtttttctgtaatgtcttttcctccttggagtctctaggtttgatttcctagtgcaggaaatgcctcagtgctctaggtagtgctgggacagtctggccccttttgaaattatctactgaatacattgtgtttcatcaggaggctttgtctattctaatttataaaatcaagcctagaatagaaatattgtttgaagccttatgggacagaaaagtttgttgaatatttttgtgatgcctcaatttggcttaactttacaatgaattaaaataatggtccaggcccannnnnnnnnnnnnnnnnnnnnnnnnnnnnnnnnnnnnnnnnnnnnnnnnnnnnnnnnnnnnnnnnnnnnnnnnnnnnnnnnnnnnnnnnnnnnnnnnnnnnnnnnnnnnnnntaagcaagcaaacaagcaaacaaaaaaattagccaggcatgggggcatgtgcctgtagtcccagctactctggaagctgaggtggatggatcacttgagcctgggaaatttgggctgaagtgagttgcgatatatgatactgtctcaaaaagaaaataaataaataatgtaggcagggcaaaaaaaaaaaaaa

SEQ ID NO: 143 - DNA, 761 bp, Macaca Fascicularis
tgggggggcgcccgcagaatcatgagggacagtgggctgtttggacagtacctcctcacaccagcccgagagtctctgttcctcatcaatgggagacaaaacacgctgcggtgtgaggtgtcaggtataaagggggggaccacagtggtgtgggtgggtgaggtatgaagggcccagagcagagccctgggccaaggagcaccccctagtcctgacactgcagccccaagcaggtgcgctgtacatttctacagacaaaagcaaaaacctgtactcgctttgtggttcaacactggtctccttgcaagtttctagtataaggtatgcgctgctaccaagattggggttttttcgttaggaagtatgatttatgccttgagctacgatgagaacacatgctgctgtgtaaagggatcatttctgtgccgagctgcacaccgcgtgacctggggacatcatggaaccaagggatcctgctctccaggcggacacctctgtcggttgccttcacatagtcattgtcccttaccgccagacccagccagactccgccctgacggagtggcccagaagcagaggccgagcaggagcaggggcctccctcccgaactgaaagcccatcggtcctcgcgtgggaccacatcttctccctcgcagctgcttcttgcttttctttccatttgacttgctgtaagcctgagggagagccagcaagactcactgcatcttgggggatggggaaatcactcactttatttgga

SEQ ID NO: 144 - DNA, 625 bp, Macaca Fascicularis
  misc_feature (1)...(625): n = A,T,C or G
gcagcagccccgggaccccctacccccagcaaccccactgcttccccttcttggtattaagtgcaattaaagccgtgggtgtcgcatcttctccgatgggccctcccttgcccccaagcccgagaagggggcactgcccggcccggctgtggggagggcggcagggggnnnnnnnnnnnnnnnncaaagagcagcgggccgcgggtccggggagtgcccacagaccccagcccccgcgccccccctccgccgctggtttgtaatggaaccttttctgtgccccatcttcccggagactgtgcttctcctccgtgccgtgcgacccccaccccatgactattgtgcgattcgtgagcgccgcccgagcggagttggtaacttgttgggtttttttccaaccatcatggccttatctgttccagttttctcagtgttttcagcctgtgagatagatgtttatggcaagaaaaagaaaaaaaaaatggaaatctgacctattgtataaaaatcactattttgtgtgctccgcgtgctacagcttttggggcggcctgcccagtccccgtgcccacggggctccctctcccggcggtgaaagtgtccacacgtgtggtagtctagtgtg

SEQ ID NO: 145 - DNA, 780 bp, Macaca Fascicularis
  misc_feature (1)...(780): n = A,T,C or G
gtatagtagaaatactatttagacaaataattatctgtgtacagatatttgatatactctaagtaaattttctaatttcactaagtacgtttttaggctcctctcaaatactgcatattgaagaaaaaaaatctgacaccaccgagccaaagatgcttttttgtctgttttcgttgtttaacagaatggaaagagtaatgcatagtgcttcctggtgtctcctgattgattgattgtacacaaattaggacaataaataaaatggagtctgatgggacattgattaaaggtgaaggatgatatatagatcatgaaaagaaaaatgaatggcaggaaaaaaagtttggtccttaatatactttggcctagttaaaatatgtgcctttttggtgtgttttgttcatcactacaagataaaaaggaaacattacaactcaagtctttaaaaagttcatttattgaaaatcatatgtataacctagcatacgaatgagcagattgaaacacgtaacttcaagccatttctgaaaacatacaccaggagctctgctcatctggagtcagactccagctccaccccggctgcgtgcagggatggcgcacgtgctgaggaggaccagcccctacaggctgaggcggtgtcacccggggaaggtcgtggtgcgttgtggcatattcagtctaaatcagatgaatgtaaatatctctttgtaaatcatttatttcactctgttccatccaggtcagnnnnnnnnnnntggcatgnnnnnaactgaaaaa

SEQ ID NO: 146 - DNA, 734 bp, Macaca Fascicularis
  misc_feature (1)...(734): n = A,T,C or G
acccagggacccgtcccaagtgacccgcgcacaggagcacggaaaacgagtnntgcagtgacgcctcgcctggagactcggagttgtgggaactacagctcccacaaggctgcgcgtaccgcggctcccaagaagtggctggtaccagccccgctctgcagcggtccccgcccctctggcccagccggccgttttccaggcatgggtggccccctgacgttcctggtccggccgtggaatggaagtgaatctgtcgggccatggaatttgccaggcaggaagagcgcgagcacaggagtagaattgggtggtagnnnnnnnnnnnnnnnnnnnnnnnnnnnnnnnagaagactnnnnnnnnnnnnnnnnnnnnnnnnnnnnnnnnnnaggnnnnnnnnnnnnnnnnnnnnnnnnnnnnnttgcgaaatacagcactaggtgctttatatttagtcatttactactcccttctctctttttaaaaaattctcggccgggcgcggtggctcaagcctgtaatcccagcactttgggaggccgagacggnnnnnnnnngaggtcaaggggatcaagtnnnnnnnnnnnnnnnnnnnnnnnnnnnnnnnnnnnnnnnnnnnnnnnnnnnnnnnnnnnnnnnnnnnnnnnnnnnnnnnnnnnnnnnnnnnnnnnnnnnnnnnnnnnnnnnnnnnnnnnnnnnnnnnnnnnnnnnnnnnnnnnnnnnnnnntgnnccggc

SEQ ID NO: 147 - DNA, 752 bp, Macaca Fascicularis
  misc_feature (1)...(752): n = A,T,C or G
atcaagattgtgaagaaaacctacagggactttcgattgcagnnnnnnnnnnnnnnnncactgaacagtaagacttatgatactgtgcacagacgtttaacagtagaggaagccacagccnnnnnnnnnnnnnnnnnnnnacttcagggcattactatgaaagacagtgacgaagaagaagaaggctgatatcacacaactttgcagaaggaaggaagaccttgatcgacattttttgtttgtttgtttgttttgttttaaccttgtccttgtaattacattcattgtttgatttggccaaataaaaatgcttgtatttccttaaaaagtaaacctgaatgtagagtaaaaggggaaatgcnnnnnnnnnnnnnnnttttttgtttttttggannnnnnnnnnnttttttgtgtagtttgacctaaaaatgaaccttggctctgcttgtgattggaacatgatttttttaaaaaagaatatttgagcatttgtctgtaatcacatcaaaatgatgttttctgtgtaaagcaagatacatatttctcataatgcagcattgtgagaagtcacgtcnnnnnnnnnnnnnnnnnnnnnnnnnnncttgttaaaatggtgtgtaccttacaaattataatttatgtgccaggtttgttttgtacttaatttgctattattgtgatgtgtataaaatctttaatcttggttcttagtactttgaattggtctnnnnggtgtannnnnnnnnntgaaa

SEQ ID NO: 148 - DNA, 2335 bp, Macaca Fascicularis
ttttaaatgggacttttttggagtggggggtcctaaggttgtttatgtcaataacaagtgctatcctcaactctgactctggttactttgcttggccttggatttgagtaaatgttagtcagtttctgaaattatttcccatgccatttgcaaaccacagaccatgaagagagggtttagtaaatttcagtactctcaagagtatttcattttggttcatgatttccatgatgtaagtctggagacccctcattttatttcctttcttgatcccaattgctaggcactcaggaggaccaagaaagctcctagacagagctcagtggattgtattctataactgtttttaaaggccaccccactgccaacctcaccaagtcaggggttaaattataaatctattaacaatgctttgggttcatttagctttgtgaatgcataccctatccagagtgaaacaggacatttctatttacatagtaccctcacttagagcctggcttcttccataagacccagatctttgagatagctgtcagacctgcaggggctttctgtactcatttctgttactgctcacctctgagagctacaagagaacagctggggatgtgttgaagtttcaaataattcttgatcccttactacctaaggtcttactgtggagcatactcataccctgtacaactgggaaaaaaataaaatcccaaagcaaaacacttgaaaatagacttaacttatattaatagtattatttttgcttaattttgttttcttaaaaagacaaattggatctttatgttcgttttactctaccccctaatctccccatacagctacatgaagaaattggaaaaatggaaaatacgtaaagcttttatgacacagcagagaaagctgatttgtaacaacctaaagccaagggagtgccacctttctctggagctagtccagctgctttagaaccagagccttcatattgtttatggaaatggaagaaacagaaccaggagatgggtggggagcaggaaaattattctgccctgtgcccctaacaaaaaagcgtgaagtacctataatatcaactctagcttctagatccattatgaagtaacttatatttggaggggaatactcataattattattttcaatggaaaagcacatttactgggaaggggcctgatggctagtggtgggcaaaggtttggggagatggcctgcatgacaggtactctgaatagcagagcttccaactcatcacctcctggtgcagtacctagttagagggaagttggaagcctccctctagcagtgctggaaggaatgttcctgggtttgtcattatcttgccagctggggacacagagtatcttctgtgtcattgtctacttatctgttcactggctttgatgaccctcatcacctgccccctaatattgtgataattccttaatctttctgttcctaaactgaaggtaccaacctgcaaggagcctctcttgcatcctcagactgtcttctacagtctagccaacttcacctttggaggaaaggtgatgagtatttaagagtcttcagaacagagtgttttgcctctatcctggaatcctagaatgtcagaggtgggagagatggagcttgttttgtgcaggcctcgcttgatagttcagggagctgaacccagaacagggtcatgagtgactctgaaatgtgtggctatatcaaagttgtagctttgacttagggtagagaattggaacttaacttataagaaggagaaccaaaccatataacaggatttgaaacataatagccaggttgactccaggccttgtacctgagtcagggcctctaaatggattctattggaaaagataacaggaagtacaagtggttcttgaccccttcctcaatgtttctagccttcactctccattgtcttttccgggctgtattacaccccctgtggatcttcagcgctttgctgcctccactgtgatgcagcaatccaactgtaactgacagtggctgccttctttgggccatggatcacacctgtaaggtactaattattgcccagcctggggagatcaggagaggtctgcatcgagttagtaagttgggtttagcttttgtgtgtgcatcagtgacttatagttctgtaataacgtactgtaaatgcatgaagcactgtttttaaacccaagtaaagactgcttgaaacctgttaaaaaaaaaaaaaaaaaaaaaaaaaaaaaaaaaaaaaaaaaaaaaaaaaaaaaaaaaaaaaaaaaaaaaaaaaaaaaaaaaaaaaaaaaaaaaaaaaaaaaaa

SEQ ID NO: 149 - DNA, 3243 bp, Macaca Fascicularis
agagtcagggtccctttcctttcacagtcacctgcctggaagaggggtgggggcgaggagggcgtggcgccccagtgcaccttctgcctgccccctcggccttcttcactaagtcttcgatggccgagcgccccggggtggcggtgagagtggggttgttgggcggcgtctgactcgccggagcagctcagcctgcagctgctagcagtggcgtctcatattagcatcgttgtcaaccggaggcggtgcgagtccgccggggattccagatgggtctcccgcgccgcccgcctgtcatttgcggcctgtattcgcgagtcgctcccgcggcgccgcctcccagcaggcccacgccaacggggggcccgggctggcgccgctgtccctggaatcgattctgcagatctccaggggagcccaccagcctggtcagcatggcctcggaagacattgccaagctggcagagacactggccaagactcaggtggctgggggacagctgagtttcaagggcaagagcctcaaactcaacactgcagaagatgctaaagatgtgattaaagagattgaagactttgacagcttggaggctctgcgtctggaaggcaacacagtgggcgtggaagcagccagggtcatcgccaaggccttagagaagaagtcggagttgaagcgctgccactggagcgacatgttcacaggtaggctgcggactgagatcccaccagccctgatctcactaggggaaggactcatcacagctggggcccagctggtggagctggacttaagtgacaacgcgtttgggcccgacggtgtgcaaggcttcgaggccctgctcaagagctcagcctgcttcaccctgcacgaactcaagctcaacaactgtggcatgggcatcggtggcggcaagatcctggctgcagctctgaccgagtgtcaccggaaatccagtgcccaaggcaagcctctggccctgaaggtcttcgtggctggcagaaaccgtctggagaacgatggcgccactgccttggcagaagcttttagggtcatcgggaccctggaggaagtccacatgccacagaatgggatcaaccaccctggtgtcactgctctggcccaggctttcgccgtcaaccccctgctgcgggtcatcaacctgaacgacaacaccttcaccgagaagggcgccgtggccatggccgagaccttgaagaccttgcggcaggtggaggtgatcaattttggggactgcctggtgcgctccaagggtgccgttgccattgcagatgccatccgtggcggcctgcccaagctaaaggagctgaacttgtcattctgtgaaatcaagagggacgctgccctggctgttgccgaggccatggcagacaaaactgagctggagaagctggacctgaacggcaacaccctgggagaagaaggctgtgaacagcttcaggaggtgctggagggcttcaacatggccaaggtgctggcgtccctcagtgacgacgaggacgaggaggaggaggaaggagaagaagaagaggaagccgaagaagaggaggaggaggaagaggaggaagaggaagaagaagaagaggaggaggaagaggaggagcctcagcagggagggcagggggagaagtcagccacaccctcacagaagattctggaccctaacactggggagccagctcccgtgctgtcctccccacctcctgcagacgtctccaccttcctggcttttccctctccagagaagctgctgcgcctggggcccaagagctccatgttgatagcccagcagactgacacgtctgaccccgagaaggtggtctctgccttcctaaaggtgtcatctgtgttcaaggacgaagctactgtgaggacggcagtgcaggatgcagtagatgccctgatgaagaaggctttcagctcctcgtccttcaactccagcgccttcctcaccaggctcctcgcacacatgggtctactcaagagtgaagataaggtcaaggccattgccaacctgtacggccccctgatggcactgaaccacatggtgcagcaggactatttccccaaggcccttgcacccctgctgctggcattcataaccaagcccaacagcgccttggaatcctgctcctttgcccgccacagtctgctgcagacactgtacaaggtctagactcaaagcctctcccatcccttggcctggaccagtgagctggggagggactcggaggaactgaggcacaacccacgccgttgccttggacaggactctggtcagaggcagggcgggtctgcgtcccgtgtgtcctgtcagtcccctgaatatgtgtgtaggtgtggtacgcgtgcaggtctgtgcctcctgtcgggatttgggtttgaacctctctctgctggcctggctctgctctgttgtggggagttggcccccaggggaaaggactgtgagctgctccgccattaaactcaccttcacctgacggcgctctgctgatctccacctgggccctgatggctgtccccacccacctgccttccagcccggctccctggcggagccagagcccagggagttgcccgcgtgctgtccttcccctctgtgttgtgactgggctgtttcctgccctgcctggggctgcttctcgtcaccaagccctggtcctgcagcagctgtcctccctaccatccatgccactgtgctgagcgctcagcctgaagagcagagaataccatgggtgggactgtgggggtgggatcatggggctgctggcagagggcaaccctgggccccatgccgtgtggccaggcagacaccagattgtccaggagcaggagctgctggaactgcgctggccccggacctagcggaccctctcctggctgctgagatgttgtctgtgactggcctgggggccaagctggagggggtgtgttgacaacccaaagctgttgtccagtctgtggagggaggagcagggtccccagtgtccgagctgtatctggacgctgctcttgaaggacctcctggcgcaggggagcagtggggtctggactgggcagatgctgtacaaccttcctgcgtgcctgtgcctgccccatgctttcccctttgtgttctgtgtgtgtctgggctgtgcccgggggcttcacaaataaagtcatgtgtacagcttcagagactcaaactctgaaaaaaaaaaaaaaaaaaaaaaaaaaaaaaa

SEQ ID NO: 150 - DNA, 719 bp, Macaca Fascicularis
  misc_feature (1)...(719): n = A,T,C or G
agaggcttagatttgatgtgtagtacataattnttcctacagtaatgggaaatagacttccagctaggatttttacacaaaacatctatctgattttctataacagactactgacattaaatgagaggagctatacaggggttcttaggccatggtttgtcattgcacaacaatcacctggagagcctggaaaaacagttttataggcccacctgcagagatgcctgatattgtgcttacttcattcttgcatttaaatatggaggtggctgatggtttgggaaattcactttaagcaaaataattacccaaatcaattagcatatatactttactctttttttataacatgactcatcttaatggagttttaatagtagatattttattggccaaattttagttactctagaagtctgaaattttttaaacaagttttttatatatataaaaacttaaaagttttatatataaaaagttttttataggccnnnnnnnnnnnnnnnnnnnnnnnnnnnnnnnnnnnnnnnnnnnnnnnnnnnnnnnnnnnnnnnnnnnnnnnnnnnnnnnnnnnnnnnnnnnnnnnnnnnnnnnnnnnnnnnnnnnnnnnnnnnnnnnnnnnnnnnnnnnnnnnnnnnnnnnnnnnnnnnnnnnnnnnnnnnnnnnnnnnnnnnnnnnnnnnnnnnnnnnnnnnnnnnnnnnnnnnnnnnnnnnnnntg

SEQ ID NO: 151 - DNA, 3264 bp, Macaca Fascicularis
aactacattccaggaacaggagactagatggaacagctagttaggtttaaaacataggcacggtttgatggtcgcttgctggtggtaaataatcactcgtgtgtcttgtttttatgcaaacttatcgaacctagggtgtggggtgctggggcaggagcgaccctcaggacttcagtgttcccgacccaattctggtttaacattcagtcccttggccacctagtagggccattggatgttcctaatttgactttgaaatggcacctttgtcacgagacacccggtcccttccaagacccaagtgcatccggagacccagggatgggaggttactggtcatagggtggggtttctgggagtgttgttagtggtttttatctcctggctggactttctcttctttttaagaagaggaggggagaggatgggagaggctgtctttaacagctagatctgccaggcagtggactcttcagaccacccacgtgaggacactctttcttctctgaggaatcgtggaattttaaagatgaacaagattcatgcccactgaattattcaatgcatgggtcagagaggggggtgatttgcctgtggtcaccaggcacgttcgtggaggagtcgggacaggaagatgtgtcctctctgtttcagctcactgctctctctcactgctcagctcactgctctctctgccccaactaagcacttccctgaggaggttgccgagaagctgccctggggagaatgtccaggcatcttgaaggtggatgcaagattggcaggctgctcagtcacccgtcctttacactcagtgtggataccatgcattctcctgcagcgtgaaagtgcttctgcccaagccacttccttaaattctcaaaaatcagcatctggggtcctggcaaacaaggaagcttccaagaaaaaaccagaaagaagggcacacttttctttcttccttaggaaatcttattgcacaggaccgacccccagccccacaccttcccaaggcagcctccctgtgcagatagagtgagaaaggtcccagaagggggctcactcacctctaggcccagagaggctttctcctcactttgtacactgcaagagaaaaattgtgtcaataacaccctctgtggtagagaaactttaaaagctggttaggaagctcgcgtgtaggtttagggacaattacaagaaagctggacttttcactctggtctcaggagaaatgagcgttcttgacgacaggcaaagggacgtcttaggtgtccagaagcggcattcttccctggaagccgccatggtaataggattcctagcttggctccagacagtgcctgctcatggctgccagttcctactgatcacatccgtcactgccgccgtttatcatctgccagtgcgtcagcttaaggggaggtcacgagtgcaaagagcctgagtttggcattaagggagaagggacacagaccacctgcctggaattcctggaatcactgacagggtggaggctgggctggggagttagccacggcgtgcgtgggtggctgtgtctccagcaagtctctctccagcaaaccccaggtctgctccataagcaagatctttaacagatggatgtctccatgagaaaacccaaggcgagaagcccagagccaaggcggggttgcgtgatgtcctcatggagtcactctgcctcacacgctcagatcttcccttctggccccacatccccaggagggcctgacccctgtaaagatgcaggaggcagctgcctggcttccaaatggcccgtggagatggcagtcgagagaggaggttctgtgtttgctgcggcaacgggaggagaaggcaatggcaggagaaaaggatggcttctagccctgaagaggactccagcatcccaggaactgggcgcttccggctgcaggagttttccctatggaggcccctcagcctccagcccttaacataaatgtcagttaaattcagttttcaagcttctctcgcttttcagtatcagagcggtagatggtccagggcattggagacctcgaccactctgtattgcagattacagtgacttccttggggttgctccatcttggtctcctatggtttctttatcaactttgtttaccaccatctctcaaacaacaatgaagatagatgcgcccgttagtgtctgattaaggagcaaaggatggatttccggccagagcgagctgcactctccctcctgcctcagcgggggtccgtcttagcagttcggaaaggggagaaagatgccggtcctcactgcttgaattatgtgtccaggtgccgctagacttgcatgcacaccaactccttacaatcaccacacagcatcattgccccagtgcacagatgaggaaccagaggctcagaggaatgaagtcgccttcctgaggtcacacagcacgaaagtgacaagctaggatttgaacctgggaagttgggctctaaagccaggctctttctgccacacagtactgccttctgtgactggatgacacctccagggcacatttacaccaggccctgaatctgcagaggctgcttctcaagatgcccgtcatggtgtggcctgggccagctctggcttccacaggtccctgaccgccctcagagtggaatatgctcaacctcctgcccagtgctctctctctgcccagatttcaggggtaccggtcctgaaggcatgcccgcttctttaagattgagctcaagtctccttggaagtctccggtgaagttcccagagactggttttcttgggatgcaggcagaaaggggaccctccctggccaacacccaggaccccaacagaagcacccacacatagaaagaggctcacagcagccaggagtgcagagtcagagtcctgggaccatcttgttctgcaaggtgacaggggagagggatcaccccttgttcagtctctagctgggacctctgtactggcttctcccttgatggggttgcctgttaaatagctgtgcctcagagaaagtgtcctgcattttctggaatgttctctgtgcttgcccttctgtgtgcccctccattgctcctctacaagcaattaggtgattcaaaagagcaacttaggctgggcacagtggctcatgcctgtaatcccaacactttgggaggccgaggcgggcagggacaggagttcaagatcagcctggccaacatggtgaaaccccgtctctacaaaaaaaaaaaaaaaaaa

SEQ ID NO: 152 - DNA, 571 bp, Macaca Fascicularis
  misc_feature (1)...(571): n = A,T,C or G
catggatcattgcagtgttgannnccggggctcaagcaatattggnnnnnnnnnnnnnnnccagcttcnnngaggnntgatgtaggaggatggtttgagccccgcgnnnnnnnnnnnnnnnnnnnnnnnnnnnnnnnnnnnnnnnnnnnnnnnnnnnnnnnnnnnnnnnnnnnnnnnnnnnnnnnnnnnnnnnnnnnnnnnnnnnnnnnnnnnnnnnnnnnnnnnnnnnnnnnnnnnnnnnnnnnnnnnnnnncagttccagcatctattctttttcatatctgttgaatttcagtacccgctcatatatgtaggtatgaaaagtgacttggacttgtaccctttagagtagatgcctgagtatagtaatctttaaagctatacatggacnnnnnnnnnnnnnnnnnnactggtgagcaccagaggcaaagagaagagannnnnnnnnnnnnnntgctgtagttcttcataagagagtccattcttgatgagttactatgcaggccctcggatatgttctcacacctactccagatttcnnnatgattaaatattaattttattggtggca

SEQ ID NO: 153 - DNA, 697 bp, Macaca Fascicularis
  misc_feature (1)...(697): n = A,T,C or G
atannnnnnnnnnnnnnnnnactgcacacattggttttggaaaccagagtttatgaagaggatacttaacactctgatgggtaattttctcccctattagtttgtttctcannnnnnnnnntcctcaacctttcccnnnnncaggnntatacggtcaggtactagaaactcagaaaactgtatttgattttagtaaacatcctcactgtcatttggacttgcatctggaatttaagatagtgaatacagtcaagtctaataaatacactgaagtataatggaccaaagccttggtaaggtggagcnnnnnnntgccccacaggattgtttcaaggattagacacgaatatggagcatttgtgatatgccaggaacttagtgttcagtaaatagatacggtgagactctttattgttagatttgagccctgctnnnnnnnnnnnnnnnnnnnnnnnnnnnnnnnnnnnnnnnnnnnnnnnnnnnnnnnnnnnnnntgggttacagtgtgctgtgctgatcggatgtctgcaataagtnnnnnnnnnnnnnnntgacctcctgggaacaggagactcccaggttgcctaaggaggggtgatctgnnnnnnnnnnnnnnnngagcaggtcaaaactcccctgctgatcagtagnnnnnnnnnnnctttgaatagccattgcagttcagcctgggcaacac

SEQ ID NO: 154 - DNA, 2270 bp, Macaca Fascicularis
tgtttaaaagtcagagatacctataaactacgtgtgacagtatgaagagatactatatattcctaattctacaattagtaaattatagcctgtttatcttgactctcatcttcattatctttgggtatttttctaccataaaatgtcactagcagaaaagttcaccaggggaatatatatattttttggaaagcactattttgagaatgtcaaattgaggaaaagtagccactttaataatatttccactttcttggtgccttatgtttagatgaacttttgctgatttaataattcagtttattccactagatttaattgatttctttttaaaaggtgtttctttccctgtagctgtaagctgtaaataagggtgttaagcacaaagataaccaaaacttacatgcactgtccaggttcttttctgtacccgacatacttgactataaaacaggaacaaacaaaacctaattacatcattgccagaagatataggtgacaaggtggatcttcagggcaaactaaagagttttcagtagaaaacttgtgatgtaaatcacagccctctttccttgctccttgtgttgctagtgaatgctacatagaaccctgtgtttatgtttgtatgctttagggaactcctgctttcaaaatgaactaaaatcaggagtgaagaaaaggaggaatgtaaattggttttgaggaaatagttgtgaaagaagaatataccagacaataatgtagtttaaagttcttcttactttgaaaggaaaatgggttataccaggataatttcatcagtctcatttcagatcagatttggagtggttctatttcagttttgtattttataaaaggatgcagattcttattgcacttctcttccaaatcctttggtatttttataactgaaattttcttttctctaagacccaaaggccattagatttttcaccaggggattgctctgtagaatgagactgtttctagctacaccagtgactggaatggactgatgacatttttattgattatttctatcaggtatttcatagacccccatgtgaaactttggagtaagcttactcatgttatctaaaatctgaggcgttcgaatcctccagaatgtcagattgacgagtctgaacctaactgcctggtgtgaatgattgtaattacatatttttcccgctaaaatcttcctaaatgccactctgtgatctaattgaaaatactgtgggtaattacaaagtttagatgacttatttttcacttttccaggttgcaccattactcagacttctaaagagactatttgaagtaagaaaacccttttcttacaaattctgccggttttaaggttacatccattgctgtcaattggtggaagcagcacattagctgagctttgtttctttacccctaggttactgcatctttatttagaggggtgggatggaagtagatcaggaaccgtctagctgaagttgaaccttccttggaaatttcttatcccaaatcacaataatctggctcggttcttctgaggtctgatctctaatgttgcattcaataattctcatcaaaattgtaattactgagcatgtttaatccacaaaagacttaataacacagagaggtgggtcttcaaatatagctatagcttgtatgagcttaaatcctcatatatatatgtttcttgagaaattagcaacttgccctgtttcacagagctagataatgggcctggccattagttctactgcccaatatttcaaaccatagaacatccttcccttctcatagcgtcctttcgggtctgagatgcagtggttctgagattgagctttgcaattggcctcttcatctcagttgactgtttggtctcctcagagattaatgaatgttgagagactttgagaatgcagatatatatatttaattaggacaaaggatttttgaagttacaggcattttgggcaaagctttagccaggaggggaaagcagtttggctatcctgtctctaaagattacattgccagtacgtgtttgttgatgaccagcagctataaatcaggtatttaatttcttttgttctttcctcaggtccagttgagtcacaagataagcctgtcttgatatatcgtctcagaaactttcccgaatgtgtgataatatatggaaaatgatttatagagtcagtgtgcttaagagccggtaatgtcttaataaacatgtggcagcttttgtttgaaaaaaaaaaaaaaaa

SEQ ID NO: 155 - DNA, 2079 bp, Macaca Fascicularis
aaatgaagcatatgctttgcaaaatgcaaaatgcatcacgacaacttagatctcaggaaccactgaatctgaattctctctaagaaatttgagcgcaggtaaagctagttcacctctttcagaagaagcagaataggcagtcagcaaacctacacattgcacatcttctaccatttattagaaaacacctctttgttctcattcaaagaaagccccgcagctgaaagagtgtaccttttttatttatttgcttattttttaacctgacccctggagccccccataggagctgatagcaaacagatagacacaatgaacaagtggaagtcatggcgtgtttctgcaaaacacgatctctcatcccccgccctaaaggacccaatgtgagacaagacttcccatcccttaacacatcgtcatcttctggtcagcaggactgctggttttgattagacaatagcaattaggtaacctgggaagagacagatcagcacaaggtgaaccaccctccaaccctgcagcctcaactgctgtgagttccagtcactgggaaaatctcacttcatacttggttcaccttcgagtcgtgcagctgaatcaagcctctgtctcatactattgccttgcatctaccccatgctcaaaccacctctgatgtcaagaaattacacattataaacatcatatatgtacacctatgaatcattttatatgtgtgtgcatacgttatgaatacagccctgatctttaaaaggagcaaaaatcagagaatcatatgtcttaaagaactgtttccttacttttttatgctaggtaatgcccatgtgacaaacatgtaaatattcatgaaagaccacatgtatatattttaaaagcatttttttcttctccccaactgtatgtatagctagaatctgcttgctgtgtaacattttcttctgcatggagcttttggtgaagcaaggccatttgtccagtgtttcaatagccttaagcatgtttgcccttcattttttgaatgttcaaaaaatggttaagtgatcaagaaaaagctctaactttctacttttgttaattttatgacatgacactggccaaaatactgtttcaatgagtgttgagccattcttaccatctccctgacataaaatatacaatgttttagacagtattgtaccaagagtcttttagacaatttttacaaaaactctttttttcccattatgcactggataataatagtatcagtgtctatgttcttaaagttccttttttaatttattttttggaaaaaagtttctcttttgtggctagtttaggtggctttgtgtcttcttatattggaacaagtgtcaatttcaatatataatattgtatttttaaataaccagaatcaacaaaacgaagatcacttttaatttggattcaattcagaagaataaaacccctttgcatgacacgatacgggggaaataaactatttacagaggagccaaggaagaagtttttcaatcaaatctcttctatcaaaagacaatggaatatttacctaacgcatctgggattcattttttacctttcctaatatgtgggtttagtgggagaattgattatgtcatttcttctgtaaaggtgaaaatagtttttataaacaacaaagtaacttgtgaatgaaagaagtaatttactagaacaacgcttgttgatgataattgacatttaggtataacgttatatatgaatgattgtatttatgtatttatttgtcaaaaatgtacataccgtttcgccaaaagtaattgtctgtaaaagtgcactctccaggtttgtagtactatttagggttacatgggttgccaatcaagctgctaaaaaaaatactattttttgtatcaatgttataaaactaaaaatgacagacgctgaagatatcattacattttcttcaccttcctcttgaaatgtaaactgttgactgaaagcacgatgcttatgtacaggcccatctgtcatgaggaagattatggttccataaagctgatttttttaaaccattgggacaaataaacataaggagaa

SEQ ID NO: 156 - DNA, 753 bp, Macaca Fascicularis
  misc_feature (1)...(753): n = A,T,C or G
caagtgggttttgggcagtaggacatagccagcnncagatacaatgcaataattttttgtcagggagaaaaaggcaaatagcaggacatgtcatgagctcaattaagagatctgaaattcagaaactagctggagactgcaaaagaagattttggaacaaagagagaaataagattagtgtaggtcaataagattatattataatatgaacactaaacaaaggcccccgnnnnnnnnnnnnnnnnnnnnnnnnnnnnnnnnnnnnacatgaatgtttaagattttgctccagatgtgccttttattttgcagtggttaatttgcatacagtgaggtgtacacatttcatgtgtgcagctcagctgaattttacatatttatatgtcaattgacccatccgagcatctcttagagaaaatttcgtgtcaaaccttccctcaagctcctttcagtcaatagcacctcacccataggtaacaactagtcttctatcataataggttagnnnnnnnnnnnnnnnnnnnnnctttatttgagtcatacagtttattaaatatatgcttttgtgtctgttttttcacttaacatattttgggggagcttttccgtgttgctgtgtataaaagtagtttgtatgcttttattgctgagtagtttggcattgtataagtatataataatttgcttaaccattcttttgtgggtgtatatttgagttgttttcattgttttactactttattcaatttttga

SEQ ID NO: 157 - DNA, 765 bp, Macaca Fascicularis
  misc_feature (1)...(765): n = A,T,C or G
tcacagaagacctgtnnttcaatgggctagtccccacattttactactgaggcaagagctaagctaaacgaggttattttgtttgtgggaggtcataagggaccgccatagggctggaaccaagtctctccgtgatttagagactaacaacagttttgcaactgatacctgaaacaaattagtcggaatgactttcagccacttcttaccacagttaaccatgctagagtactgctggaatctatcaggattctgaagattattactaattctctattcaacagttgaagcttctcaataaaaatgatcacttctctggcatctgagttaaagtttagtctaaatgagtctttnnnnnnnnnnnnnnnnnnntgtgcttatttagcataaggaatgatttatggggcttctcagtaacctgtaagtactgagagaactgactttttttttaatctgagaaaaaaggtgaaagtttcacagatgtttttaaattcaagtggtttttagtatcagatatttttgaattctcctattgactttaggaggcattccaaatattttctggattttcacaaactattgtgaatgtgactgagaaacatgtaaaaaatttaaatcttgattgaaaaggaggccaagcacagtggctcacgtctataatcccaacactttggaagctgaagcaggaggatcccttgagcttgggaggtcgaggnnnnnnnnnnnnnnnnnnnnnnnnnnnnnnnnnnnncnnnnnnnngagca

SEQ ID NO: 158 - DNA, 720 bp, Macaca Fascicularis
  misc_feature (1)...(720): n = A,T,C or G
gcgccagctgnnngacannnnccccgaccttctcggnnnnnnnnnnnnnnnnnnnnnnnnnnnnnnngctggtgagcatggggcagccccagtgcccaccggagnnnnnnnnnnnnnnnnnnnnnnnnnnngctgtgnnnnnnnnnnnnnnntggggctgcgtgattccaaggactcctgcctgggtagggggctctagggtgggctctaggtacccccaccccttgaccctccagacatcagtgagcaccttcatagcctcctttgtagtcttctgaacatgccggctgctctgtccccatggaaactcctcagtctcccctggtgctgcaccttcttggattccctcctctgcctgtgccttctnnnnnnnnnnnnnnnnnnnnnnnnnnnnctggttaggccctgttttctagctgagatcatttccccgatctccagcctcccctttctgaactctagccctaaataacccactgcgtgctgggcctctgcccctgggtctcccacagtgaactcatcccaaatcacactcccgagccttcccctcggctcacttcccaccctcagttctcttccatgtcggtgaatggcaccccctttcacaaagctcctcatgcctggtgagggccacagttgcctttatgaatgcgtagttttgcagtcctcgctggtccttccatacacagaagtgtgcccataaatcgcattgttttgtgg

SEQ ID NO: 159 - DNA, 708 bp, Macaca Fascicularis
cactttttttttccttggattaaaggtatatctctctactgggggtttccagctttacacttcaatgggttgttctgacagtgagaacacattatatacatgttttctattcatgtccagggcatgagaatcttaatattcttgtacttccctttttgcatgcagtgtgtctggaatatatttataaaattttagcaaagggtgagatcaaggaacgagggtagagtggttatttaaagataatcagaaaggaacttcaaagctgccctgcaaaaccaatccttcctatcatgaagagtaccttcatattttctagagattgtctctgaaccattgctacatagccgtaaatttctgtaaatcatgttggctatcagttcttactattctcagagcactctatcatgtttttaggtgtacattgtgtattcaggatagcattaaagaactgatggcaaatgtattgactcacagtggaaacatttgtttggatgaagaattagtggtttagcctttgaaatgaataccttgaatcatttcttctgattttctagtagtttattatctcaaatgattattatccccttcagaaatactggtctgtactttggtgttgtggtttcatttttctgacattgatcaaatagcaaatacgaaataaagcatttctacatgtttgaggtggttgtttttaaaggggatacgtgt

SEQ ID NO: 160 - DNA, 1154 bp, Macaca Fascicularis
  misc_feature (1)...(1154): n = A,T,C or G
acagtgtaaagaaaccctcccatctttatgtagctgacagggacttttggcagaggagaacataactgaatcttgtcagtgacgtttgcctccagctgcctgacaaataagtcagcagcttgtacccacagaagtcagtaccaattgacgctgaaagagtaaggcaaaaaagtgagaatgatcttcaaactaaatatttgaaataggacatactccccaaatcagtctagacacaatttcatttccagcacttttagaaactaccaaattagtaaaccagaaatagaaattagatttgtgcaaacatgaagaaatctactggattggcttccagattttaaattttatgtcatagaaatattgactcaaaccatattttttatgatggggcaactgaaaggtgattgcagcttttggttaatatgtctttttttttctttttccagtgttctatttgctttaatgagaatagaaacgtaaactatgacctaggggtttctgttggatagttagcaatttagaatggaggaagaacaacaaagacatgctttccatttttttctttacttatctctcaaaacaatattatccttgtcttttcaatcttacacttttaactaataagtggattttgtattttaagatccagaaatacttagcacatgaatattttgctataaaagcatatataactatgttttaaatatccatttatcttctgtatatctaagacttatatccttatttttactatcacacatgaataaagcctttgtctctttctttctctaatgttgtatcacactcatctaaaacttgagtggctgtcttaaaagatatacggggaaagataaagaatattgtctgtctctatattgcttagtaagtatttccatagtcaatgatggtttaataggtaaaccaaaccctataaacctgacctcctttacggttaatactattaagcaagaatgcagtacacaattggatacagtatggatttgtccaaataaattctataaaaaccttaaagctgacttttttgttatgtaggctgtatgtgtatattgaaactttctattgcttttaaataaataccaactaannnnnnnnnnnnnnnnnnnnnaaccgtttnnnnanaaacccctatgtca

SEQ ID NO: 161 - DNA, 735 bp, Macaca Fascicularis
  misc_feature (1)...(735): n = A,T,C or G
ggcaatcacacaccacctgnctctgttttttaaaatcatggattatctttactattattaataatactttttctctctttaaattgactctgtttttaggtgtaaacttattttcaaagacagccttattttagtccataagnnnnnnnnnnnnnnnnnnnnnnnnnaaacagaagggaagagacgtaagaataaacatcatgaaaacaagataatattaaatctgacttagcttctattgcctgccnnnnnnnnnnnnnnnnnnnnnnnnnnnnnnnnnnnnnnnnnaaagggagatccagtgttggagaggtaataaacacatattagcaccaatatttgtctttcccttgatacagcataaggttggaaagagaatcgaaaagggaagtgctgtttttactttgagtcagtgttaattaaatgccatnnnnnnnnnnnnnttcaaannnnnnnnnnnnnnnnncctcgatttnnnnnnnnnnnnntgaccagactaggcgggctgttctggagaagatgcctgcgctctccaagcatcatcctaagactttcccagtgnnnnnnnnnnnnnnnnnnnnncaaaatcccagaatcacaggacgacactgcagtgaatcaactgagaaacagcaggagctgagaagccaagacgagaagccccacatccctattcccttgcctacctcacgcattccctgctcagcacnnnnnnnnggaggtctgcttttgccc

SEQ ID NO: 162 - DNA, 715 bp, Macaca Fascicularis
  misc_feature (1)...(715): n = A,T,C or G
tacattgccctgtcaagggacaccactgaaactgatnncaaacaacgacgagagatccgtgcaggcacagctttttacattgatcagattggcaaagattaaagaatttgctaatgtccagtgttgatgaggaagaagagatgaggaaacagcattgctatnnnnnnnnnnnnnnnnnnnnnnnnnnnnnnnnnnnnnnnnnnnnnnnnnnnnnnnaagaaaagaaattacacatgcatttggacccagcagttatgtttctagaaattttactcaagtgtattcacataaaacatgaacagttatatgtacaaggatgtttaatgtaacattgttggaaattgtataaaactgtgaatgaacagagtgatgtatacttaaaaagactaatgaaataatggtaagtaggatactctttagttattaaaaagaatgagacgaatgtgtacctactgataggaaagacgtccaggatatattaagcgaaaaaataaagttataagacaatatatgtactgtgatcccatttgtggtaagaagacaagaaatacatatatgtttgtttatacattgaaaacttccagaaggatgcacaaggagtggttaacagagtgtacataaagtatgttacaaaagtgtgagttggagtctggagtaggataaggaagagactttcgtagttctttaaatttgaagctttagcatgggcacacaa

SEQ ID NO: 163 - DNA, 753 bp, Macaca Fascicularis
  misc_feature (1)...(753): n = A,T,C or G
tgatacgcgctcccctgcgcctgctgcccgcaggcgtgtctgtgcnnntgggcgtgcgtgcaagcgagcgtgggtgcgcatgtggccgtgcgtggggtgcgtgtgcacgtgtgcgctggcacacacgggtgctgggtgtggccgagcgcctctaacaagcgaaaacacgagtgtgaacctctctcccctgcgtcgccacctctgtaattgatgtacataccgcaaaccgtgtgtgaacctgtcaactctctgtcgtctttggagcgataccgttgtgttgttaatctggtttattatttttcttcaatgttcgatttttcttttttttttttttctttttgtttggttcgtcggtttgtttttgtttttgttttttccccctttctcctcccctcctcctttttatgaaacttgaaaacttgaaggactgctgtgtatttgtaaataacaaaactattgtgcactctgtgcttgtaaatgtccctcgtccgaaccnnnnnnnnnnggagcccgtgtggcagaggatgtggtctgtttttgatgtcccccctcccgccccgctggtgtgaacgnngtgggaccagaccctgtcctgggggtgcgtccaagtcactttaaccacaaannnnnnnnnnnnnnnnnnnnnnnnnnnnnnnnnnnngagactcgggagcccggccaaggggccttgtcttggctgnnnnnnnnnnnnnnnnnnnnnnnnnnnnnnnnnnnnnnnnnnnnnttaaatgc

SEQ ID NO: 164 - DNA, 199 bp, Macaca Fascicularis
ctctgggtgatatgggggtggtttctgtgggggagggttatgttattgtgcccaccagagcagattctcgctctgaccccttggctcttcttcccttgtacgcgtcagagggcacccgctccattttgccccacacgaggggtaaaagatatttcttccccgttagacagtaagcgtccatatttgtatcccagcccct

SEQ ID NO: 165 - DNA, 756 bp, Macaca Fascicularis
  misc_feature (1)...(756): n = A,T,C or G
ggtagctgngtccggtgggcatannnnnnnnnncctgaggctgcttgggagcttgtccaatgcctactnnnnnnnnnnnnnnnnnattgctgacactgatgaaatgagtgccaataaaataaattcttttgaactagatcgagctnnnnnnnnnnnnnnnnnnnnnnnnnnnnnnnnnnnnnnnnnnnnnnnnnnnnnnnnccgggaggttcggcagtcctggccctccaccgttttcaccaccttgcactccatgtggctctcctttcccctcattcnnnnnnnnnnnnnnnnnnnnnnnnnnnnnnncggaccaggaacatgtgttcctatctgtgtatctgcccttctccttgggatactaggaatannnnnnnnnnnnnnnnnnnnnnnnnnnnnnnnnnnnnnnnnnnnnacgttatccctgtccggaaagattctgtttcatctctcagattacttcattgttcagtggccagctctgaaagaaaaatatcnnnnnnnnnnnnnnnnnnnnnnnnnnnnnnnnnnnntggcaactgatttctttagaattttgcagttaacaatagtatgtactcaaattggggggaaannnnnnnnnnnnnnnnnnnnnnnnnnnnnnnnnnnnnnnnnnnnnnnngatggtaaggnnnnnnnnnnnnnnnnnnnnnnnnnnnnnnnnnnnnnnnnnnnnnnnnnnnnnnnaacactgataaacagnnnnnnnnnnnnnnnnnnnnnnnnnnnaaccaa

SEQ ID NO: 166 - DNA, 723 bp, Macaca Fascicularis
  misc_feature (1)...(723): n = A,T,C or G
gtagaatcaaataatgtacttgtcatgaggctttatttttctattttaatgtaaacactgtatttgaaaggtnnnnnnnnnnnnnnnnnnnnnnnnnnnnnnnnnnnnnnnntttagcaaaagaaatccttccaactaattagaaacataagacaataaagaggaaagatcccagatccgtatatacaacagtgtcactataaatacactccactgtcaacctgagacctattttgttttccacctatataaaagtttttgaaaataacaacttcctgtggttacatgttttcaattttctcaaatattctgtcggtctnnnnnnnnnnnnnnnnnnnnnnggnnnnnnnnnnnnnnnnnnnnnncagctatagatccacaattaaatctccatcacctccaaaccccttttctgaaacaaaaagagaaaaacttcaaacagaaagaaacatacaaacaaaaaaatttatttccatgggtgttaccgtgacaaatgtaatgtctctaaaagggaggggggacagatgagtattctagttactacagnnnnnnnnnnnnnnnnnnnnnnnnttttattttattagtaatattttggttctcacactgtaccatcaannnnnnnnnnttttaaaaattatgaaattggcatattttatattttgctacaatggtgtgaaaaaggctgataatcaattagttctttgtcctttttgattaatatat

SEQ ID NO: 167 - DNA, 718 bp, Macaca Fascicularis
gaagaaagtaattacactgtaggctccagacagtttaaagaaatttttcttttaaatgaagtttgaaatttgatttttacagtaaacattttaatcagaaaatgactattttaattactacaaggctgaccttgtgatttttagtatttcaagtacttttacttggcttagagtgatttaggagggcattaaatcacccccagtttcatccagggacaagcaggcggtgggtagtgtgtgggagggaacctcaaatctatataactgttgaaagtggtagggatgaaagtatttttcttctgtgctacatatggagtcctcctcatttcaacatattggatttagtttgtatgatgtttccagttattgcaaccctgtcatctagaaattataattttacctcttagtttccaatgcttatgctattttacttattagaaactatcataattctgcaagcaaaatgacatacaccacacacacagagttcttcagtcattaacatcacttacatagtgatccattttcagttatcatggaatgtacacacaaaaccatgataaacaacagttagtacagacacattgtttcctgtgatctcacctactccacaaagccacaatcctatggaccctacatgacattcacaaccctgctgagcccatctcataattccatacgaacatagcaaagcaaactcagaaactactcactccag

SEQ ID NO: 168 - DNA, 4504 bp, Macaca Fascicularis
  misc_feature (1)...(4504): n = A,T,C or G
aggttcggcggacctgcagattgggaaccgatatggcggcgactctgggcagcggggagcgctggacggaagcttacattgatgcagttagaagaaacaaatacccagaagacacacctcctgagagtcatgatccctgtggctgctgtaactgcgtgaaggcacaaaaggaaaagaagtctgagaatgagtggactcagacccggcagggtgaggggagctccatgtatagtgaggaacagctgcttggggtacaaaggatcaagaaatgcagaaattactatgaaattctgggagtttctcgagatgccagtgatgaagagcttaagaaagcttacagaaaactcgccctgaaatttcaccctgacaagaactgtgctcctggagcaacagatgctttcaaagcaataggaaatgcatttgcagtcctgagcaatcctgataagagacttcgctatgatgaatacggagatgaacaggtgactttcactgcccctcgagccagaccttataattattacagggattttgaagctgacatcactccagaagaactatccaacgtcttctttggaggacattttcctacaggaaatattcatatgttttcaaatgtgacagatgacgctcactattaccgccgacggcaccgacatgagaggacacagactcagaaggaggaggaagaagagaaacctcagactacatattctgcatttattcagctacttccagttcttgtgattgtgattatatctgtcattactcagctgctggctactaatcccccatatagtctgttctataaatcgaccttgggctacaccatttctagagaaactcagaacctgcaggtgccttactttgtggataaaaactttgacaaggcctacagaggagcttctctgcatgacctggagaagacaatagagaaggattacattgattatatccggactagttgttggaaggagaaacaacaaaagtcagagctgacaaatttggcaggattatacagagatgaacgattgaaacagaaagcagagtcgctgaaacttgaaaactgtgagaaactttccaaactcattggcctacgcagaggtggctgagaggataatggtcctatgcagggctggggttttgctacttgttcctatttatgttcctgattccattttataatacaaaattaggtaatggtgaacactttactatttgctaagttcgttggttgggcagagtggcaggagcatgggcacgagagccagacgtgtcctcacagaatccgtcctggggagtgactccaggtcccaggaggagttcatctaagttaaattaatggcaaagcattggattctgtttccctgctccatgcctaccctgcctctgtgaatggagttcagggcatcccagagcagatccatgttttcttccttcttcccttcttcagtgaagtcttaagacccaggcattcctaggcttagccaaagcttaatattagttatttacactgtctaccaagaattatacctctcccttcattagagtcatcatctctgccaaggtttagcctttggaacatgttcctgcccagctttccattttctaggggaatatggagaaatttaaactattgtagtcaatagttttctattattccaatctctgctcagtagcattagcaaactgcctgatttgagtttcctttatttccttaaccctctctcttttagagggtccagaaattaaaactactgagcagcatctggaggcaggggccagggtgaaggtataaagcaagaccgagcctcatctcctctatgaagcctccctagtccatcatagaacccagagaatgtcccttcggtcatttctcctcggtgtcatcattggtgtcatcgcacttgggctgagttcctatatcccacagaggcagatggtcagacccaggaggaggcattgccatttctccaggctgtttgctgaagcctagagatacaggggtcagatcctctctccctggatatgggggtctagcactggccccagtagccactttgtttaacccggtatcctatagtttgtgatttgagatgctttttccatttattgagtgcctactataaaagcaggggctctcacgcatattttcttaagcctcctcacaactctgaagtagatgtattatccctggttctatgaatgagaacattggcccagagaggaggacacaggtcatacagctgatagtggcagagtgagacagcaggctgcgtgtcaggtagaaagtgggagagagcatcctcatgtctcaggtgactctagccaggctggtgaagcagaacctttcccgaggatgcctctgtcctcccccaccccatgacacctcgtcctttctgtggcaatcctgaatccattcaggacgtccctgctgctctttaaggagcaggaccctgtctaacataaattctgtacacaaaacaagaggtccatcacaggcagggaaccctccgactggtgacaagaaagaattcagtcactgcctgggctgtgtggttctgggccttcctgtagagctgagctgcctggattatcatgactctgaacttggaaggatcattaagtgactatagcctactctccatgcttccttcatattggaagaaaagtttctgttagagagtcggccnnnnnnnnnnnnnnnnnnnnnnnnnnnnnnnnnnnnnnnnnnnnnnnnnnnnnnnnnnnnnnnnnnnnnnnnnnnnnnnnnnnnnnnnnnnnnnnnnnnnnnnnnnnnnnnnnnnnnnnnnnnnnnnnnnnnnnnnnnnnnnnnnnnnnnnnnnnnnnnnnnnnnnnnnnnnnnnnnnnnnnnnnnnnnnnnnnnnnnnnnnnnnnnnnnnnnnnnnnnnnnnnnnnnnnnnnnnnnnnnnnnnnnnnnnnnnnnnnnnnnnnnnngtatcaaaaaaagaaaaaaaaaaaaagagagcatctacattagaacagattccaaagtaaagtctcttcatcccaatgcatggccatgatttacacagacgtgcctagcatggctcaccaacatctgaacggttgttccctaccatgcctctgcaggcattgcacagggtcaggagatgggttcacaggtaaagattgggggctttagtggcttgtaggggacaactgctcagttgtagagagagggagcatttctagaaatagccagattttgctacccaactaggtctgtcctcctggttttgggggccccttcttgatcccctctgagtgactgagggaggttacattgtaaaatgtgtccatgagctaaacaggcttatggaaagttcttatatacacaaaaaaatcaaagctctcctctccccatccctaacctctgctagaaaatttgccataatgaaactgacttgacagattaaaagaccctgtcctcgatggccaggaattggatagtcacccattttatggacttcatggcagcgatgagtaatctgtgatgatactaaatagaggcaatagtaactaactccattaaatgtcatgctgattgtctgtttttatagcactgatgatactgttttatttattaccaatagaccacaacattcacatctgtttttcctcaagggaaccatatttgcttttggttgaaggatttatctatttgatactatccagaatattgttaaactataatttcctgggttatattttagatgggttgtctgcatggtggtaaaataagctttttcctcttgcctacatcctttggaagatctcctgatcatacataactaggtagggcttattcttgctgttggagcttggcacccagctctagactgtttctttgagtattactgcagattggagacgtgtgtgataggagcagggctcagaaatagggcttgaggctcaagcagaaactgaagctgtcattcaaatgaaggtgctctctctactgcatgattgacagtgaggaaaggaggatgaaaatccttcttatcactaagagcttgaaggaatccacatccccagattagcaaccctagagttcatctgcgcaagctaggagatgtgtaagcttccttgaccagcgcaggccttacagcacaggagcagtgaccagtaaggaaatgccactgctgtgctttctgttggaaactgctggaaaatacagtgaactggccgggcacagtggcttatgcctgtaatcccaacactttgaaaggctgaggcaggcagatcgtttgaggtcagnnnnnnnnnnnnnnnnnnnnnnnnnnnnnnnnnnnnnnnnnnnnnnnnnnnnnnnnnnnnnnnnnnnnnnnnnnnnnnnnnnnnnnnnnnnnnnnnnnnnnnnnnnnnnnnnnnnnnnnnnnnnnnnnnnnnnnnnnnnnnnnnnnnnnnnnnnnnnnnnnnnnnnnnnnnnnnnnnnnnnnnnnnnnnnnnnnnnnnnnnntgtttcaaaaaaaaaaaaaaaaaa

SEQ ID NO: 169 - DNA, 709 bp, Macaca Fascicularis
  misc_feature (1)...(709): n = A,T,C or G
cggaggagtgaaaaagagcatnnnnctggnnnatgacaagcacaaggacaagacagtggaggaggccaaggtggccntnnnnnnnnnnnnnnnnnnnnnnnnnnnnntcgggtctgccttcttcgaggtgaagcaaacctcggagccctcctacccggacatcatcctcattgccatcaaccggcatggggttctgctcatccaccccaagaccaaggacctgctcaccacctatcccttcaccaagannnnnnnnnnnnnnnnnnnnnnnnnnnnnnnnnnnnnnnnnnnnnnnnnnnnnnnnnnnnnnnnnnnnnnnnnnnnnnnnnnnnnnnnnnnnnncaagatggacgacctgctgacctcatatgtgcagcagctcctgagtgccatgaacaagcagtggggctccaaggccccagnnnnnnnnnnnnnnnnnnnnnnnnnnnnnnnnnnnnnnnnnnnnnnnnnnnnnnnnnnnnnnnnnnnnnnnnnnnnnncaggccctctcagcccagggcctgtcctcggcaggcagccttccatgctgccccccatacgagcccactcagccccgcaggtggccccctctgtcctgggcgctgcatatggaggtgagaagacccagtgtgggtcgggagtctcggacccccaggctgttggtggatggctgagaggaccccccccgcaaccccagcccaccagaagt

SEQ ID NO: 170 - DNA, 206 bp, Macaca Fascicularis
  misc_feature (1)...(206): n = A,T,C or G
agactgttgtccattcccttnaaacaaaagaaagctctctctctatacacacacacatacacactcaccacatatacagtatatgtagagacctgcaagcagaatgttgagccagattttttttaaagatttttttcggccaaagtaatttatgatctcttgtccgatgaatttgtctatcctacttgttaaaatttaggcctttt

SEQ ID NO: 171 - DNA, 3484 bp, Macaca Fascicularis
  misc_feature (1)...(3484): n = A,T,C or G
agatgctgccggagctgttagagggaggagacaaacaaacccaggcgggagcggtcaccggtgactgcggtagcggcggggctgggatgcgttcccgaaggcgttcctggagggccctgggtggactcggagatccccagagcttctggggatggaaaatcgagccccaggcacttgcctctgggaggcagagtgacgcgcatcgttggagcgcgaagccagtctccctagcctcaggccgacacagcgtctccaggggttttccttcttttcgcgcctgtccttccctcttccccacactctttgagagcctcaaatggtagtcctgccgccaccctctctcccttcgcccgcctgccatcgtccccgtgtgtgcagatatgcgctcccgaagccgcctgcctgccgcggctgggcgtcagcccacgaatggggagttggctcagcttgccgcgagtacctccgcatttgaagattgtcttcctgagaatatatccatgtgacttgatggaaacttggaaagcaccttgatcacaaaagtaatatattcaaagccaagtccaagggctaaagtgggatacaaaatgagaagtctggggagataagccttgggagctgagatcctgcattgaaaacaagatgaactaacttcccaggctgcataagtgttcacattttttattgaattgtttcagcagatttgtttcttcttttgacctcaaaagtcatttggaaaccttagggaaacttcatggcatcttttccgttttgcttatggttgtcaggagggatagcatcagaccttaacagaggtggcttcaccttgcctagagtatcaataatcttatcacagattcacccctgttctttctcgtttagactctgagggtcccacttcattgtcaatttcatttgcaatcacaggtttagcataacagctaaccttattttttagctgatgatctggaacccttcacctgacttacaggcaaactcttgtgtattttttgttagaaaatcttcatatcaccattagcaaatgctttactagtttgtttactggccattagctgcttctcaatagtccagcttgggagatattttcttggcatttttgttttgcatcttgagttctcaaggtgaatcattgctatttttaatggatgctggaggcattttgtcaaaggattccttttggttccttcatcttcgtcatctgcttcatcttcataagtattatttcctggtatttctgtaactttagaagcatttgcatctgtattgtcttcttcatggtttcctcaactctatttttcatttctagtccttccagcaggttctctgttgaacctctcatgttctgggagtagcttttctatgattcctctggacctcacttcttgagggaaaacttaaacaaagagggtcattgggataaaccatactccctgtcactcagttggtttcaaggatacaactactacttatcttcctcttccataccaatttcaagttctcctctccttcagcagtcacttccacagatcttagtggtataacctgggtgtgacccaaatccttattcctgatgagaaatatatatttattggcaattacacatacctcatgtgattgttgtacatgtccttccacagttacaagtaagtctcaaaagactcccaagtggatcacctaggggccacatatttttctctgcccattacataaaagtagcccttcttcttcctcttgatctaggtcagttacccctgccaagatggggattcctcttcctgcctgctggtaccttgatacaaagagtccaaaatgccaaaacagttgccatagcttgtagttcaatgggaccttccttgtatttcctggcaaaaattcaccccactttggggaccaggacttctaaaccttcaaaacccagagtttcaggaatagaaagcacaaagttccccaatgagtcatttgggtggatggtaagtggggccacttctgcttcctctgcctttttcctggacccatgtattcctcctattagggacagtgcctttagagctccctgatttagtatatatactgatcttgaaaagtggcactctgttcttgcagaatattgcctccaaatcggtactccggctgcaccttcagtaggctgcccagtgctgtcccaggctggttgctccagatggtgcagtacgtgataaaaccagtagatcccttagtcattagttcatactcataacacctttactatgaaatggatcccctgtttggaccctatgttgagttggatactatacctgtgaatcaggccttctttaagcctctagatagtggtatgggctgtggctctgaagccaagacaggcaaactcatacccagaatacatatgtatccctaaaaggatgaactgctggccactccagaatggaaagggcacagtgttgttgacttgccaccaagtggctggtttatcttctcaagtaatagggccatatcagggactcggggttggtctctgttgctggcaaattagaccttcagagacaaatagctatattggccttggtaagtgggaaatcatactcttgggcgcatgtgtagccttcgtctctgcactcacagtaggcagcctcacatgttgcctacatgtgaaccaacgcagtattcctaggtatggaattcgttgcttccagaacctaaaggcccaccaggctttgggcttcattatagtaggagatgcaagatgcagaaatttgtcttttattctggagggcatgtctccacagaccactgactactggaccttgaaaaaactttactgaagtcacaaattcttgaatcttctttgagtgtatctcccactgtctggatacatgtcttaccaagacctctagtatacaagtcacatcttgctcatcatgctcagtccgaatattgttgatttaacatatcaatgtgatgttatacactgtatgtccagacagtccagatctcttctgactgtattacaatagagggtagaaaagttaacatggcccttggacaaagctggaaataaatattgtctcctccacatgaggagctcacacctgtaatcgcagcactttggaaggccaaggcgggcggatctcaaggtcaannnnnnnnnnnnnnnnnnnnnnnnnnnnnnnnnnnnnnnnnnnnnnnnnnnnnnnnnnnnnnnnnnnnnnnnnnnnnnnnnnnnnnnnnnnnnnnnnnnnnnnnnnnnnnnnnnnnnnnnnnnnnnnnnnnnnnnnnnnnnnnnnnnnnnnnnnnnnnnnnnnnnnnnnnnnnnnnnnnnnnntcaacaaagtgagactccatctcaaaaaaatttttaaaaatgattttgtacagttttaatatctactgaattttttagtaatgcaaattccgtgtaaatcaagagtaaaatgaagttcatgttgtttaaaaaaaaaaaaaaaaaaaa

SEQ ID NO: 172 - DNA, 728 bp, Macaca Fascicularis
ctgcccatgcacgtcatgctctgtgtgaggatgaactggaaggactggctatgcgcggtggcttttttcgtggttggggcgggggggtgttgggtggaatgaacatcaagggaactacccattgagcttagaaatccttgccaggcagttagtttgtgtttgtttttagacgagagtagtgttgactgcaatttgacatctgattttttttttaattgagttggtataagcaggatgtcattggctaggtgacagttacagagtcactgagggaccaaatgccaagatgcctgttggtgggagagaccctctccagagttttccagaggcgactccttccacgtgacgttcaggctgtgacaaaccccgtgcccacactgcctgcactgccgggagactcagggctgggggaggcatgccccggccaccactgccaggagactcagggctgggggaggcatgccccggccaccactggtgagccagcgagactgaggaccccgcacgtgctgacccggggacgccgcggaactcactcgagactgaggacccggcgtgtgctgacgcagggacgccacggaactcactcgagattcctgctcacagcacgtttcctgctcggaagccaggagagcctccacgtgccacccagctctgtccacgtgtccatcacacagctctgcagcagaaggaacttcagtaaagacgctggtttgtaatgagacaag

SEQ ID NO: 173 - DNA, 2397 bp, Macaca Fascicularis
  misc_feature (1)...(2397): n = A,T,C or G
ttaactgataacaaatacaatgtccaatgaatggtacgcaacatttttttcatcttgtgacttttcaattcatacagagtccttggatgaggtctggagggtcctttctctcagtctcccttctttttctgtccttcctcagggtcctggtctatcttgcagaaacaagaaacacacttgagattccgagggtctgtctcaaccccatcctagtgaaatatctcaagataaaccatctcctctcttgctattataatattgacttttttatagcataagttcagcattgttatgcttgaaagatccttgtcatcgtcctgctaaatatcactcttcactagggttaaggaggaaagacaatcctcattcctggacagaatactaaggaggattagcagatgtcagcaggtgcacagtctgttcccccatgccaccgaggaccccattcccttggatggtgactctgctaaagtcctaggagatctgcagacctcaccttactggtggttggtgctccttcctcctggagtattctgaggcctgatgtagagtttgtgataattcagcaaccacatatgttagttggtatatgtgtgtcttagtctgtttgtgttgctataaaggaatacctgaggctgggtaatttatgaagaaaagaaaacctgtcagttcagtaggctgtacaagaagcatggcatcagcctctgcttctggtgagggcctcaggaagcttccactcaaggtggaagggtgaggggaactggagtgtgcagagatcacatgacaaggcagcatgggcaagagagagacaagtgaggtgccaggcttgttttaacaatctctcctaggcactactagagtaagaactcactcataaccacacggacagcaccaagccattcgtgaggaatctggcccatgacccggacacctcccattaggccccattggggatcaaatttcaacatgagatttgaagagtcaaatatccaaactatagcaatatgaggtcaaattatacacaaccagaagaaacctgggacatgctagtggctgaagaggattctaaaggatatggcgttacaggtgatagtttcatcttctcagtttgaccagctgacaacatgtgtagtgtctgggaacataatttttgagagggctcacaacttagggtagatttatgggcctctgataaattatgaggtaactaacacaaaaactgggcatcgtatactttctaaaattttcaaggagattacaggcatgagccgaatgtaactgcaaaaccatatattatagcagtggcttcctacatagatatgcagactggagctggtccatgataaagtgtttctggttcataacaaaatagtgccttttctttttagtatttttaaattctgaaattatatcctttctaacctttcaggattaaggtattgttattttataaaaagatgctgatactctatgatttttggggggtgagagggaatgtcattttttgtttccaaacataccaattttagaagtttttcctgtatttgtaattaatattatcaaaatcctaaagtctggggagtgctggctatattacagaagaccagagagggaaaggaacttgaattttatgacaagataaataagtcaatcatgtggaccccatgactggaggagaccgtggaaagataacgctgttcagaggaagtgaatctagttgaaggcactcaacaatagcgtgtatgtcaaaaaggaaaccacagaactgaagatggaaatgtttggttggggataaaaggagaaacaaacaggaacagatactaagataattggaggacacagatgctgctttcttcgttcagactgcaaaacatcgaaagcaagttacagtagtgccagaggtctccaagaatcaggacactaacctgagtctctttctgccagacgtagagcacctagtaaatgcttgctctactcacaattgtgtttactagaatgttgaaaaaagattgtcagatgtaatttttatagatttcagaaagtcagatttcagaatgttccaaggaaaattatctagagtggataaaagggacagggcattctgaaacatgaagtttcagttgtatctcaaaggatcctgctgaggaagaatgaagaggcttcagcaatcagaaagcggctgcacaggttgtttcctgacatgatcaaactgtgggcagagatgaatgtcaattctttcacatgaaaaaaatgaaccttggccgagtatgnnnnnnnnnnnnnnnnnnnnnnnnnnnnnnnnnnnnnnnnnnnnnnnncaggaggatcacttgagcccaggagttcaagaccagcctgagcaatatggcaagactcaaaaaaaaaaaaaaaaaaaaa

SEQ ID NO: 174 - DNA, 713 bp, Macaca Fascicularis
  misc_feature (1)...(713): n = A,T,C or G
gcacggattnnnnnngagacccagggtcaccctgccagagcctccagtggtctccaagcctctggactgggggctttcttnnnnnnnnnnnnnnnnnnnnnnnnnnnnnnnnnnnnnnnnnnnnnnnnnnnnnnnnnnnnnnnnnnnnnnnnnnnnnnnnnnnnnnnnnnnnnnnnnnnnnnnnnnnnnnnnnnnnnngagcnnnnnnnnnnnnnnnnnntgaaatgggatcataatcactgccttacctccctcacggttgttgtgaggactgagtgtgtggaagttttttgtaaactcnnnnnnnnnnnnnnnnnnnnnnnnnnnnnnnnnnnttnnnnnnnnnnnnnnnnnnnnnnnnnnnngccttctgcccttcctctgcctggggacgccgaactctctcnnnnnnnnnnnnnngctcccttgccctttggctcctggtcatgttccattattggggagccccagcaggagaatggaggagaggaggagactgagtttggggtaatgaatcccccggctcctgccctgcagcatnnnnnnnnnnnnnnnnnntcctgccgggcaactcttgagtaatcatgactannnnnnnnattctggcatcacttccttccctggccccttaagcctagctgtgtatccaccccactccgcccctgccaccccactannnnnnnnnnnnnnncttgcggtttccttatactcca

SEQ ID NO: 175 - DNA, 777 bp, Macaca Fascicularis
  misc_feature (1)...(777): n = A,T,C or G
acacacagctgncncnnnnttagatattatatgcatagtacnnnnnnnnatgggcttcttgaaggtcccaagtatttgagacctgaaaaaagtttattgatacccacataggaaaaatgaacatttaaattaataattccaaaattcaaatcatgaattgtttcaaagatttaaatgatagaattcatatttagtaagtgatatgggtatattttaaggcatttgattttaaaaatggnnnnnnnnnnnnnnnnnnnnnnnnnnnnnnnnnnnnnnntgggtttggatataatcctgagggcagctgggaannnnnnnnnnnnnnnnnnnnnnnnnctctgtggctacagtgaggagaatggattggagggaggccagactggaggcccagtggccagagaccagataggcagttacactcttccagattgcgagagaatgtctctttagtgccaagattagcataaaatcatagcattatataacccagttattctttgattccttcggcccccatctgactcagcattctaaatgtacttaaggtctggggacaagggtttttggcnnnnnnnnnnnnnnnnnnnnnnnnnnnnnnnnnnnnnnnnnnnnnnnnnnnnggcagacatggttacgggcctcagttctgctgctcgctagctgtgtgactttnnnnnnnnnnnnnnnttctctgggcctcagattccttactggtaacataagcataatggtttcctcacagaattaagtgagaaaactatgtatataggacttctt

SEQ ID NO: 176 - DNA, 602 bp, Macaca Fascicularis
  misc_feature (1)...(602): n = A,T,C or G
agagtattttaaatcttaacagactactaatttatttacttgcttaatgtctctctccttcactaagattatcaattcaataagaataaaaccatgtttatctctgtgcacaaagggactagcatgctgtttggcatatagcaggcagtcatactggttaattgaacaaaatcagtgtacattgttacagtggactttaatatatatggtcacttattaattgacccagtagaaattcatgtacaatgtgctaagaactctcttaggcaataggantgtgagataaaaatgaatcagaattgcaacaggataatgtcaagagtttttcttttgaaaacaaatcagcagttagatttttgaggaaaaaaaagttggaaagcatatgactctctaactcactggaccatatggaccaatatctagaataatatatgcggcagattccctgtttgtttatagataaacaaaagacaaggttattttgaaaaactgattttgtccaaattttatagatattaccaaggcattatgaaatcaaaatgtttactttttggtcttgtcttttnnnnnnnnnnnnnnnnnnagaactaagatgaaaagga

SEQ ID NO: 177 - DNA, 767 bp, Macaca Fascicularis
  misc_feature (1)...(767): n = A,T,C or G
cccatatactaatgtggcacaagtaccatannnnncagagttcttaggtacagtannnnnnnnnnnnntgacaagcacacatttttcttgcttcactgctgttctgtattacacaggtttgttgttgtttttttaaataaagaaattaagcggtagttagtctctaaaaannnnnnnnnnnnnnntaccacagtgaataaatagaaatgtaatcagggattaaaaaaaaaaaaacttatgcagcttttcaaagttgattgtttcaaaattggtgtttatttaaaataagtggtaatgtacttgaatgcactttttatgacaatgattcagtaatggtaattttactattaaagaaagtgaaaggtttagttttgttagcatggctcagcatgtagctgtnnnnnnnnnnnnnnntaagcgcaaaagaaaatgataggaataattgcagtagttgtattgtattgtatttttgnnnnnnnnnnnnnnnnnnnnnngcagaggtggnnnnnnnnnnnnnnnnnnnnnnnnnnnntggagataattatctttctgtaagttcgttatgcttgactgtttccatgttctcccaatgatgatttgacagttacttatcactttactcatggggaattaaaatgtaatgtttttcaactgtatctttccttaactggataatactgctatatgatatgctaactacagactgcattaattcatgaaacaaattctgttatgtcctgtaatttgaactctcctcaccacaacta

SEQ ID NO: 178 - DNA, 684 bp, Macaca Fascicularis
  misc_feature (1)...(684): n = A,T,C or G
gagnnnaatannnnnnnnnnnnnnnnnnnnnnnnnnnnnnnnnnnnnnncctatcacttcagttctctgtataaatgaaatttaattctaacaaccttataaaaagaaggtccagacagcagaggaaacgtgctgtccaattctaggtttttctccctgggccccctttccccagccttgtctaccctggcctgcttcctgcattctctccatgccctgctatttctgattctttgcttctcctagtgagatactttccttatatgatagctgctgagatgtttcccagaatactagaggaaaagaagaggggaatttagaaatgtccctcactgacctaggtccattatcttcactctttcattcttcctgccgcctcatgcccgttctctttaccgtctagcatgctgaaaagaaggaagagatctaaatgccagcatattcggtagtaaatattagttggggcaaaagaaaaaccgtgattacttttgcaccaacctaatagctttgcacattttaagaacttgctttatgaagatattcagctatggattctctgcaccccacatagttagacattgttcaaatatgctacttaaaaaaaaaacaccttttcaaacagaattagagttttgccaaacctggtattnnngggaattgtgcaggagcttgaaagtttcaaac

SEQ ID NO: 179 - DNA, 751 bp, Macaca Fascicularis
  misc_feature (1)...(751): n = A,T,C or G
tgcnnnnnnnnnnnnnnnnnnnnnnnnnnnnnnnnacttaaagcaaagttttgctttcttggatgactnnntccgtgagatgaatttttgatannnnnnnnnnnnnnnnngtcttttaggtgtcttgctgttgactatccacaggaggaatggctatcccaaaaaaatagatgagttttttttttttttttaagcactaaagaacaaaatgtgtttttcattaatacaggcnnnnnnnnnnnnnnnnnnncagttttcgtaaagttnnnnnnnnnnnaatgnnnnnnnnnnnnnnnnnnnnnnnnnnnnnnnnnnnnnnnnnnnnnnnnnnnnnnnnnnctgaaccatcaagaggcaaacaggagtttggttcttgnnnnnnnnnnnnnnnnnnnnnnnnnnnnnnnnnnnnnnnnnnnnnnnacttgtaactttctccttgtcatggaggcttaatagacaacagaataaatgcatttcttgggcctcttataaacttgggaacgcttagaaagctgcttctattaccaggctgtaatagctggtatagttttttggtttttttccctcttaagatgttctgttattagtctgagacagctattttttttgttttaaggaaaaacgtcagtcagtgctctgggaggtaacttcctgtggggtctgcaccctcctgtctgggtggtggatgtgggtttgagaagtaggagagcagggtggtaccatgtgggctcttaccctttctgtgatt

SEQ ID NO: 180 - DNA, 1944 bp, Macaca Fascicularis
acaaccacccaggaaaccaaaggcaagctccccctgtcaaagtaccttggcccataagaagaaaagggtgagccccagatgtgatgagcactcccgggcttcaggctcagaaggtgcccagcccccggctctcctgtaactcagaggccagtgtgatgcgagttcctccactcagcaagctcccgctgtgaacacgccggtggtgggcaagagggcttgagaacggttgcttatcttttctttcctgtgtaatctccactttcattcacgataatgtcgaacacgcacagagctcggctggaacgccggatcgctggctcaaccaaccggtggcgtttccccaaacagccttttactggggacctgctctcactttcccagatgttcaaggctctgagcatagactttgaggaagctctgaggaacccagacaggttatacatttcacaaattcagaagtttttctgtgagaatttcaagaacaaggacatccaaagtgcggaagcagatgtgattctcgagtgcctgggcttcaaatgggaactccatcagccccagctttttcagtctgagaccttggccaagctctacctgaaagccctgatgcagggcaccacataccccctgagggagctggaggagcttctgcgagctcaatcacctaagaagaccaaagaaaaatcccctgcaaagaggatgatcatttccttgaagatcaatgacccactggtcactaaagtcgccttcgccacggccctgaagaacctctacgtgagtgaggtggagattaacttggaagatgtactgggggtgctggcttccgcccacatcctccagttcagtggcctgtttcaaaggtgcgtggatgtgatgataaccagactcatgccaagcaccatcaagaacttctacgaggccggctgcaagtacaaggaagagcagctcaccaccgcctgcgagaagtggctggaaatgaacttggttcctctagtggggatgcagatccacctccgcaaaatcccgcaggacctgctccacaaagtgctgaagtcccccaggttgtttacctttagtgaattccgtcttctgaaaacaatgcttttgtgggtcttcttgcaactaaactacaagattcaggcaattccaactcatgaaaccgtgatgacattttttaagagctttcccgagaactgttgctttctggaccgggatataggacagagcttgaggccactcttcctctgcttgcgtctgcacggcatcaccaaaggcaaggatctggaggtgctgcggtacattaacttcttcccagagtcgtggctgaaccgggttacagccaaccactaccacgcactggagaatgggggcgacatggaccaactgaaagatcttaacacccaggctgtgagatttgggctgctttttaaccaggagaatacaacttattcgaaaatgattgctgtatatggattcttctttaagataacgggactcagacatgatactacttcttatagtttttacatgcagagaataaagcacacagacatggaatcccccttcgtggtgtacgagcacaagcccgtcagcctgcgagcggcacgcctggtgaagtatgagatcagagcccaggccctggttgacggcaagtggcaggagttcaggacaaaccagatcatgcagaagtttgggttgaccaagccatcctgcaaaagccatatcttgaaaatccaaactgtgggcatcccaatctatgtaagttttgcattcatcttcccaccatcctgacagtttccagaagaatctatgggatttttcccccactggtctgcataaaagaaaataaaatgacataaaagggagcaaaaaaaaaaaaaaaaaaaaaaaaaaaaaaaaaaaaaaaaaaaaaaaaaaaaaaaaaaaaaaaaaaaaaaaaaaaaaaaa

SEQ ID NO: 181 - DNA, 715 bp, Macaca Fascicularis
  misc_feature (1)...(715): n = A,T,C or G
ttattaagaggaggagaaactttttactatcccatatttaactgttctataaagcaaagcacagcttgggtaatagtgttctgaaggatatacttctgtattttctcatagaatacagtttagtgattatgcttcatttcactatgaaaatatgttactgaatatatcttcattttactgagctgaaataaggaaggcaaaacactgacagctatggaatttgcgtgtacttccatacttgttaatgctctcatccacttattaaataatcatagagtacccatatcttgcttgccacaatatcgggtacaagagggaatacaaagatagataggtcctgccctcagggattttaaagtctaatttgggaatgtgaatagggatgtgagtgtgtgggggaagaaaataaattgacagataaaatatgaagtgggatgtcttgagttctgcatgacagtgggtttctaggataggtctgaaaatcgctttcatttgcaacgcatttagaaagtagctttattnnnnnnnnnnnnnnnntctaaatatatcatcagtttttaaaagtgcctatgtgaagtgattttttaaaaagagcctatgtaaaggggtaatcttgcttatgcttgttactaatttctcatagattgttgttctgcatatataagaatgaaattatttatttactatagttgtacgtgcctcaaataaacaagaa

SEQ ID NO: 182 - DNA, 688 bp, Macaca Fascicularis
gcaccaccctcaggggcggaaagctccggctcgctgtccctgacggcacccacaccggagcaagagtcgtcccgcatccgcaagctcgagaagctcattaaaaagagactgtagcagcagcaaggggcccttgctctggccggccaccctcagcaccccgttccccagaagcccccgacccctcctgtgctcccggcactctcacatcgtcggtcttcacgctttcggggacatgtgggttgtaagagtctctcccaggccctgtctcacttcctgccctaatcggagatgctgagcaagggctgggctctgagggcagtttcgacgatctctggttcccgaagcagaggcagcagtggggggaaggtccctcagctgcccttgactcatgtagcctccccatggcagtcgcaccgtctgacacacgggccccaccgtacacccacccgtccaggcaacctgaacaaggatgcctgggtctcactcctcctccctctgtcctccctccctcctccctccgtcctccctctctctgtggccggccgaggtttccccttctgccagagctgtttcctctcccatctctgggcttggccctagggcctgagttgatgaagtggcaggtgacaggctcttcatggaggctgtgggaccaggcgtattcccacggaaatcccagtttcctggc

SEQ ID NO: 183 - DNA, 746 bp, Macaca Fascicularis
  misc_feature (1)...(746): n = A,T,C or G
gagttatagtgtagatgggagtcatatnnnncagcattctgtannnntttgtcaactcacttcattccatgtggaaagagacaggtgtacactagagctttaaaaatctatttagagacacagcatctagcaaaaaataatttttttctatgtagcacgttgttgcttttnnnnnnnnnnnnnnnatgcatgcattgtacttccattaccttacttaatcttcatggtaattctctaaggtacagggagattaaaaatggcttaggcaaggtcactacaaactagagaagcaggacttgaacctcggtaatctgacaccagagttcttattcctaaccacctaatttatactgatactctaagaatttcctttctataacgaaaattatgtattaaatattttagatttattagaagaataaattctaaaaatataaaaactaactcttggccaatatggaagcattttattagtgtactgaagatagtttgagatcagaggcatgtacatttacttctaatttacaagttggtatatgggagcagaaaatgtggtaataatagtttttctgccttttgagacattcagcccattttttcaccagataattgtggtgagctgtgtattctgtagtgttacagcttacccaccatagtcaaaagtttctgtagagctatttaagtagatgtgatgagggtttgttttaagtaaaggatgaatgtgactttcattattccctgtgata

SEQ ID NO: 184 - DNA, 3466 bp, Macaca Fascicularis
tagaatataaaactaaggctgaaatgtcccatatcccacaatctcaagatgctcatcagatgacaatggatgacagcgaaaacaactttcagaacataacagaagagatccccatggaagtgtttaaagaagtacggattttggatagtaatgaaggaaagaatgagatggagatacaaataaaatcaaaaaagcttccaatcacacgaaagttttatgccttttatcatgcaccaattgtaaaattctggtttaacacgttggcatatttaggatttctgatgctttatacatttgtggttcttgtacaaatggaacaattaccttcagttcaagaatggattgttattgcgtatatttttacttatgccattgagaaagtccgtgagatctttatgtctgaagctgggaaagtaaaccagaagattaaagtatggtttagtgattacttcaacatcagtgatacaattgccataatttctttcttcattggatttggactaagatttggagcaaaatggaactttgcaaatgcatatgataatcatgtttttgtggctggaagattaatttaccgtcttaacataatattttggtatgtgcgtttgctagattttctagctgtaaatcaacaggcaggaccttatgtaatgatgattggaaaaatggtggccaatatgttctacattgtagtgattatggctcttgtattacttagttttggtgttcccagaaaggcaatactttatcctcatgaagcaccatcttggactcttgctaaagatatagtttttcatccatactggatgatttttggtgaagtttatgcatacgaaattgatgtgtgtgcaaatgattctgttatccctcaaatctgtggtcctgggacctggttgactccatttcttcaagcagtctacctctttgtacagtatatcattatggttaatcttcttattgcatttttcaacaatgtgtatttacaagtgaaggcaatttccaatattgtatggaagtaccagcgttatcattttattatggcttatcatgagaaaccagttctgcctcctccacttatcattcttagccatatagtttctctgttttgctgcatatgtaaaagaagaaagaaagataagacttccgatggaccaaaactttttttaacagaagaagatcaaaagaaacttcagattaaagaagttggagatcgtgtcaactacataaaaagatcattacaatcattagattctcaaattggccatttgcaagatctttcagccctgacggtagatacattaaaaacactcactgcccagaaagcgtcggaagctagcaaagttcataatgaaatcacccgagaactgagcatttccaaacacttggctcaaaaccttattgatgatggtcccgtaagaccttctgtatggaaaaagcatagtgttgtaaatacgcttagctcctctgttcctcaaggtgatcttgaaagtaataatccttttctttgtaatattttaatgaaagatgacaaagatccccagtgtaatatatttggtcaagacttacctgcaataccccagagaaaagaatttaattttccagaggctggttcctcttctggtgccttattcgcaagtgctggttcccctccagaactgcgacagagactgcatggggtagaactcttaaaaatatttaataaaaatcaaaaattaggcagttcatctaatagcataccacatctgtcatccccaccaaccaaattttttgttagtacaccatctcaaccaagttgcaaaagccacttggaaacaggaaccaaagatcaagaaactgtttgctctaaagctgcagaaggacaggtgtttttgtggtcgcttggtcaagcaacatgcttgttttactgcaagccttgccatgaaatactcagatgtgaaattgggtgaccattttaatcaggcaatagaagaatggtctgtggaaaagcatacagaacagagcccaacggatgcttatggagtcataaattttcaagggggttctcattcctacagagctaagtatgttaggctgtcgtatgacaccaaacctgaagtcattctgcaacttctgcttaaagaatggcaaatggaattacccaaacttgttatctctgtacatgggggcatgcagaaatttgagcttcacccacgaatcaagcagttgcttggaaaaggtcttattaaagctgcagttacaaccggagcctggattttaactggaggagtaaacacaggtgtggcaaaacatgttggagatgccctcaaagaacatgcttccagatcatctcgaaagatttgcactatcggaatagctccatggggagtgattgaaaacagaaatgatcttgttgggagagatgtggttgctccttatcaaaccttactgaaccccctgagcaagttgaatgttttgaataatctacattcccatttcatattggtggatgatggcactgttggaaagtatggggcagaagtcagactgagaagagaacttgaaaaaactattaatcagcaaagaatccatgctaggattggccaaggtgtccctgtggtggcacttatatttgagggtgggccaaatgttatcctcacagttcttgaataccttcaggaaagcccccctgttccagtagttgtatgtgaaggaacaggcagagctgcagatctactagcatatattcataaacaaacagaagaaggagggaatcttcctgatgcagcagagcctgatattatttccactatcaaaaaaacatttaactttggccagaatgaagcagttcatttatttcaaacactgatggagtgcatgaaaagaaaggagcttatcactgttttccatattgggtcagatgaacatcaagatatagatgtagcaatacttactgcactgcttaaaggtactaatgcatctgcatttgaccagcttatccttacattggcatgggatagagttgacattgccaaaaatcatgtatttgtttatggacagcagtggctggttggatccttggaacaagctatgcttgatgctcttgtaatggatagagttgcatttgtaaaacttcttattgaaaatggagtaagcatgcataaattccttaccattccaagactggaagaactttacaacactaaacaaggtccaactaatccaatgctgtttcatcttgttcgagacgtcaaacagggaaatcttcctccaggatataagatcactctaattgatataggacttgttattgaatatctcatgggaggaacctacagatgcacctatactaggaaacgttttcgattaatatataatagtcttggtggaaataatcggaggtctggccgaaatacctccagcagcactcctcagttgcgaaagagtcatgaatcttttggcaatagggcagataaaaaaaaaaaaaaaa

SEQ ID NO: 185 - DNA, 1295 bp, Macaca Fascicularis
  misc_feature (1)...(1295): n = A,T,C or G
tacatatacataaatatatgtatcagacctnnttatgcaaatgagtatggatgtgcacagtatgtttgatttttatccacaagaatgaatctgattcagaatgcttttctcagctgacatacagagcactaaatattttaaggcaagtccataggtctgaatctcttaagaattctcagcctctatgggatattagggaagcattataaatgcattaatccttatagtcaattctgtgcctaggattttgccagggaacagttcactgactaggaaaagcactacattttaaattcagcattagtgcattgggaaggatctttactgctttgtgcttggcatgtcattattttccatttgacattagggcctttccaaaatgaatgtgaggaattgctttcacttcaagactttccttcttttcactaaaactctagaaggtgttacaagggggggtaaggggggcaaagtccttgaaccttttatttggctcgtgccatgttatgatccatgtaccttttaaataagggacaatagtatctttaaagttaatgtctagccaagagtttagtaaacgaagaattaaactgcactgttgatcggtgctttgtgtaaatacatctttaacatttgggttgagaggggccttaagaaggacagttcattgtaggaaagcaattctgtacatgagtttaagcattcttgttgcattgtctctgcagattctatttttgtttacaatattaaaatgtatgttagcaaaatgggtggattttcnnnnnnnnnnnnnnnnnnnnnnnnnnnttgttatggtattctggtctgagatgcattttcattttccctttctctttttattatcatcaatatcatcatttttccctaataaaagtatacccaggtgattatatttgttggtttagtaacatggaaggttttatataaattttcaaaaagatgtctctttacactttttgttaccttgtagactcttactgataaacgcaactacttattaaaattgttcactttctgtcttttgatcnnnnnnnnnnnnnnnggtaagtttaagggataatatgcagttaagtgtaacgtttcggtacatacaattacatctgccaaagaaacctttgattgtatcatgttgcctatttagtagtgcatagggttcagagtacatgataaaggattaaaagctttgcattgataagtgtctgcataatatttgctgtgattggagaaaaaatgtagtcatagccaaataaattttatcatcttctaagttcactata

SEQ ID NO: 186 - DNA, 2930 bp, Macaca Fascicularis
atgccgaccgtcattagtgcatctgtggctccaaggacagcggctgagccaaggtccccagggccagttcctcacccggctcagagcaaggccaccgaggctgggggtggaaacgcaagtggcatctattcagccatcatcagccgcaattttcctattatcggagtgaaagagaagacattcgagcagcttcacaagaaatgtctagaaaagaaagttctttatgtggaccccgagttcccaccggatgagacctctctcttttatagccagaagttccccatccagttcatctggaagagacctccggaaatttgcgagaatccccgatttatcattgatggagccaacagaactgacatctgtcaaggagatctaggggactgctggtttctcgcagccattgcctgcctgaccctgaaccagcgccttcttttccgagtcataccccatgatcaaagtttcatcgaaaactacgcagggatcttccacttccagttctggcgctatggagagtgggtggacgtagttattgatgactgcctgccaacctacaacaatcaactggttttcaccaagtccaaccaccgcaatgagttctggagcgctctgctggagaaggcttatgctaagctccatggttcctacgaagctctgaaaggtgggaacaccacagaggccatggaggacttcacaggaggggtgacagagttttttgagatcagggacgctcctagtgacatgcacaagatcatgaagaaagccatcgagagaggctccctcatgggctgctccattgatgatggcacgaacatgacctatggaacctctccttctggtctgaacatgggagagctgattgcacggatggtgaggaatatggataactcgctgttccgggactcagacctcgaccccagagcctcagttgaaagaccgacccggacaatcgttcccgttcagtatgagacaagaatggcctgcgggctggtcagaggtcacgcctactctgtcacggggctggatgaggtcctgttcaaaggtgagaaagtgaagctggtgcggctgcggaatccctggggccaggtggagtggaacggctcttggagtgatggttggaaggactggagctttgtggacaaagatgagaaggcccgtctgcagcaccaggtcactgaggatggagagttctggatgtcctatgaggatttcatctaccatttcacaaagttggagatctgcaacctcacggccgacgctctgcagtctgacaagcttcagacctggacagtgtctgtgaacgagggccgctgggtgcggggttgctcagccggaggctgccgcaacttcccagatactttctggaccaaccctcagtaccgtctgaagctcctggaggaggacgatgaccctgacgactcggaggtgatttgcagcttcctggtggcgctgatgcagaagaaccggcgcaaggaccggaagctgggggccaatctcttcaccatcggcttcgccatctatgaggttcccaaagagatgcacgggaacaggcagcacctgcagaaggacttcttcctgtacaacgcctcgagggccaggagcaaaacctacatcaacatgcgggaggtgtcccagcgcttccgcctgcctcccagcgagtatgtcatcgtgccctccacctacgagccccaccaggagggggaattcatcctccgggtcttctctgaaaagaggaacctctccgaggaagttgaaaacacaatctccgtggatcggccagtgcccatcatcttcgtttcggacagagcaaacagcaacaaggagctgggtgtggaccaggagtcagaggagggcaaaggcaaaacaagccctgataagcaagagcagtccccacagccacagcctggcagctctgaccaggaaagtgaggaacagcaacaattccggaacattttcaagcagatagcaggagacgacatggaaatctgtgcagatgagctcaagaaggtccttaacacagtcgtgaacaaacacaaggacctgaagacacacgggttcacactggagtcctgccgtagcatgattgcgctcatggatacagatggctctgggaagctcaacctgcaagagttccaccacctctggaacaagattaaggcctggcagaaaattttcaaacactatgacacagaccagtctggcaccattaacagctacgagatgcgaaatgcagtcaatgacgcaggattccacctcaacaaccagctctacgacatcattaccatgcggtacgcagacaaacacatgaacatcgacttcgacagtttcatctgctgcttcgtcaggctggagggcatgttcagagcttttcatgcatttgacaaggatggagacggtatcatcaaactcaatgttctggagtggctgcagctcaccatgtatgcctgaaccaggctggcctcatccaaagccacgcaggatcactcaggatttccgtctcgccctctatttccaaagccacgtacctcaaaggacccagcagctgcacccctgcagtcctccaggcacctcatcagtcctgttcctcctccattttaccccctcctcatccctgatcagtcatgcctagcctggccctttagtaaagcagtgaggtaggaagaacaagcccttgtctctctgccgtgtggaggaaagtgcctgcctctggtccgagccgccttggttctgaagcgagtgctcctgctaaccttgctccaggctgtctgcagaagcacctgctggtggcactcagcacccccttgtgctagagccctccatcatcttcacactctcccaccatggaccaggaaccaaaccagcactgggttctgcctggttatttcaggagaggcctgctgtggggtaaactcactcagtggaatagggct

SEQ ID NO: 187 - DNA, 684 bp, Macaca Fascicularis
  misc_feature (1)...(684): n = A,T,C or G
cattcaccggctggannncgacatggcgctggccaaggaggagagtgagaaggctgctgagagtcgcatcaagcgcttacgggacaagtacgaggcagagctctccgagctggagcagtcggagcggaagcttcaggagcgatgctcggagctgaagggccagcttggggaggccgagggtgannnnnnnnnnnnnnnnnnccttgtgcggcagaaggagcaggcgcnnnnnnnnnnnnnnnnnnngaacgagcagctttctagcgagcgtagcaacnnnnnnnnnnnnnnnnnnnnnnnnnnnnnngaccggcttgcagcctctgaggaggagacgcggcaggccaaggccgagctggctgcgctgcaggcccgccagcagctggagctggaggaggtgcaccggagggtgaagacggccctcgcgaggaaggaggaggctgtgagcagcctccggacacagcacgaggctgcggtgaagcgggccgaccacctggaggagctgctggagcagcacaggcggcccacgccgagtaccaagtgaccaggatgctgggaacactgccgaagaacggaaggcagaggacagaggctggacatggcccggaggcccacggggatgcccacctgccccctgcagaggccggtggttgagatgcacatggctgagcacctnnngctgca

SEQ ID NO: 188 - DNA, 747 bp, Macaca Fascicularis
  misc_feature (1)...(747): n = A,T,C or G
gnnnnnnnnnnnnnnnnnnnnnnnnnnnnnnnnnntccaaagccacattgcagnnnnnnnnnnnnnnnnnnnnnnnnnnnnnnnnnnnnnnnnnnnnnnnnnnnnngaatcgggaagccgtggctagcactatagtctgcagagatgcgcggggaaagctgcctccaagaaannnnnnnnnnnnnnnnnnnnnntgcagctgctcaccacatggaacagtgatctttnnnnnnnnnncccgcaccnnnnnnnnnnnnnnnnnnnnnnnnnnnntcttgttccctttaactccgctctgaaatcaacccttccaggggggaatttgcttggcagatactaatcnnnnnnngagccttgggcnnnnnnnnnatagggtttagctctccaggctctgggtgaaggaaaggagagtgttgggnnnnnnnnnnnnnnnnnnnnnnngggcgcccaccatcgtcagtgagacagtggggaagagttagcgcccgaagcccccgggaccactgtgnnnnnnnnnnnnnnnnnnnnnnnnnnnnnnnnnncagagtgtgaaacagggctccccagtgcatgttgtacctccttcttcatacctttctgctcttttcaacnnnnnnnnnnnnnnnnnnnnnnnnnnntgtttgggttggcttttgtttnnnntgaactagttcacttattctggctttgtggctgctccagtgaantatgtgcatattttgcctgtgtnnnnntatcttttcctgt

SEQ ID NO: 189 - DNA, 262 bp, Macaca Fascicularis
cagcaaaaaagggagttgtcaagggtgaaaaaagcaggaaaaggaaggaagaggaggaagatgaggaagttgaagaggatgaggaggaggaggaagatgaggaagatgccgccgaagaagaagatgatgctgatgaataagttggttctagagcagtgtttttttatggtttataaagcatttaaccccctgtacacaactcactcatctcaaagaaaaaaattgaaatgtaaggccgtgtaagatttgtttttaaactgta

SEQ ID NO: 190 - DNA, 971 bp, Macaca Fascicularis
atattcttacagaattctatgctatgaatgctttcttgctaaatcctgaaccagctgcctcttccatctcctttacctgctacaactacaaagagccttctctttaatgcacgaatagcagaagaggtgaactgccttttggcttgtagggatgacaatttggtttcacagcttgtccatagcctcaaccaggtatcaacagatcacatagagttgaaagataaccttggcagtgatgacccagaaggtgacataccagtcttgttgcaggccgtcctggcaaggagtcctaatgttttcagggagaaaagcatgcagaacagatatgtacaaagtggaatgatgatgtctcagtataaactttctcagaattccatgcacagtagtcctgcatcttccaattatcaacaaaccactatctcacatagcccctccagccggtttgtgccaccacagacaagctctgggaacagatttatgccacagcaaaatagcccagtgcctagtccatacgccccacaaagccctgcaggatacatgccatattcccatccttcaagttacacaacacatccacagatgcagcaagcgtcggtatcaagtcccattgttgcaggtggtttgagaaacatacatgataataaagtttctggtccgttgtctggcaattcagctaatcatcatgctgataatcctagacatggttcaagtgaggactacctacacatggtgcacaggctaagtagtgacgatggagattcttcaacaatgaggaatgctgcatcttttcccttgagatctccacagccagtatgctcccctgctggaagtgaaggaactcctaaaggctcaagaccgcctttaatcctacaatctcagtctctaccttgttcatcacctcgagatgttccaccagatatcttgctagattctccagaaagaaaacaaaagaagcaaaaaaaaaaaaaaaa

SEQ ID NO: 191 - DNA, 723 bp, Macaca Fascicularis
  misc_feature (1)...(723): n = A,T,C or G
cagatttaacaatgttaacgttatgccatatttgnnnnaaatacttttgtaatattgaacattatggatagagttaaagcttgtttgtatccatcccgttctttacattcgccatcccctacataggtaaccactattctgaagttgatgtgtattctttgtgtacatgcttttataccttttctgcatatgtatgtatccataaataatatgtagtctgttgtgtgtttttaaactttacacagttgatatcgtactcttacatgtattctgcagcttgcatttttcacacattcattttgaatatttgttcatgttaacaatgtagatctagttttctttttaaactctgtatagtattcttatgtatgacatacacctattgttatacatttgaattatttccaggtattttgtgtgtgtgtggtatgtaaagtcacgatggcagagatttttgaaggaagataaattattttaggattacatttacagcatcagtgcccacttcaaggtttatgaaaatttggatgcccnnnnnnnnnnnnnnnntagttggaggaataaacttctgtctgttgtgcagcttattaatacaaagtcttactgttaaacaattgttttatgtatacaacacattcttaatcagttatttgaaatactttaaaattttcaatattcaattcatagcttattttctctgtttagaaaatattgtgtgtcttt

SEQ ID NO: 192 - DNA, 745 bp, Macaca Fascicularis
  misc_feature (1)...(745): n = A,T,C or G
atgtgagcaggcatccagagtgtctatgccaggaattttttttttcagtgcatttcaccagttatatttttatctaaatctttaccttacaagatatgtggcacatttgcctaaaacaagccttgctttctgatttctgtgcactcggcacttaaaccttgcaaatgtcatttacctaacagtcactgtcaaggagtacctggctaaagaatctccagctagacaaagtagaagtatctgtgctctggcagttgaatatatnnnnnnnnnnnnnncagcagctttcaccaaaggatgagacttcacaaccattagatcttcttttattttgtttttatttaaaaaaaaattttaacacnnnnnnnnnnnnnnnnnnnnnntagatcttcttacccccaataccacaaaaatttagtggaatcaggggtatatcaagacaagtggagtaggggannnnnnnnnnnnnnncccccagggcaggcaatgagggattgtgaatttggaaagaattttaaagcagtgatacagctctaaatgcaatgtactatcctggacttagnnnnnnnnnnnnnnnnnnnnnnnnnnnnnnnnnnnnnntaaaattcaaataaagtctgtagtttggttaatagtattgtaccaatgttaatttctgttttgataaatgtaccatggttatgtaagctggatgaaagatatgtgggaaatctctctactatttctgtaattctnnntgtaaacctaa

SEQ ID NO: 193 - DNA, 763 bp, Macaca Fascicularis
  misc_feature (1)...(763): n = A,T,C or G
ttaaatatgactacacttatacnnnacnnnnagaaaagaaacatgtgaaaacatggcatacctgcaggagttgaaatgacagtgtggtcagaggatgtgnnngggagaagctagtgnnngctgggcaccgcgctaagnnnnnnnnnnnnaagaacttcctaccttccnnnnnnnnnnnnnnnnntattgtcagccgctcacacctgagatggacttagagcaaggttctaagagctctgaaagaagtgctttgttcgatgnnnnnnnnnnnnnnnnnnnnngataaaagcagaaaagcaaagaggtaattgtagttgaatcaagttaatagggaaggttggtagtaaatgctgttagtgtgacatgattctgaaatccagagctcagaactaactgcaaaatgtaccatgaactaacaattctttgaaaggacttggagaagcatttttaatacctcattctgtctatgcaagatgaaaattcgtggagtttttttcttgacttttgtaccaaatttaggggtgtggaggtcagcaagtgatatatattgtttataaatgcaagctgtttctggagggaaaaaaatgtgtgtggctcttagattttctgggaattttgtaacannnnnnnnnnnnnnnnnnnnnnnnnnnnnnnnnnnnnnnnnnnnngtattttttaaatgctgtatctttaaagaaaagtaaaattgtcttaaagctaatttgacannnnnnnnnnnnnnnnnnnnnnnnnnnnnctggag

SEQ ID NO: 194 - DNA, 3009 bp, Macaca Fascicularis
aaaaaaaggaggtagtgaccggatgctggcggggattatgtggcagcctgcaagtagtcccagtgcggcgctgatttgtgtctaaattagctttccggaggactatttcaaattagtaaagagataggaggcattgtttattatgtctctcccgaaaacgccctccaccccgctaaactctgcatcaacgtctgagagcaaaaagttagtgtctgtagccacggaagggacgagaggacttcctgagataaaggagaaaaaaaacatggtggatcgttcaaaaccccttcctacttcccttctgaatgagttcattcctaaagaagttcttctttctctgacctatgcggccaatgctggtccttgtcctgaaaacttactgcctcctaagaaaattaaaaccccgaagggcactcttccacgccttgtagaccatgtctggcatcaccctgttcgaaggaatatacaggaccaactaagatgcacaaactactacatatattgaagaaggaacagaccatttacaacacgatatttcatgaacttattcgacaagtcagtgtggactgtgcagacagaggagaacttctgtctaaagtcagagagaggtatgtgcaaatgcttgaccagattgcccggcagatgattgatttctacaaagacttggtaactcagcgagtgatggaccagcgcattttagaagaattgtataatttcaagcatgttattgaagaattgaccagggaactgtgtctagttcgggcgcatgatgtgaaattaacaaaggaaacagaaaaggctcacaaggatttggcgcaagctcttttagatgcggaaaagaatgccaaaatggtagaagaatatcatgacttatatacattacaaagagaaaggatggagaatgatatgaaacagttaatggcagaaagagatatctggagctcagccacatatgaattggccctaaaggtaattgaaagaaatagagtcatattggctagaagactttaccttaatgaaaaaggctggaataaatacactaagcatttaatcatactgctggcaaacaaggacactgaagaccttgcattgttgcagaaattgacacagaaatggagaaacttagtgaataaatttaaacaagaggtagaagaaatggaagagtctacaagggagacattgaaaattgttgagaaaggacttaccaaatggcaggagagcttcaatgaaaaagacattttatcccctaataacggaaatgtatttgattcagttattttagacttcaaacagtggcagaaaatgctgaatgagaaaaaagaagagtttactggggatgttctactgtcaaaatatgatactctcaagattattaaacatttacaggaaaactggacagatattgggcttgggatatttaatcgccataaaagtttggagggggagttgccatcagagcgacagtacatggaggaaattatcaaaaacatacaaaaactctacaaagaatatgaaataagaataaatggggacaatggttactccaaaattcttccaattttgattagttctcttgacttctgttctttcaagttggaaaacctggagtttcctgatacacctcttgaagaatggcaggaaatagatgaaaaaattaatgaaatgaaattacagttggatttattgttaaaccttactggtattgttccacagcacatagacatggattctgtttcggtactccaagcatacatatttaacatgattcaacaatggcttttgaagataggcaatgaaattaacaatggtaacattgaacttcagcgtcacatggatgagttacatatatctatgatccagtggatggtaaacttgctgattttaatgatacccaactttactgaccaagactgtctcctaaagttggaggaggaaagtgctgagaaacacgatataggagttgcgcgattagagctagatgcgattgaactgacaaggaagttgtaccaatactcccgctatttgagcagttcttgtgaagggatggtaacagcaatggctctgagtaaatccactacctcacacagaaatgctactgaagacctttatgaggtggataagttgaagaaagaatgttatgaatggatcaacacatgctcttgcctcctttctaatatcaaaggcagaaaaattacattattgacatatgaagaaatagagcagctacttgaagaggaggctgtaaaagaattcattgagcctgaaatagatgagtctcttcaagaggatgaagaagaaagtaaggaggataggaaacttcaggaggaaaataaagagaaagcagaagaacaaccttcaacatctacagaggaggaaaaactaattcgattcattggagaagatgaaaatgttcattccaaacctctatttgaaacagatgtgttgtcttcctggaaagaatcagctaagcaaggtacattggcccaaaaatatcttgaagcaatggctgtaattgaacatatgcaggagaagttactggaggttgaaaagagagccaaacaggcagaggaatagtttgaagatgcatatgagaaacttcatcatacccttataaaaaataaagatctagaggaattagtcatgacatcaagaaaggagtctaaaggagagaaagaaaatgaagacaaaagagaagtaaaagaagaagaagaacaagaacaagaagaagaagaagttaggtcagcagaagattcctcaaaatgtccaaagaagggtcactgaatccaaggcaacctgtggagagaagaattcagatgttagtgagagcctccaggtgggagagcatgcctaaaccctgatggccattgttctgtactaaggaagaagattccctttgaaaggacatcatttgcctgttttatttaacttcacagtgccttgcaaagagttgtttaacttgcatagtgccacccaataaatatctgtgcagttgaaaaaaaaaaaaaaaaa

SEQ ID NO: 195 - DNA, 714 bp, Macaca Fascicularis
  misc_feature (1)...(714): n = A,T,C or G
agcttttgatgaaaagtcntagggcgattctatttctgctgtgatttatctgctcaaagcccagctggggttgtgcacactagggacccattcctgtgtaatgcaatgcttgcaccaatgctaataaagtcctattctcttgtatgagaaagaaaaagacaccgtcctttaaagtgctgcagtatggccggacgtggtggctcacacctgtaatcccagcaccttaggaggccgaggcaggaggatcacttgaggtcaggagttcaagaccagcctcgccaacatggtgaaaccctgtttctactagaaatacaaaaaattagccgggtgtggtggcgcgtgcctgtaatcccagctactcagaaggctaaggcaggagaatcgcttgagcacaggagaatcactggagnnnnnnnnnnnnnnnnnnnnnnnnnnnnnnnnnnnnnnnnnnnnnnnnnnnnnnnnnnnnnnnnnnnnnnnnnnnnncagtaaataaatacataaaaagtgctgcagtagctgtggcctcaccctgaagtcagtaggcccgggcctacctcactctctcccttggcagagaagcaggtatccacagctcctcttgctcacaagggctcccagcctgccctccagctgctgctctcccctcccagtctctactcaatgggatgaggtgaggtcgtgaggacaccaaaaatctaaaaataaacaaaa

SEQ ID NO: 196 - DNA, 1183 bp, Macaca Fascicularis
  misc_feature (1)...(1183): n = A,T,C or G
gacaggaaggatgaggacagggaaggaatttaaagacctctttgacctgaacagctctgaagaggacgacgacactgagggctactcggagagagggatactggggcccctgagcactcggcatggggtggaagaggacgagacgctggggcccctgggcactcggcatggagtggaagaggatgaggacgactcggaggatggagacccagacgcagaggcggggctggcccctggggagctgcagcagctggcccaggggccggaggatgagctggaggctctgcagctctctgaagaggactaaggcagcccatctgggggcctgcaggggctgccgtgctggtggcgtgttcccacctctctggcagtcaggcccagaggctggcgtctgtgcagctgggggaggcagtagagaggggacaggctttatttatttttcagcatggaagaccaaacggactgagagctgtgctgggctggcgtggctgccgaagccccacagctctgggctgaagccagctccgctggggagacgatgacccnnnnnnnnnnnnnnnagaccagtcctagttccagggggaggcctgcagacccctggccccttccaccacctctgccctccacctgcagacctcggctgcaccaggctctacattcactcccccaagtctttggaaatttcctcctttcctttgaagtcacattttccttcaaaattttttgttttgcatccaaaaccaaaagaaataaagctgtgggaggcagggccattgtagtgagtggtggctcctgcagatttgtgtggccccaccccgtacccccggccacctcaacacnnnggctgggaagggtcaggggcccctggaagcagagccaaagtcccattctcctgcttgggtgaagctcgaccagcaagggtgtggccccctccatagggggacgtggcggtcttcggggacaagggctgctctcctgtgccgagttctcgctccggggcccgcaggattggtggctgcagtggcagagccacagggaagctggccatgtagaagactcggcccaggcgcctggccacctgggcccggatcttaagggcgggccccagcttcagccccatggtgctcagcaggtgctcctccgtcagcagtggcagggtctccccgtcgatcccctgctcctg

SEQ ID NO: 197 - DNA, 754 bp, Macaca Fascicularis
  misc_feature (1)...(754): n = A,T,C or G
gaccccaggagggcnntgccacgnnncccctggctgctggggactggggactgggcagagactgagccagnnnnnnnnnnnnnnnnnnnnnnnctctctggcccattcggacaccttcccaaggccgcctcctgctagcaagaacagagtccaccctcctctggatattgtggagggacggaagtgacagggtgtggcagtggagtggggagctggnnnnnnnnnnnnnnnnnggctcaaccgtgactttgggctctgcctgcatcggtgttggccactgtccccatttacattttccccactctgtctgcctgcatctcctctgttccgggcaggccttgatgtcacctctaggactgtgccttgctcaccgaaacccgcacccaggagtatggctgaggccttgcccacccacctgcctgaggagggcagagtggatggacgggtttggaggggagnnnnnnnnnnnnnnnnnacaggtttgggcagtggtgggggagggggccagagaggccgctcaggctgcccagctctgtggcctcaggactctgcctcacccacttcagccctgggccactggacactgatcccctctgagtcctctgcccctgccaaggacactaaccagcctgggagggtggcagggaggaggggcggcttcaccctcgggagtcctggggttcttcctcctccttcttcgtggtttctgttttgtaatttaagaagatctattcatcactgtaattattattat

SEQ ID NO: 198 - DNA, 700 bp, Macaca Fascicularis
  misc_feature (1)...(700): n = A,T,C or G
tatttgtaaggacnnnnnngaaaccaacaatattttgaaaatagtagctgannnnnnnnnnnnnnnnaaaaagccacataccctattacagagagtcaaagcctgcacaacagaagaggatcaggagannnngatgcaaattaccagtctgcattnnnnnnnnnnnnnnnnnnnnnnnnnnnnnnctgtaggtgtgcagggtgactgtcgttcctnnnnnnnnnnnnnnnnnnnnnnnnnnnnnnnnnnnnnnnnnnnnnnnnnncttatttnnnnnnnnnnnnnnnnnnnnnnnnnnnnnnnnnnnnnnaacagagttgtttnnnnnnnnnnnnnnnnnnnnnnnnnnnnnnnnnnnnnnnnnnnnnnnnnnnncttgacaacaggggtgctcagtactttacgccaagcagattttgaggcnnnnnnnnnnnnnnnnnnnnnnnnnnnnnnnnnnnnnnnnnnnnnnnnnnnnnnnnnnnnnnnnncattacattttgnnnnnnnnnnnnnnnnnnnnnnnnnnnnnnnnnnnnnnnnnnnnnntattcgaacctttattactagtgnnnnnnnnnnnngtatacctgcaacaccnnnnnnnnnnnnnnnnntagaggtggtattaaagatggtcactgagattnnnnnnnnnnnnnnnnnnnnnnnnnnnnnnnnnnnnnnnncatcaaagccccca

SEQ ID NO: 199 - DNA, 689 bp, Macaca Fascicularis
  misc_feature (1)...(689): n = A,T,C or G
tttaaatgtgaaaattatagatcttggtattgaatccatcagtgattcaagagatacacctatttgcctaaaacaacataagatgtattagttatggaattacgtgttggataggttcttaagacctgtttcctcaattcttnnnnnnnnnnnnnnnnnnnnnnnnnnnnnnnnnnnnnnnnnnnnnnnnnnnnnnnnnnnnnnnnnnnnnnnnnnnaaagtgatctgtgagtttgctggcagggcatttgctaaatggagtacaggatctaacagagttttcttnnnnnnnnnnnnnnnnnnnnntgaaggaagcagaaggactttgggttagaagcatctgcacnnnnnnnnnnnnnnnnnnnnnnnnnnnnnnnnnnnnnnnnnnnnnnnnnnnnnnnnnnnncagtggggaagnnnnnnnnnnnnataggtagtccttccaggtcactgtatattgagaagaaacataaaactattttgtgtcacattccgaggtcagccttcttcttaacgttttatagtatannnnnnnnnnnnnnnnnnnnnnnnnnnncatcatgtaccaaatgctttatacaccatcacattcgtgaattttttagcatggtcagaacttgtgtaaatatgtctcttagatgattttggggagatgtgatttatttttcatattttcaaaatgcattcca

SEQ ID NO: 200 - DNA, 716 bp, Macaca Fascicularis
  misc_feature (1)...(716): n = A,T,C or G
cggctagaactaagtgcgaacacgcnnnnnnnnnnnnnnnnnnnctccagaatccccnntcccccagcccctgccaacacacacannnngcattttgcannnctgaggcttccaaacccttgcagccccctnnnnnnnnnnnnnnnntgctgagtgagactctgctttccttctcnnnnnnnnnnnnnnnnnnnnnnnnnnnnnctctcgattaagaagcctgaaggataagggaaaattgattttattcaaatttgtgtacgcaattgtgttttgctcgtgtgagccccggtgatcagagctgccacttccctttcagaaaagagccccgcgatatgttnnnnnnnnnnnnnnnnnnnnnnnnnnnnnnnnnnnnnnnnnnnnnnnnnnnnnnnnnnnnnaaagttccaaataggatttagcataagcttgaggagatttggaaaggtttcaaagatcagactgtatcaaaggcttatgaagccctcgttagctgtggaaatagaatggtgtggcaggcgatcccattggaggccccaatgtctgtattatttcactgtgacaagctaaggggagagaaagttgaacagtttccacaacggagttgggctaacttgaatataatgagcaaacgccacatgtatccattatgttcctctattcatcccnnnnnnnnnnnnnaactctccggctaaacggtgatgggcgctgaattc

SEQ ID NO: 201 - DNA, 1863 bp, Macaca Fascicularis
gataacccagagggcgacctgaagctgctaagaagctccctcctggcggtccggggccagaagcaggacacgctggtgagacgcgggcggacgctgcggtccacggcttcgggtgaggacgtggtcccgccgcagcgcgctcctcagggacagccgcagatgctcaccgctctgtggtaccggcgccagcgcctgctggccaggacgctgcggctgtggttcgagaagagctcccggggccaggcgaagctggagcagcggcggcaggaggaggcgctggagcgcaagaaggaggaagcgcggaggcggcggcgcgaggtgaaacggcggctgctggaggagctggccagcgcccctccgcgtaagagtgcacggctgctcctgcacacgcctagcgacgcgggcccggccgcctcgcgccccaccaccctccctacctcacgcagagcgcccgccgccacgctcaagctgcgtcgccagcctgccgtggccccgggcgtcacgggcctgcgcaacctgggcaacacctgctacatgaactccatcctccaggtgctcagccacctccagaagttccgagaatgtttcctcaaccttgacccttccaaaacggaacatctgtttcccaaagccaccaacgggaagactcagctttctggcaagccaaccaacagctcagccacagagctgtccttgaggagtgacagggccgaggcatgcgagcgggagggcttctgctggaacggcggggcctccattagtcggagcctggagctcatccagaacaaggagccaagctcgaagcacatttccctctgccgtgaactgcacaccctcttccgagtcatgtggtccgggaagtgggccctagtgtcgcccttcgccatgctccactcagtgtggagcctaatccctgccttccgcggctacgaccaacaggacgcgcaggaatttctctgtgagctgctgcacaaggtgcagcaggaactcgagtctgagggcaccacacgccggatcctcatccctttctcccagaggaagctcaccaaacaggtgttaaaggtggtgaataccatatttcatgggcagctgctcagtcaggtcacatgtatatcatgcaattacaaatctaataccattgagcccttttgggacctatccctggaattccctgaacgctatcactgcatagaaaaggggtttgtccctttgaatcagacagagtgcttgctcactgagatgctggccaagttcacagagacagaggccctggaaggaggaatctacgcttgtgaccagtgtaacagcaaacgacgaaaatccaatcccaaaccccttgttctgagtgaagctagaaagcagttaatgatctacagactacctcaggttctccggctgcaccttaaaagattcaggtggtctggccgtaaccatcgagagaagattggggtccatgtcgtctttgaccaggtattaaccatggaaccttactgctgcagggacatgctctcctctcttgacaaagagacctttgcctatgatctctccgcagtggtcatgcatcacgggaaagggtttggctcaggacactacacagcctattgctacaacacagagggaggtttttgggtccactgcaatgactcaaagctgaatgtgtgcagtgtcgaggaagtgtgcaaaacccaggcctacatccttttttacactcaaagaacagtgcagggcaatgcaagaatctcagaaacccatctccaagctcaggtgcagtccagcaacaatgatgaaggcagaccacagacattttcctgaatgggaggcatgtatcaaagactggcttttgtgtaaaaaaaaaaaaaaaaa

SEQ ID NO: 202 - DNA, 3072 bp, Macaca Fascicularis
agcatagagaattaggtatagaacattttgaagttacttctattctttgtaatatataaaagaatgaactgccaggctctgtggcatgtgcctgtggtcccagcttttcaggaggtgaggtgagagcatcacctgagcccaggaggctgatttcagcctgtgcaatgcagtgagacccagtttctaaacctatttaaaaagcaaataaaaagcagattgatccataacaaccatttccattctggaatggttacaattctaaaatacacttcttttttcagaattctaaattatataatgatttactagattttaagcaaagcaactttggtgaccaaaaaaaaaaaatgcatttttaaggctatgaatttgattgagaatgatgaactgtttatgattataattggtatacttttttccaaatgggaaaagtatgtttttatccatatattaaaatttacacacagttctttagggtttgggactcattgtgaataatcaaggagaggggtttgaataagcatctgcctttggaaatcagcagatgaattttccccacagaatttcaagagctctgtggttatcctataagctggtaagatttagaagtaagtagaatgtaatgtgtcagaggctataaaaaagtaacaaagggaacacccgcatcaaggtatcttgtttacatattggtccataattctgaggatagcttattctgtatgtttcctgtaatgtctatactgtattcataactattattaaatacctagagaattgggcaattttgaagcagccactgagagctttcaaaaggcactgttgctcaaccaaaatcatgtgcaaaccctccagctccggggaatgatgctctaccaccacggcagcttacaggaagcccttaagaactttaagcggtgtctgcagctagagccgtataacgaagtgtgccagtatatgaaagggctcagccacgttgccatgggacagttttatgaagggataaaagcacaaacaaaagttatgctgaatgatcctctcccaggccagaaggctagccctgagtatcttaaagtgaagtatctccgagagtattctcgatatcttcatgcacaccttgataccccccttacggaatataacattgatgtggatctgcctggaagctttaaggaccactgggctaaaaatctgcctttcctcatagaagactatgaagagcagccagggttgcaaccccacataaaagatgtgttacatcagaattttgagagttataagcctgaagtacaggagctgatttgtgtggctgatcgtttgggatccctgatgcaatatgaaacacctggtttcctgccaaacaagcgaatacacagagctatgggtttggctgccttggaggtcatgcaagccgtacagcgtacatggaccaactcgaaagttcgaatgaatggaaagacacggttgatgcagtggagagacatgtttgacattgcggttaaatggagaaggattgctgacccagaccagcctgtgctgtggttagatcaaatgccagcacgaagtcttagcagaggttttaacaaccacatcaatttaatcaggggtcaggtgatcaacatgagatacctggaatattttgagaaaatacttcattttattaaagatagaattcttgtttatcatggagctaacaatcctaaaggattgctggaagttcgagaagccctggaaaaggtacacaaagtagaagaccttcttccaattatgaagcagtttaatactaaaacaaaggatgggttcaccgtgaacacgaaagttcccagccttaaagaccaagggaaggaatatgatggattcacaatcacgattacaggagacaaagttggcaatatattattttctgtggaaactcaaaccacggaagaaaggacacaattatatcatgctgaaatagatgcgctttataaagatttgacagcaaaaggaaaagtattgattctttcatcagaatttggggaggctgatgctgtctgcaacttaatattatccttagtttattacttttataatttaatgccactctctcgaggatccagtgtaatcgcttactcggtcatcgtgggagcgctgatggcaagtggaaaagaagtagcaggaaaaattcccaaagggaagttagtagactttgaagctatgacagcccctggttcagaggcctttagcaaagtcgccaaaagctggatgaacttgaaaagtatttcaccttcttataagactcttccgtcagtatcagaaacgtttccaacgttaagatcgatgattgaggtgctaaacacggactcttctccacgttgtcttaagaaactctagttctgttgtatttatacaagtaaagggccggacctcttgcttcttaagttattttttaaaacatggaattataaagaaattaggtcctctattacttttgataccaatttttgataggaattgaatacttgaaatcattttctttacttttctgaaccataacgaaaatcatgaaagaagctttcgggggaaaaagctacttgacttggagggaaagtgtattagccagcaacctgttggtttccacttataaagtcatataactcctttcttacagtaaaaaaaaccattttcctcaacaactaaaaataataatgaagatgaacaaaaacaaaaccaaataggagtgtttgtattcctttagagatttgaatatttttcaaactttctttttacgcacattgtgatagagcatcttttgttgactcacgtaacctccatgtgtgggtccttcattttattagaaccgtggaagaaggttcctgggccatcagtatgtgttgcagagctcacacccaggaacacttattttgaacaatacagacagtatttgccaatgtcccaaatgctgaattattgaaccatgttttttttttcctttgttgaaaaaaataaaccggggtgatttctataaatcaccagtttttggcactggaaaaaaaaaaaaaaaaaaaaaaaaaaaaaaaaaaaaaaaaaaaaaaa

SEQ ID NO: 203 - DNA, 2325 bp, Macaca Fascicularis
agttcatatgactgactttcactaagtataccaatcaacaagttcaccagaaagcctttcccaacatcaggacactaaagtgaccacagaaaaccattcctgaatttgtgatcaatggactcaagtttagggagaggagcacctttggtctacaactatggtttgaatcccagtctctaattacttctttcccaaatactctggtaatcaaagggaaatatttggtgagatgcagccattttgttggttagcaggagttcagacacaagaaaatgtcatagtggtagaatacagtatcaacctcaacagcaagcccatcgctggaagctcccagaccattgtgccaatcaagtggaggaggcactttcatttagagaggcttatgtgaaccttatatgagaaacttgccaacctgcctgtttgattttctagccttactatttcgaatacttaggtgctatcttttagagaccctgaaacagccaagacatgacacccagtacagaggaattcatagagatgtttggggatattaacctcactcttggcatgctgaacaaggaagatattgttaacaaggaagacatttacagtcatctcacttctgttattcagaatactgacatcttggatgatgcaattgtccaacagttgatttattatgcttctaaggacatgagagacaacaatatgctcagagaaatcagaatgctagctggtgaggttttggtgtctcttgctgcacatgatttcaactctgtgatgtatgaagtacaaagtaacttcaggatcttagagctaccaaatgaattcgttgtgcttgccctggctgaattggcaaccagctatgtgtcccagagtattcccttcatgatgatgaccctgctcaccatgcaaaccatgctcaggctggccgaggatgaaaggatgaaggggactttctgtattgcccttgagaaattcagcaaagccatttacaaatatgtcaaccactggagagattttccctacccgagactggatgccaaccgactgtctgacaagatcttcatgctgttccggtatataatggagaagtgggctccttcggcctcgcccatgcagactttgagcatcattaaggcccacgggcccacggtgagcttgctgctgcatcgggaagacttctgcggatacgctctgggccaggtgccctggctcctgagccagtataaagacaaagagattgatttccatgtcactcagagtctaaagcaaatactgactgcagcagttctgtatgacattggcctgccaaggagtttgagaagatccatctttatcaatttactgcagcagatctgcagagctccagagcctccagtaaaggaaaatgaaatggaagcttcaagctgttttctcattctagcccattccaatcctggagagctgatggaattttttgatgaacaaatacgaagtaataatgaagccattcgaatgggaatcttgactttgttaagatcggctgtcagtgctgaggagcccaggttgagggatcacatcatttcaatagaaagaacagtcaaaatcgtcatgggtgatctcaatacaaaagtaagaaattctgttcttctcctcatccaaaccatgtgtgaaaagtcctatattgaagctcgggaaggatggccattgattgattatgtcttctcccagtctgcaacgttgaacaggaatctggagaaaccagtgaaaactaactttcatgagaatgaaaaggaagaggaatctgtccgagaaacaagccttgaggtcttaaaaaccctggacccactggtcattggaatgcctcaggtgctgtggccaaggatcctgacctttgtggtacctgcagaatacacagaagctctggagcccctgtttagtatcatcagaatcctgattatggcagaggagaagaagaagcacagtgccaaggagtcaacagcacttgtcatctctacgggagctgtgaaacttccttcaccacagcagctactggccagacttctggtaatatctatgcctgccagtttaggggagttacgtggggctggtgcaatagggcttttgaagatactgcctgagatcattcacccaaaattggtagacctatggaaaatacgtttacctgagcttctgcagcctctggaaggtacgacggggtggggccaggtctttacccagcagggcaggaacataaagaaatgatgcaccatttctctgtgtaaagccattattgctcattttaggcaataaaaacaatgaacttgataaaaaaaaaaaaaaaaaaaaaaaaaaaaaaaa

SEQ ID NO: 204 - DNA, 719 bp, Macaca Fascicularis
  misc_feature (1)...(719): n = A,T,C or G
agccttccaagtacctgnnnnnnnnnnnnnnnnnnnnnnnnnnnnnnnnnnnnnnnnnnnnnnnnnnnnnnnnnnnnnnnnaccgtgttaaccaagatggtatcgatctcctgaattcgtgatctgcccacctgggcctcccaaaatgctgggattacaggcataagccactgcgcccagcaatttttttttttttcttttttgagatagagtctcactgtcacccaggctggagtacagtggcatgacctaggctcactgcaacctctacttcctaggttcaagcagttctcctggttcagcctcccgtgtagctgggactggaagcatgtgccaccatgcccagccaatttttgtatttttagtagagacggagttttgccatgttcgccaggctgatctcggactcctaacctcaggtgatctgcctgcctcagcctccaaaagtggtgggattataggtgtgagccactgctcccagtctgaagtatattttaaagcagtgataagttataagttatgaattacattcagtaaagtatgcatatttaaactgtagtatgtgataaatttggagtttcatataatcccatgaaaccactgacatagtcacaataatgaatttaacacctttatatttacctggaacctttttttaaagtctttctgttctccagatgatcaatgatttactttgctgtacagtaaagtactttcca

SEQ ID NO: 205 - DNA, 786 bp, Macaca Fascicularis
  misc_feature (1)...(786): n = A,T,C or G
agtgatagtcagtntnnnctactnggcatgtggaattacagcngncatcgtntcatccctttaaccaacatgtgttttgttggtatcaaatgtgtcaggtttaactgacattttaaaatgtcttcaaaaagattacactatgatnnnnnnnnnnnacgaaaagttattgtgtatgcagaaaagcatggaaacagagcagcggggcgtacatttgatattagtgaagcaaatattcgtcgctggagaaatgatcgcaattccatatnnnnnnnnnnnnnnnnnnnnnnnnnnnttacgggacctaagaaaggtagatacccacaagtagacgaagctgtactacatttcgtcagtgagacacgtgcaaaaggattgcnnnnnnnnnnnnnnnnnnnnnnnnnnnnnnnnnnnnnaattgccaaaaccctgggaattgatgaaacaaaattcaaagcnnnnnnnnnnnnntgtgaccgattcatgcgccgagcaggactgtcgttaaggcatcaaacatcattttgtcccaagctccccactgccattaaacagaagacagtgtcggagcactctttcaagaagtgctgcataaccagtactcttgacaacaccgggagagacgttatgtggaaaaacgcagacatcaatgactgtggtttgaaaagtgattcagaggagttggattcagaatatgaagttataattataacttaaccaatttatttcacacattttctttacatatgcacaagattgatgtgataannnnnnnnttaactcaaagtg

SEQ ID NO: 206 - DNA, 2948 bp, Macaca Fascicularis
  misc_feature (1)...(2948): n = A,T,C or G
tgaaccaatctaatgcttcatcccattgtatggccaaataatattctgtcaatccattatacttcattcatccactcacagttcgtgtcatttccactttctggctattatgaatactgcgatatgaacatctggttatttctgactatgatgggtaacccttctataaacatttccaaaggttgcttctaatttatttctattatgagtaatgctgctatgaacatccatatacaagtgttagggcaaagttatattttcattccgatatctttttatggcatgtcttggcagtgatgtctatgacatccaggatatgccttgacatatcttacatcatctaaataaaaatagagtaggggaagaagatagtgattgtgtatgtgatcagaggtggcttttggagaggtgacatttgaactacaccctgaatgaagagagacatgcaaagatctcagcaaagaaaatcccaaggccaggtgtggtaagtgcaaaggccctggggtgtaaacacacttgatgtgttcaagggagagaaagtggccagtgggcttggagccaggagggatgataggcgatgtcatcaagaggggggccaaccacacatgtgcagccactgtatgatgtctggattttacttgagttatggtgatcactactgggacatgggaaccaaacaggtgacataatttgaatcacacttgtaaaagatgccatggttgcaatgaggagggcaatgtgtaggaggcaggagtgaaagctgaaggatatgctgggaggtgacccaggagtcgaagagagccattgaggtgaccaggtgataataatggagatagagaaaacagggtggattcaggaaacatgaccacactaagcatgttcaaatgtaatggtcagttttcttgtctctctccctctggtcaagcccctaactcttcgtgtacacaccctgacttccaatgtgggctggccacccaggaggcatccactgtatgtgtgctgcatgagtgctgtggtatgatcgcccatggaggaagtggcaggttgcagaaagagcagtcacagctcctggctgctgtggatgctttaagcttcttccttgttcaggctaggtcattcccagtctgtaccctggaaggatgtccttagtcctgtctcctctcactagcagggattccaagcttgtaaataatatttccctcttaaaatgtgagcagagtgaagaaccggcagtgtcaaaactctgtgcccaaatgttttacgattttcccttttacagatgcgcccagtgtatccatatcagtgtgtctaggaagaccaatcatactgtacagccagcagaatagaaactcagtgtggccatccattatgttctccctgaattaggctctttgagactcaattattaaagtaggatttttcttaattattaacagttaaaaataggaaaatagatttcaaggggaaaaaatttgcagtcagcaagagtccaattctaaatgtgtgcatgtgcgtaaaacggaatttgccaaacatgaataggcacttacaatgtgactagaattggctctgtcatgtgtcagcctaatagcctcaaccctggttcaatacaatgaacttgggaaggtttgcttaatgaaagaactgacgttttctgtgcagcggctgcattcatcagcctgcatcctgttcattacactacaaagggctgccaatgggaattggtaggatcatctattaggtaaacgcgatggggacaaaagatagcagaggccggggctttgtggaattttctgtggtggtccgggttcctggagtagggagctctgatgacgggcaacagatttccaagttggcacgccggcttctggaatcacgggctgaattctggcactgacacatcttgtcacacacatcctaagggaacctagaaaagataattttcacattgccttacccatcgtggattcagaagggatattcacaactgcgaattcgaatataactattaattgaattattatgatgattattattgagttactgagtataactcataactattgagttttccctctccatctgggcacatgggaaggccgtactttcctgacatgtgacttgctgtggccagtggagtctggggggaagtgacgtgtgtctccttgaggcagaaacttgaagagcctccagcatgctgcatcataatctcctttccctccatcacgcagattggtaatattccagattccgtttgccctgtcagggtgggtcctagaggtaggacaaaagcaagaattgcaaactgacccaagacagacgtggaaaaattgtgcttccctgatgtggctttaagatactcgctctgttgcccaggctgtagtgtggtggtgccatctcgtctcactgcatcctctgcctcctgggttcaggtgattctcctatctcggcctctcgagtagctgnnnnnnnnnnnnnnnnnnnnnnnnnnnnnnnnnnnnnnnnnnnnnnnnnnnnnnnnnnnnnnnnnnnnnnnnnnnnnnnnnnnnnnnnnnnnnnnnnnnnnnnnnnnnnnnnnnnnnnnnnnnnnnnnnnnnnnnnnnnngcaggtgtggaccactgtgcccggccaagataatgagatttggaggccgggcacagtggctcgcacctgtggtcccaacactttgggaggctaaggctggaggattgcttgaagccaggagtttgagaacagcctgggcaacatggtgagaccccgttttacaaaaagattaaaaaattagctgagtgtggtggtatgccacagtagtcccaggtactcgggagactggggcaggaggattccttgagcccaggagatcaaggctgtatagtgagccatgatcccgccaccacactctagcctgggtggcagagcaagacccttttaaaaaaaaaaaaaaaaa

SEQ ID NO: 207 - DNA, 3333 bp, Macaca Fascicularis
  misc_feature (1)...(3333): n = A,T,C or G
aactacacttggagaatctctctctctccctctccttccttctctctctctcacaagcacacacacaacacacattctccattctccaggcattgccagatggtcaggagaagtgagctctctctggccccctagttccctcggctctgctctcctttgcccatcagctccctgtggcctcgatgctagtcctccctattctaatcaccctttgcctcttaagcccagccttgactctctacatatttttcatttctctttaccctttagtgtacaacagttgtagactctgacggaatgaaaacaaacaagaagcctaagcattagaccctgctgtggctgaagatctagaaggcacatcgactttctctgtcaggcttcccgcgttgcccgtgggcaggactcattgctctgcagagcgctgggagcccgtctgtgtgtcaggagagaagctggagcacagagctctgctgcaaagttggctgtttcagctctgactcaggcaggaaagaaggatgccaaggctctgtcacagcggggaaacctaatactagagtgacacggagaaggattccagggatcagccagggtgtcctgtacttatctgagtagagatgattcaaagatggggacatattccaggaaattgcacaatcttcccctggcagcttccgaggacctgtgaaggtagtgcagtgtagtcaaggaagcaatgaattcaggatgaggaaccctaagttcctgtgccagtttggtcactgcttagttacatgtccttaggcatgcttgtcacttaacctaaactttctgggttttctcctcattgctcaaactaagcaacaacactgaagcttctccaatttgtcttctgatggcacatgggtcaaaactgaagtcagtaaataccacgatgaaagtaaaatggtatattgagtgaatgctcgaaattttcagattttatactctgtaaaattatttacttactatatttcaacaccacaaaatcttgaaatttggaaggtaaccagggaagcttggaaatttgttggtaaacccagagtagtatggtttcaaataccactccaacccagcactgaggtctggcaaccacacaaaatagagtttctgggtagcaggtgtttgctttggttttacaatagcatttctcacagtaggactgaaactatatagaatataacactccaacgttacttttttaacctaaacaaccctacttttagcacctcctctgaaagaatattttgctctaatgctacgtgcaacaaacttatttaaacaggatcaactccagcccttaataggttcaaggacaattttactacttcctttctatacgcttaagttatactctcttcttctctttcgatgactctaaatattcagcctctcccagcattaatgttgtgtgagtcaacactgcagacctaagagaaagatttctagaatggtaacccagtgctctttagaactggagaattccgttttcttgttctggctttagttttaatgtctgggaaagtaggcttatgataagataatataaatgagtaaagaagatctagttcataacatgactatactccatgtaagtttgtaactgcacagtgttatgttgtacggctcagaaatgagcaagtgttggtattattaggcatgcatcacgttgacagcttcatgcagagacgaatagtacatttggatatatggaagtcatccaaatgcattgctagaacattaggcctatgtttattctggtagaaccacagagactcacacaaagttctgaccctactactctggtctgggcttgagaccaccccaaaaaaatcatctagagaaccaaagaggctcacgtctcagttgcattctacgtaaaagataaaggagccgtactctccactgcaaagaaatattactaaaacttcgtgcacccaaattataatctggcaatcctaccttaaactaaaaagattatccccagaatattaaagcttactattgttctttcttggagtccaaaatgcttagcagttctgcagttcaaatacaaaactcaaaactatttttatcctgtattctgtgagttccttgatgatagtaattgggtcttattcatcactctgaatcctgtggctcacacagaatctggtaaattgcatatattcaataaatgttgaatatctaataatctctttattaatataacaaatattgtcaaaattctgtgcacatcaatgtcccatgctgctactgtagtcaggagttgtttggctgggaaatggagaatgttcacaaatatgatggttatctaataaaatatcactgagcaataaggagaaatattttaaatagatttgaagttatgaacaaataatttagagtccaaaaaggaaaaagaaaattaactctctcttttatccctagaactcagaaactttactggattggtcaacaaagagaaacttttcattgtagaaaagagtagaattcattgaagggataattcttttgcaacaggcttcttggttgcttgccttagtaagagaagtatctggagggccgggagagttcataaacacagttttctgtacaagtgaagatctgtagtttggcttaaaaatccttgcatgtagttttgcttggtgtggaaagttattaagagagaatccttcatcctgttctgcaggcaatcgaacacatgctctcccttctatccattcctcatccagcacatgggcattcccagcctcctacatgtaacacttcacacttcctttgggcgtccacttagagctatgtgacggccacatttggggcaaagcccttctttcttttaaatataagaaccgtttccaagtttggtgcaggcttgaggaataattacattaaaaagggcttccaagatggtgaatcagcatgctgatttctcttggcaggaagctctcagggaaatgtctgtgaatcatgtaaagatgctctctggtggatagagaaaccgcagtccaaaaacagatgggtgtatatttgctttgtaagcaaagggcatgtatcatactcgcatctaaaacagtgtccacatctttgccaaaggcactgaattttaccttttttttattacctcngtggccaagcacttcctcagtaggcatttcaggtgtgtcacaaaccatgttcatttttaatcttgaaaaagtcaatcgtctgtagtctgtactataaaatgatgcctgcaactttgtggtgaatattatccccaagttaacagtgaaataataaataaaactattattgaacaaaaaaaaaaaaaaaaaa

SEQ ID NO: 208 - DNA, 701 bp, Macaca Fascicularis
cccaggctgggcacttggcatgtccgaacactctcattccccaggctgggcacctggcatgtccgaacactctcattccccaggctgggcacctggcatgtccgaacactctcattccccaggctgggcacctggcatgtccgaacactctcattccccaggctgggcacctggcatgtccgaacactctcattccccaggctgggcacctggcatgtccgaacactctcattccccaggctgggcacctggcatgtccgaacactctcattccccaggctgggcacctggcatgtccgaacactctcattccccaggctgggcacctggcatgtttgaacactctcattccccaggcacgcatgtgcagccgccgccacccgtgtactacggcgctgacccctcctgtaacagctgtggtcttggcctctcgtgttggggcagatgtccccttttccactgttactttctgttgtccaaaactttaagtgtcctgccagccaaagctgttgagcatgactctgagaccatcagtccttggtaagtgtcctgtgcatttgggataagcgtctgtttgcagctgcgcttcctgtgacttgctctgcgtgtcctcctcggtccgcgtgggccactgcgctggttcccagcctgcccgacatgctcgctgcgacacctcccttccctgctgcttgctggcttct

SEQ ID NO: 209 - DNA, 725 bp, Macaca Fascicularis
  misc_feature (1)...(725): n = A,T,C or G
tccagcacgcaacctttgtggagccgtcgaagcctgcctttagttatatgtgtggcgttctcttgtgagtggaaatgtaattgtgtaccagttccttaaaataaacaaagcttcatactgtgacagatctgtttcctatgaaaaccaaacaatgattccacagtcataatgatggcaaaatcttaaaatatgctacatttgagaatagctcaccaagcaaaatatttaaagttaatgatggtgtagcgatgattgttgctaggctacagagttgtatatgtaatgtatagctgaaatcattaaatgacattttcctgaaagtctttctgttttagttaaaaaaaaaaaaagaaaaagaaaagaaaaaagaaaaaataattttacagtgagggaaaatcataccaaaagaaaacttgaatatgtgtctaaacagttattgtattttgtaaattaagttnnnnnnnnnnnnnnngacttttgccttattgaaaaggcagaaaatatgattggacacattgagaatgctttatcaagaatattatttttctaatgtaacaattctccatcataagttcttttaacagggactgcgtaacaattttcataaagtgtaaataaaggagaacctagtgttattgtcttgtacttggtatgtagcattcaggtttatgcatcaaaataaacattcagtaaatattcctgttacaaattttatagcaaagatg

SEQ ID NO: 210 - DNA, 487 bp, Macaca Fascicularis
  misc_feature (1)...(487): n = A,T,C or G
ttgcaccatgagtttgtgaaatctngattaaaaaattacctcttcagtgttttctcatgcaaaattttcttctagcatgtgataatgagtaaactaaaactattttcagcttttctcaattaacattttggtagtatacttcagagtgatgttatccgagtttaagtagtttaagtatgttaaatgtggatnntttacacatcacagtgaacacattggggagacgtccttttttggaaaactcaaaggtgctannnnnatgantcaacgnnatatttctcacgngtgttcannnnnnnttatattttcaggaaagatnntttagggtaacagcttccccacaggcccccacaccgcgccttcccgtctcgcttcccctcccgctagtcccttcactgcttctgggagcacagggctcctagcccacagctctccccacctccgcatctaaaggaccgtgtcctcgcagccctaggcaaagacccgg

SEQ ID NO: 211 - DNA, 732 bp, Macaca Fascicularis
  misc_feature (1)...(732): n = A,T,C or G
ctgctaggattacagannngagccaccgcanncggccagactgcgtcctttttaagcaaatgttttagggcctgggagcttgtcaagtaaggaagtctcaagcccacagagcagcgtcctggccacggtgatttcattatgagcgcttctgcctaggcagaagccccacggcaccgggatcattcatgaggtcactgcccagctcatgatgtccatgaagctgccctgttggctggtagccatgtacagctgtgcggcacagacggcttcgttcatcctgatcgaggccccacctcagccacagcagtccccccgacctgtgttgtccaccctgttattcatgtacctgccaggccctgctagacagcaccctgtggcattactaacacttcatgagtggctgtgtcttgtaattttagggacaggtttctctctttccctctcttttttttttcaagagcccagagactgacaaccagctgcagtgtctaagtgttcctcactgacagggtggggcctcgccgcccctggagggagcagccttggcagggagacagcctggcccagtgaccctgggcccaagccagccccnnnnnnnnnnnnnnnnnngcgccatccattttcaaagatgtcagacgtcacttcttcttgtagggcccgagtcctgcctcctgtcagggccagaccatggaaggctattttctattctggggaactattgtaattaaatga

SEQ ID NO: 212 - DNA, 723 bp, Macaca Fascicularis
tgtggtacatatacaccatggaatactttgcagccataaaaaatagtgaaaccatgtgctttacaaaacatggatgcagctggaagccattatcctaactgaaataattcagaaaagaaaatcaaataccacatattctcacttgtaagtaggagctaaacagtgggtacatatggacacaggactccaaagtgagaagggtggtgcattagtccattctcacgctgctataaagaaatacccgagactgggtaatttatagagaagagagatttaaataactcacagttctgcatggctggggaggaggcctcaggaaactcaagcatggccgaaggcgaaacagaagcaggcatcttcttcacaaggcagcaggagagagtgagtgccaacaggggaaatgccagatgcttataaaaccatcagatctcatgagaacttactatcatgagaacagcatgggggaaactgtccccatgattcaattacctccacctggttccttcctcaacacctggggattatggggattacaattcaagatgagattttgatggggacacaaagcctaaccgtatgagatgggaagggcatgagggttgacaaaatacctgttgggtacaatgttcgctgtttgggtgatgggtccactagaagcccaaacttcaccattatgcaatataccatatatacactaatgtaacaaaccctgtacatgtaccc

SEQ ID NO: 213 - DNA, 1891 bp, Macaca Fascicularis
  misc_feature (1)...(1891): n = A,T,C or G
gaatgctcaaggagaactagccatcaatatgtatattttagggatatagaaaacataggttaatatggtaagtggcataatggagtttggttaagagaactttcgttccatttgtctaaggtttaatgtttaaagttgaacttacctccaatttggttatattatgtgtgtatcttagagggctttgctaatatattgatagtggagtataattgacaagggactattattccttttcttcccagtcttacatttatgttaatgcattgacttggttttcccttaactccatagcaatttcctattattctcaatactaagtcaccactgaaaggggtattgatggtggtggtctccactttccctcctatgtctggtattttccttagttggaagtctcaggagagggatccatgtttttgtaagtccgctatcaaattgtgttccatgggattctctgttaattgtccacttgaattcactttgcttatcagcaaatttgtcttttatatatatatttttttccgattctatttcttttgtttttttttgtttttgtttttgctgcactaactaaagccttttctatgtttttgcaggctctttcttgataaggatattcctaggtattttctgtttgcttttttgcacataggattctagttcatcagaatgctttctgtcttatgttgccttgattactattttaattttgtagtcccctccccatgtaaacctactgtacctaggataaagtagaccctattctgtaccctaagaagcatatagcttcttaaatgatttttagtttcaaattattttctcattccatttactaaacttggcaattttattcttaggccctttcaagttttcctcttctacattacaaagtagaatggttctccatatcatacagaatctcaggttttgttttctgttctcctctttatctgtcttctgtctgtcaaaagcttgaaaggtttattgctttataaaacctgagcccattacagccttgcaaaacggttccctttcttctctgttttgtcctgtgcggtaatagagacaaatttggctatttggatagctgagtctgtgagaaatattttatatgtgtttttaaatatttatctttcttctgtcagggctacttgttttatctgtttattttcttttggaatagaaaaaaatcctggtttggtattaaaggaagttttaaaaaaattatctcatttagggaagaaaattgaaggaagtgatacatgacaatataacctaaaatgttaaaaaatacataaacgggccggtctcannnnnnnnnnnnnnnnnnnnnnnnnnnnnnnnnnnnnnnnnnnnnnnnnnnnnnnnnnnnnnnnnnnnnnnnnnnnnnnnnnnnnnnnnnnnnnnnnnnnnnnnnnnnnnnnnnnnnnnnnnnnnnnnnnnnnnnnnnnnnnnnnnnnnnnnnnnnnnnnnnnnnnnnnnnnnnnnnnnnnnnnnnnnnnnnnnnnnnnnnnnnnnnnnnnnnnnnnnnnnnnnnnnnnnnnnnnnnnnnnnnnnnnnnnnnnnnnnnnnnnnnnnncaaaaaaaaaaaaaaaaatacataaacatatttatatatttgactcatgttactgatataatgagtaatttggactccattcagtttatatttcagagattctcctaatgaactcaagagggttcatcagatgtgaccataatgtaagaaggtggtttctgttttgttttcttgagacaagaaaagtcttgctttgttgtccaggctagagtgtagtagctagctatacctgcagatggtttaaaaaaaaaaaaaaaaaaaaaaaaaaaaaaaaaaaaaaaaaaaaaaaaaaaaaaaaaaaaggccaca

SEQ ID NO: 214 - DNA, 773 bp, Macaca Fascicularis
  misc_feature (1)...(773): n = A,T,C or G
tatccctcgatcacattcaaatcctcttttcttcatgtttcattttcagtaagtatattcttggtctttctattgttttctctagttgaaatagcagtgcctagccaatcaggtacctgtacctcttcacaactggaaaaaagtcacagaaacaaaagttaaggacaactttttattgctaccagaggcttttatcatcagtacatggttctgactgcaatnnnnnnnnnnnnnnncaaagggagctcaggacccagaagtcgttaagagaactataagtaggctggggaggcaggtggggagtaagttctattagaaaatcctaatagcttaacaaaactagggtactaaattcagttataacatgttacagactcaaatcacagagctgccccaacatctagacagtctctcctactgattataaatgagtgaaaactatcagttagaaaaatctaatttcagttgttacatacatgtttctttggtgagcacctggatatattaactttatcacaaattcttttatacaaatgtccaaaatgctttcaacaaatctaagtgtcctaattacataccacttttaagcatcactttaaggtaaacaaaaatgaaaaccataattttaaattaaaatttgaaatgagacannnnnnnnnnnnnnnaatatgagaactttttctgttgctgtctctgattaatatgggacaattccaaagtactctttcatactaattggaacttgcnnnnnnnnnntcacactgaaataattt

SEQ ID NO: 215 - DNA, 697 bp, Macaca Fascicularis
  misc_feature (1)...(697): n = A,T,C or G
cagggcncggnnncgcctcccagggccannnnnnnngcacctagagccacggggtctactgaggaccatcctggagcctcacgctgctctgcacacggcgggggcttgtccactgtggtgtactctccggctcttgccccttccccacctcacatctaaccctggagcttggggttggcacctctgccccaatagagtggggctgaatcagctccaggaggaacctgctcacctgtgcaggcctcagagaggccccgagaagggaagctgcgggctccggtgggtgcggnnnnnnnnnnnnnnnnnnnnnnnnnnnnnnnnnnnnnnnnnnnnnnnnnnnnnnnnnnnngcgtcagggaagaggggtccctgagccagccagcggtggagacggcagtccagtttctgtcccctgtgacccctagaaggggagttgtagccccatgaactagtttcttgtctggatcaggaacaagggccggctggtgcccggggtgcacctggtgggagctgtgcnngtttgctgatgggcggggacatccctgcggggtccagggctctgagcccaggacattccctgccccttgctcaccttgcctgtgggccgtgaacattccgggaccctgggcatcttctccaggtccgtgcagcccaagggtcagccctctttaactgtcacatgctgcccccacccagc

SEQ ID NO: 216 - DNA, 2017 bp, Macaca Fascicularis
agagatgcttctaggctgattcatattcacccttcatcaggataagcacagagcgagaagctagccacgctgtgctcctcattgcctagctcaggaattcagggctgggaaaatttagccgagtcatcacatttggccactgcccggaaagaaaagcagccctcccgagtcaggaccgggctccggttcatcacgtggcagccgcctgcaggagccgcagatttttacagttcttctaatgcatttgggatgactgtttcaagttccatggaccaaagacagaggagaatcctgggccagcccctttccatccctacttcccagcccaagcagaaaaggacatcactgatatctttcttttccaaggtctcttggaaactgaggttccagaagcgggagcccctgaagaatgtgcttttcatcttggcagaaagagctcgggaccccaatgctaacaagcgtcacacggcaatgagaggcctgggaaccatggcccgtgaagcccctgacaaggtgagaaagcataagaaaattgtcctcgacctgctggtgtacggattgtatgaccctgtgagtttggaagtcatccatgagagtatgaagactctgaccgtcgttctgggcaagatccaggggaaaggtttgggttccttcttcatagacatcacacttcagaccaggactttattagatgatgagaacgacagtctgagatactcggcctttgttttgtttgggcaattggctgcctttgccgggaggaaatggaaaaaatttttcaccggtcaggttaagcagacacgagattccctcctgatccatttacaggacagaaacccccaggttgccaaggcttgcaaaacaacatttcgagcctgttctccatatctgaaactaaggaaggaatacagcttccagagcgaagaagatcaaaggaacattaagctctaccggcagctgagccattatcatccagagatcctgcagttcttctacgcaaataaaattctgtaagcgcagagcagcagggaaatggttctatgtgagggcattgctgagccatcgtgttcccctgttttatctcactggatgcctcttctccttgcctcttgggattgtaatggaaaagagggtgctgggagagcaatcaaaggcaaaaataatacatggaattgtatgatcatatctaaagtaaaattctagactgctttcacttatttcatttcttccccatacaaatttgatgagcaggtacacactttctttaaaacattccaagtgtatgtagattcagtgcttatttctcagctttttcttccttaggttcatctctgtcacctagcttttatttttaatactcaatttctgaggcttaggacaatacttgttaccttaaggtttttgttttttgtttttgttttttttttttctggtttttgtttttgtttttggtgtatttgctattgataccttttcttgccaagatttatttaaagttggccaagataccaagaaggtggcttgcaggggtatctttagcgtctcataattgtaaacagtcattgctttcaagatcatccgaaacaagaattaatagagagaaaaaaatatataaagcatgtgttgaaaatcctcacgctcatgataacttaagggataacaatagtaggtaacacttactgagtgcttacaatttagtggacgcggtccaagtgctttttgtaagttctatttaatacttgcgacaaccctatgagatagtaagtactactattgttctcattttatagatagaaagctaagacacagggaaattaggtaacttaccccagataactcagtgaacaatggagctggaattcaaatgcgtatggtctgatttcttgagcccatactcaataaccatgccatcctgcctgtccgtggaataactgatggatggttagaaatattaaaaacaaaacaaacgcaaaaaaaaaaaaaaaaaaaaaaaaaaaaaaaaaaaaaaaaaaaaaaa

SEQ ID NO: 217 - DNA, 714 bp, Macaca Fascicularis
  misc_feature (1)...(714): n = A,T,C or G
tgttggtcctgctttgtgggtgattgattgatacccgaggactgctccacctttaaattcctgcaatttatgctgcaacccagagtgtttgcccnnnnngggaagaggccaagtgggggagaatatacgttccagagcctgagattgcctggctggggtctaggctagcaggaacccagtctagatagagtgaagtgttctctaaagctatggatggtttcagtgaaatgtctgtgtctgacaatcgtcacgcaagagtactacttactgtcttcccttgtacatacattgtctgtgtttagcttttcctagtattgtgaggtttcaaataggggttccatgtaaatactctttctgctactgaaatgccgtccccctggagtatgcatcacccccacaaatggttttgcctttctctatgctaacactttttgagccactgacgtgcagattgatggttagtttcttgggcttttattttgcaattttatatatatacacatataatatatatatatttaagggttggttttgtatagttttctgtttgaatctctgagcaccaaagctgccctttgatttttcacgagaactnnnnnnnnnnnnnnnnnnagccctcctgctgctttggtgtctgacggtgatgctggggtggcatctctgcccgtgaatttctgtatgtgtgtgctgttacctcacctgcagatatgaccc

SEQ ID NO: 218 - DNA, 738 bp, Macaca Fascicularis
  misc_feature (1)...(738): n = A,T,C or G
cagtcagaangnnnnnnnngaagacccgcaagtatgatannnnnnnnnnnnnnnntgagcgagtggaaatggcgccgctaaatgaagaggatgatgaggatgaggactccacagtattcgacatcaaatacaggtaaaacctgtttcccagnnnnnnnnnnnnnnnnnnnnnnnnnnnnnnnnnnnnnnnnnggtgnnnnnnnnnnnnnnnnctctcacgtcagacgtgttgaaaccaaaatgaacgttatgtataaaaccccagctccattgtgggtgtcaggcgtctgctcagagtgtcactggcaagctcgtttccacatcaccacaacagagttgcttctgccaccctttgggcgcccctttaaagtgtcccccacttctactccccgtgtgagnnnnnnnnnnnnnnnnnnnnnnnnnnnngaggggtgggactggcaacagaacagccgtggctgctttatctctcctctccacggtgtactcaggcctgagtggtgactcacgggagcccagccacctcgcagctgttcgcccccnnnnnnnnnnnnnnnnnnnnnnnnnnnnnnnnnnnnnttnnnnnnnnnnnnnnnnnncctcatggnnnnnnnnnnnnnnnnngccttacgcggaaatnnnnnnnnnnnnnnnnnnnnnnnnnnnnnactggtcctggtagaagtggcagctgctgagagtgaccttccnnnnnnnnnnnnncacttcagcactaca

SEQ ID NO: 219 - DNA, 724 bp, Macaca Fascicularis
  misc_feature (1)...(724): n = A,T,C or G
tgccatagacatttggaacagaaggaagtgtctgcttctactatatgtgcaggacttgtccccaaataatttctgaatcccttaatgcagttgagaacagtaaaattcatgaccataccaaaaagcacttttaagttcacttatttttaaatattcttttagaatttattttttgaaagcatatgtaactagtgatgattttagcattagctttacttggaggagagaagtaacaaaattacatctgaaactctattagatagatacaaaatggatttgatgtattcttacttttccaaagaattttttccatctggaataagaagagaggattagttgaaacatctgagctggagaggcttatgggcaaaaggaagtgtgccaaactcttgcaatacacgctnnnnnnnnnnnnnnnnnnnnnnnnnnnnnnnnnnnnnnnnnnnnnnnnnnnnnnnnnnnnnnnnnnnnnnnnnnnnnnnnnnnnnnnntacattttttctattgttattggttttaaaattttgctaccctgaattctgaaatattataagagttaataccaaaaatactttnnnnnnnnnnnnnnnnnnnnnnnnnnnnnnnntctttttattcattgtaaataaaagtaaacttggataaatttgagaataaactttgagttgttgcaaacgtatgattatcaatttgtaaatttaccctttgacataataatgtacat

SEQ ID NO: 220 - DNA, 729 bp, Macaca Fascicularis
  misc_feature (1)...(729): n = A,T,C or G
agtgcgggggaagagccgacagctgatgaatgtggcttgcaaaggttaattaaaannnnnnnnnnnnnnnnnaaacacagggctttagtaatttagttatggaatatttaatatgccatattaatataaaaacacatttgtccgttaaaatatacttctatttagtatattcaatatacatattttattccattatggaataccttgcagaatgtttgatttgaaaagnnnnnnnnnnnnnnnnnnctttatagtagtctgtactgaatcctttaatcatctccctccatcttttttttttctttttctggtagaaacgattgaacaggagaagcnnnnnnnnnnnnnnnnnnnnnncgtgcgccgccaatatgcactgtacattccacaagcattgccttcttattttacttcttttagctgtttaactttgtaagatgcaaagaggttggatcaagtttaaatgactgtgctgcccctttcacatcaaagaactactgacaacgaaggccgcgcctnnnnnnnnnnnnnnnnnnnnnnnnnnnnnnnnnnggaaagaacttgcatgttggtgaaggaagaagtggggtggaagaagtgggggtgggacgacagtgaaatctagagtaaaaccaagctggcccaaggtgtcctgcaggctgtaatgcagtttaatcagagtgccatttttttttttgttcaaatgatcttaattatcggaatgcacaa

SEQ ID NO: 221 - DNA, 736 bp, Macaca Fascicularis
  misc_feature (1)...(736): n = A,T,C or G
tagttattttatatctgtactaagtnnnccaatttcctagtctttannnntctaaatctgtgagtggttgtttctactgattctcatcagtagcatggtggttctctgaacgtttggtaatgtctaattgtcagccgttatctgtgacaattctgaggtccaacttggagatgcttccctccagagactattccccatttacaggcgagaccaccttgggccccctcggtgacccttgagacccctggtttagcagcccctatgcnnnnnnnnnnnnnnnnnnnnnnnnnnnnnnnnnnnnnnnnnnnnnnnnntgtgtccagtgaattatcggctttcccagccacttcccttcatcatccgggcctccacattactctgtttgtttactgagagaaagtcttgctctgccgcccaggcagagtgcagtggtgagctcctagctccctgcagcctcgacctcctgggctcaagtgatcctcctgcctcagtctcccaagtagctgcgactacagagnnnnnnnnnnnnnnnnnnnnnnnnnnnnnnnnnnnnnnnnnnnnnnnnnnnnnnnnnnnnnnnnnnnnnnnnnnnnnnnnnnnnnnnnnnnnnnnnnnnnnnnnnnnnnnnnnnnnnnnnnnnnnnnnnnnnnnnnnnnnnnccgacctggccttatttatttttgctgtttaattttgggggannnnttggagatatttactttctnnaagcccagaa

SEQ ID NO: 222 - DNA, 758 bp, Macaca Fascicularis
  misc_feature (1)...(758): n = A,T,C or G
caggaggactgcnnnagccagggagcttgagacccagcctgaacaacatagtgagactccgtgtctagaaagaanntcaggaattagccaggcatggtggtgcacctctagtctcagctacttgggaggctgagaaaggaggatcgcttgagcccaggaagctgagggtgcggtcagccacaattgcgccactgtactctagcctaggcaatagagccagactctgtctcaaaaaataaacaaaaaacaaagacttcatggctgcatgtnnnnnnnnnnnnnnnnctcagtgatcctgccaagaacaccaaggacatccgcaaacacgcactcgcccccgctggcctagaggaaagcaaaccaaaccaagagccaaaaacaaacgaagccattcagccctgcaatgaatcaaagaaatgcaaattagaacacgacagcctatcacattggcaaaggggaaaaagaataaaaatacatagcgctggcagggatatgaggggacagacgccgcgctacgggtggggctgtaaaaaggcatcgcttctgggggcaattttccaatgagcgtcacaagtcacaaagatgtttgcctccctgaccctgcagttccctctccatgccggatctgtccttcagggtccggtgtggcacggcgacgagggctgcgtctgccggcaggacgggacgccactcgctccatctacctattcagtgtttctgttctttactatcattgagcgttgcttttgtgacttgta

SEQ ID NO: 223 - DNA, 2092 bp, Macaca Fascicularis
tatttcataaccctattgagtgttttttaactaaattaacatggctcgaatgaaccgcccagctcctgtggaagtcacatacaagaacatgagatttcttattacacacaatccaaccaatgcgaccttaaacaaatttatagaggaacttaagaagtatggagttaccacaatagtaagagtgtgtgaagcaacttacgacactactcttgtggagaaagaaggtatccatgttcttgattggccttttgatgatggcgcaccaccatccaaccagattgtcgatgactggttaagtcttgtaaaaattaagtttcgtgaagagcctggttgttgtattgctgttcattgcgttgcaggccttgggagagctccagtacttgttgccctagcattgattgaaggtggaatgaaatacgaagatgcagtacaattcataagacaaaagcggcgtggagcttttaacagcaagcaacttttgtatttggagaagtatcgtcctaaaatgcggctgcgtttcaaagattccaacggtcatagaaacaactgttgcattcaataaaattggggtgcctaatgctattggaagtggaacttgagatagggtctaatttgttatacatattagccaacatgttggcttagtaagtctaatgaagcttccataggagtattgaaaggcagttttaccaggccacaagctagacagatttggcaacctctgtatttgggttacagtcaacctatttggatacttggcaaaagattcttgctgtcagcgtataaaatgtgcttgtcatttgtatcaattgacctttcccaaaatcatggagtattgagttatgacttgtttaaatctattcccatgccagaatcttatcaatacataagaaatttaggaagattaggtgccaaaatacccagcacaatacttgtatatttttagtaccatacagaactaaaatcccaggaactatgaacactctagaccttatgtggtttattccttcactcatttcaaacattgaaagtagggcctacatggttatttgcctgctcactttatgtttacatctcccacattcataccggtatacatcaggtttgcttaaccattgatttttttttttttttaccaagtcttaacagtgattatttaatatgtttcttataaatctcgctttgtgctgttattaaaaaaacctccattttgaaaatctacattgtacagaagcacatgtctttaatgtcttcagacaaaaaagccttacattaatttaatgcttgcactctgaggtgcaacttaacagggagggcctgagaaaagaatgggagggggctattaattatttttagcaaaatgttgcctttgtcttgtgcagaacatgtagaatatgctctttaatttagtaaaatatttttttaaaaggtagagatgctttgttattgtaatcataaacttcctgaaattcttgtaattttttttccatacttatcagaagcgtgtttaccaacttatttttgtttgaaagtgtgattttttttttccttcccaacctctcttgcaaaaaaagaaatgggtttctgctaatgaattgagcagacatctaatattttatatgccttttgagctgtgtaacttaatatttggatacttgataatttgttttattatgtaattgataaaatggtgatgtgtattaatgttagttcaaccatatatttatactgtctggggatgtgtggttatagttctgtgggagaaataattttgtcagtgttcaccagcttgtaaaaacttagtgcgagagctgaaacatctaaataaataatgacatgcatttatcatcattgagattgttttgcttaaaattaacttattttgtagaaaacaaatgaattgcacttcacttaatgtgtgtcctcatctttttacaaataaatgaaggattataaatgatgtcagcattttagtaagcttttagacaaaatttgttagggtcattcatgaaaactgttttaatactaaaagcactttccattatatactttttaaaggtctagataattttgaaccaatttattattgtgt

SEQ ID NO: 224 - DNA, 735 bp, Macaca Fascicularis
  misc_feature (1)...(735): n = A,T,C or G
gactgagagaannnnctggtgagaagcttccccagactcagctccaaacgcctcccntnnnaggacatcttactgcccacaggttcctgttgctcctttgcagagtccttgattctccagagcagtcttcattcatggtcctgagcagaagccatggcatggggctctggggagtgactcatgacacctccctaggatgtgggaaacacgccaaatctaaagccatcaggacacctctcctccatcgtcttggactgtccataagccacaaactgcagttcagattctcaagagttattctgccttctggattcctgcctacccaattacccagccttgttgagattctctattgcctcctgaatacaaattaacactcatcctggttttaaggagaaaaaatgattctccttcctctttgtttaaacatatgatacactttggatatttttctcctacaaatctcgatgtgaaatttcatcccctatgtgggaggtggggtcaggtgggaggtgtttgggtcatggggatggattcatcatgaatgacttggtgctatcttggtctattagtacccacaagatctgactgtttaaaagtgcctagcagctccctcttctctctttctcttcctctctccccatgtnagccaacttcacttcactgtccactgtgagtagaagtactctgaggccctcctcagcagcagatgcaagtaccatgcttcttgtacag

SEQ ID NO: 225 - DNA, 714 bp, Macaca Fascicularis
  misc_feature (1)...(714): n = A,T,C or G
ctcgacatagctgaggaaataagcagtgaacttgaagataggtcaatagagactactcaaactgaagcagaaagagaaaagagtgaaacaaacaaacaaaaatcagaacaaatatccaagcgctaacatatnnnnnnnnnnnnnnncagaaggagaagaaacagagacaaaaaatatatgtagatataatatttatttgtagatataatagctaataattttccaaaaataatgaaagatatcaaaccacagaaccaagaaactcacagaatccagaaaagattaaatgccaatatacaaacacaacaaagaagcacatgcaaacacaacctaatgtatcannnnnnnnnnnnnnnnnaccgaagataaagagaaaatattgaaggcatctaaaggaaaaagacacactccctacagaggaacaaagataagaaacacagaatacttctcatcagaaattgtatgaccagaagataatagagtcatatctttaaaatgctgaaagacaaaaaactgccaatccagaattctatacctagcaaaaacatctttcaaacatgaaggaaatatactttttcagattaaaaaaaacaaaaacaaaaacagagaaaattcattaccagtggaccagcagtataagaaatggcagtggaagttctgtaagcannnnnnnnnnnnnnnnnnnnnnnnnnnnnnnnnnnnataaagaaatga

SEQ ID NO: 226 - DNA, 694 bp, Macaca Fascicularis
  misc_feature (1)...(694): n = A,T,C or G
gccagagtcaganctgaggaggaagaggagccactgatggagatgcggctccgggatgcgcctcaccacttctatgcagcactgctgcagctgggcctcaagtnnnnnnnnnnnnnnnnnnnnnnnnnnnnnnnnnnnnnnnnnnnnnnnnnnnnnnnnnnnnnnnnnnnnnnnnnnnnnnnnnnnnnnnnncctaagttcatttttgaggctgtgggcttcattgtgagcagcgtgggacttctcctgggcatagctttggtgatgagagtggatggtgctgtgagctcctggttcaggcagctatttctggcccagcagaggtagcctaggctgtggttactggcacatggctacagagagnnnnnnnnnnnnnngtagcctggcnnnnnnnnnnnnnnnnnnnnnnnnnngacaggctcagccatacctcttnnnnnnnnnnnnccagccaggggctgctgacttctaggacttcattattctataattcaggaccacagtggagtatgatccctaactcctgatttggatgcatctgagggacaaggcgggtggtctctaaaagtggaataaaataggctgggcgtgnnnnnnnnnnnnnnnnnnnnnnnnnnnnnnnnnnnnnnnnnnnnnnnnnnnnnnnnnnnnnnnnnnnnnnnnnnnagcctgtggaacatagcaagaccccgtc

SEQ ID NO: 227 - DNA, 695 bp, Macaca Fascicularis
  misc_feature (1)...(695): n = A,T,C or G
aaaagaagtgttacatntgaaattgaaattatagtcagtgtacatatagttaaatgaacatttaagaaataattgttgactagattttnnnnnnnnnnngaaaggcagaaacttatgtatcactacatacatacattctggatcaaggaaagggagaaactacttatcannnnnnnnnnnnnnnnnnnnnnnnnnnnnnnnnnnntgtgagagatagtgtacttttgataaaattaccttactatagttttacgtctacagtttagctccagaccaatgcaaatatcacaaagctttagcccaactcctcatgggacagtggtcttcagctccacatactgttttgcatcatgtttaaagaaattagaagactccaaacatcaagtcactaaatgattacaaataccagaaaggaaggagaagcacgaaagggaacaggaaaagggactccagattttgcctttttcttcaggaaagatcacgctccctagaaacttccacctacatgttgaccagaaccgtgtcacaagatgatccctagcagcaaggaagtttaaaacacaagtctttttggttgggctcattggcaaacaaaattgaggttctgttgttaagaatgaagggaaaaccatggatataaggtagacaaatagcaatgtctgcatcatataccagtaggcaaaattctctcatgc

SEQ ID NO: 228 - DNA, 2095 bp, Macaca Fascicularis
gagaagttctggcgaggaaccttcaaagcggtggccaccccccgtcccgagagcatcattgtcgccagtatcacggcccgcaagccgctgccaaggacagagccccagaatagccccgttgtcccagctcgggatggaccctcagaaaagctgggtcagcatctggccactgaccccttgggcaccaacagctgggagagagacaaggcctgtcgggaactgggtgccgccagaggacacagtgcctctcatgacaaagacttgacgccaccaccttcctccaggggaaagaagaaaaagaagaaatccactcggaagaagagaaggaggtcctcatcctatagcccatcgcctgtcaagaaaaagaagaagaaaagttccaagaaacataagcgacgcaggtctttctccaagaagagaaggcacagctcctctagtccaaaaagcaaaagaagagatgagaagaggcacaagaaacaatctcgaagccggccccgaaagtctcaccgccaccgccaccaccgctgcccctcgcggtcccagagctcggagtcccgcccctcaagctgtgagagcaggcaccgcggccggtcccctgaggaagggcagaagtcccgccgaaggcactcccgccgctgctccaagaccctctgcaaggacagccctgaggcccagtccagtcgcccgcccaatcaacccctccagatgcttggctacctgtcagccaggggtgtaatcactgggtcggggtctgctgctgacctctttaccaaaacagccagcccgctcaccacctcgcgaggacgttcccaggagtacgactcaggcaatgacacgtcctcaccaccctccacgcaaaccagctcagcccggtctcggggccaggagaaggggagccccagcgggggtttgagcaagagccgggagctcaacagtggcaacacctctgattcagggaactccttcaccacctcctcaccccagaacaagggggccatgttggagaatctctccccaaccagcaggggcagagagtcaaggggatttcagtcaccgtgtctggaatgtgccgaagtgaagaagtccagtttggtcccatccacagcccggggttcacccatgaaagggtgctcccgcagctcctcctatgccagcacccgatcctccagtcactcatcccgatccccaaatcccagggcttcccccaggtatactcaaagccgatccacctcttctgaaaaaaggtcctactcccgttctcccagctattcctccaagtctggcaagaggagcccgcccagcagaagctctcggtcccgccgcagccccagctactcccgctacagccccagcagggagcgggatcccaaatacagtgagaaggactcgcagcagcgggagcgcgagcgagcgcgtcggagacgtcggtcctactcgcccatgaggaagcgccggagagactctccgagccacctggaggcccggaggataaccagtgcccggaaacgccccatcccctactatcggcccagcccctcttcgtccggcagcctcagcagcacctcctcctggtacagcagcagcagtagccgctcggccagccgcagctactcccggagccggagcggagtcggagccggagccggagtcggagccggacccggagccggacccggagccggacccgcacaagcagcagctctagctcccgcagccctagcctgggctcccgcagccggagccggaaccggagcaggagccggagccggagccggagccggagctacagctcagcagacagctactccagcacgaggcgctaagtgcccctgagccagctgcccttgggggccccttcgcgctgccagcctcccccaaccacctgccctcaactgccttctccttggtgacagatagtgagggctcctataccttgtccttcctgcttgcctaggggaagaggagaagagggtacgggggcttcactctctagatcaacctgctaggagcctctaccagcaccaccctggggcccagctcaggcctgggcatatggagagaaccatcatcttgtggcacaaaaaaaaaaaaaaaa

SEQ ID NO: 229 - DNA, 2001 bp, Macaca Fascicularis
  misc_feature (1)...(2001): n = A,T,C or G
ttgacagcctgcttgctttcaattttgtcttgtacaaactctaaaatatattattttcattttacagatgaaacaggccaagagaggctaaccatgagactacatggcctctaagtggtacagtcagcattataatactcttctgatcagttttctactctttctactacaccactttaccagagcttttaattatttatgcttgcccaacctggaatgccgaaaccgaaaaccccaactcagcaaggcatgagtgaaggccaccccatacgtgtcaacttgagtggacatgtcttcctctcattgttttcttctgaccttgtctttgcacttgattcggggacaagtggttttcctctaggccagtggttttaaacttcttttctcatttagtctgataatattttatcttgacaacaaatacacatacaaacaaatacacagaaggctatttgaaaatcatagctctaggcattggttcctcaccctggcagttctcctgatgtagctgaaggcttttatgggaaggatatagactctttttcataacagcaggtggtatgactggggctatagatgatacatgtattttttaatatgattaaaacacatttccaatcatattaaaataatatatagatgccctagtcaaaccacctgattcaaaacattcattgaatatctgttagacagtcgtgatgatcaacctcattggagaataacaatgataactactactactgagtatttctgtgtgccagtttctattaagtgcacttcatgaattatctcatctaatcctcacaatacagaattaaccagttagaagaaccacaattcaaacccagataatctatctccagatccaaagcccttaacttatatgatgtagggttctgtcctaacttctctcttctgccctcaatcagataggtgcttcctggttctgaaatgggggatatctgttgccaagatacagattcctataaagtagcctattaaaaagtaggttatttttaaatgataatacatatttataccagaagtaaattaccagataagaatatgaaatgaatatgctctgtccaccctgttattcacaagaaatgttctcaagtacaacagtaagaatttccaaaccagatttaacatttcacagagttaaacacactgtgtgaggactcattacagtttcctctaatacctgttggggtcgtctgtcaaacatttcctgacactgtgttagtgaaaaagtccaaagctatctcatactatggtgaattaaaaacaaaaatagttaaatgagtcatacttttaagtgttctggacaatgtacaatatcaataccaaatcatattttaatttttattagcaataggcatttatttttttagctgacttgccaatttccatgatccttaaaaacaaacaaaatcttactttttagttgctgctttttctcctctcagcaactttataggtggcagtgaggacatggatttggaagtcacctgacttgaggtcagagcttggctctgccagtaaccagctgtgtaaccttgggtaagtctatgatatgccctgagtctcagtttctgtctctgtgtcactgagactgttagtgcccacctcataaggtcatggtgaagacagcatgagataagctgagtgggaccagcagcccagtgtccactcctgttaagaactaagtgctcgcttgttcctttcctatcttcagagctttgattctaactagaagggtatcttctttgaatttggtctgacaaaattctggtctttggaagagaatgtgttgttcctcatctaagctttgctaatgaaatagtaggcaggctgggcatgnnnnnnnnnnnnnnnnnnnnnnnnnnnnnnnnnnnnnnnnnnnnnnnnnnnnnnnnnnnnnnnnnnnnnnnnnnnnnnnnnnnnnnnnnnnnnnnnnnnnnnnnnnnnnnnnnnnnnnnnnnnnnaaaaaaaaaaaaa

SEQ ID NO: 230 - DNA, 849 bp, Macaca Fascicularis
  misc_feature (1)...(849): n = A,T,C or G
gagacacccggtngnnnctcnnnnnnnnnnnnnnnnnnnnnnnnnnnnnnnnnnnnnnnnnnnnnnnnnnnnnnnnncgattggaggggctcccagcccggcagccctcgccacctccctctaccacagcctcacaccttcagaacggccacccctgcctgcccccgcccagcctgcttcttgtccagcattgatccttctgtttcaacaactcctccactgggcagagctgggcatctggcggggctggctctgtcccctgcgcctttggctccagtggtccctgtgcctggcagtccagctcttggaacctcgctgaatggcagcctcttgggggcctggagctctggcagcccagccgtgtgtcgtgtcgggttcctctccccaccccagcttcaggcagaatcctcggggtgggggagctacaaagcacaacaatgtacatagtgtagaaacactaacagctgggaaaggggagccagctgtccagccagcatgttcctgttgtacagcccggtctccctgtgcactctgctccttcccatgtgcagacagatcagggaggaaccnnnnnnnnnnnnnnnnnnnnnnnnnntggcccggccaaggggggtgggtgggctctcagattcagctctgtnnnnnnnnnnnnnnnnnnnctgcgctcccaagttccccgtttctgtgaaagtgaagaattagtacagctgtgttttttaaagccacctctccgtctccaccccatggttccacacccaggtggggaggaggaagccactgcatctgttggctcagggccccagcctgtgcgagcagggcgcccgggctgttgtgtctcctgtctgtgcc

SEQ ID NO: 231 - DNA, 750 bp, Macaca Fascicularis
  misc_feature (1)...(750): n = A,T,C or G
cgccgaacgnnnnnnnnnnnnnnnnnnnccaagcagctgacaagcagcnnnnnnnnnnnnnnnnntgggccaagcggatcccacacttctcagagctgccccnnnnnnnnnnnnnnntcctgttgcgggcaggctggaatgaactgctcatcgcctccttctcccaccgctccatcgccgtgaaggacgggatcctcctggccaccggactgcacgtccaccggaacagcgcccacagcgcaggggtgggcgnnnnnnnnnnnnnnnnnnnnacagagctcgtgtccaagatgcgggacatgcagatggacaagacggagctgggctgcctgcgcgccatcgtcctcttcaaccccgactccaaggggctctcgaacccggccgaggtggaggcgctgagggagaaggtctacgcgtccctggaggcctactgcaagcacaagtacccagagcagcccggaagnnnnnnnnnnnnnnnnnnnnnnnnnnnnnnnnnnnnnnnnnnnnnnnnnnnnnnnnnnnnnnnnnnnntnnnnnnnnnnnnnnnnnnnnnnnnncccattgacaccttnnnnnnnnnnnnnnnnnnngcgccgcaccaaatgacttaggcccgcgggcccatcctttgcgcccacccggtctggccaccctgcctggacgccagctgctcttctcagcctgagtcctgtccctgcccttctctgcctggcctgtttggactttggggcacagcctgtcactgctctg

SEQ ID NO: 232 - DNA, 1612 bp, Macaca Fascicularis
cccgctcgccctgaccaggttctcacagtgtctcaggccactgcgccaccgcgctggtgctcagcagaagtggggtctgctttcaggacttcatttaccccactcgttctggtcccacatgctccatgtctgccctttggtctgagttaaaactgcgatgctgagaagtgtgagctctttccacgaggaggaaccagacagggtggcctccgagggtgagccgctctgctaagcaaggacggccgctgcgcagcagcccacaggcccagcctcccctgggtgctctgtgaggagaatgtccttggatcccgagaactgcggccgctgccgtccacagcgcctcatcctctcttcctttgtggaagtggggcaggcagggctgtggcagacgggcctggcatagcccaggttccaggtgtcctggccagcctgactgggttcctgagtagactcaatgaaaacacctgagaaaaaacgtaaactaaggaagcgtttttccacttaatccaacccaggtttctattcatcttaaaggatttaattggcatttgtgagaaataatagcacctgtgtcactgagttgatttgggacacagatggttgactttcccagacagcaacttagcggaaagcagcatcccgaagacggtgtcacacgttccgagcctgcttgtcacctgggcctcatggtttcttgtcagccccgtcactgatgggaagcagcactgacgtgtgagggcaggaaggacaccgctggagtcaggtgctcccctacctgtgacccttttccaacaagctgacgctgagccagcggcccgctctgccccgcatcctcctcccaacggtccaaaccactaccagacaggagccgcttccacacacgtgtctgagcgtctgccctagatgtctgtgcgtttctgtgaagcgctgtgccgtaaggactggactctgacgagcaagctgcctcccactcccaaacactgaccccgctcaggagactcaccctgggtgtagacggcgtctttgtagagggagatagaggcttctaaccccactcaggagactcaccctgggtgtagacggcgtctttatatagagggagatagaggcttctaaccccactcaggagactgacactgcgtgtagactgcgtctatagagggagatagaggcttctgatgacaccagagctgcaagtgtcgtgactggagctgggcgcccagcccttctgaagctgttctgtttctgtggctctgacatatttccgtagcatcccccttcatctcatctcaacgtaatgaaactaatgaaatcgctgcaaagctttgcctttgagaggccagcagcctcgcagaatgtctctgcaagtccaaaggcgcctgtgggtcgatatgcctttaagtccagcaggtgcgtgtggccaggccagcctatgcgcgtggccaggccagcctatgcgtgtgaccaggccagcctatgcgtgtggcctttgccttcttccctttcttcctgttttctgtttttttaatttggggattgagaaagctgtatgattttgttaaaggagaaataaaccattttttaaagttgtaaaaaaaaaaaaaaaaaaaaa

SEQ ID NO: 233 - DNA, 575 bp, Macaca Fascicularis
ggcggcgggcgagtcgactgtccttgcgcgtggatccgagcgaccatggtggcccgggtgtggtcgctgatgaggttcctcatcaagggaagtgtggctgggggtgccgtctacctggtgtacgaccaggagctgctggggcccagcgacaagagccaggcagccctacagaaggctggagaggtggttccccccgccgtgtaccagtttagccagtacgtgtgtcagcagacgggcctgcagataccccagctcccagcccctccaaagatttactttcccatccgtgactcctggaatgcaggcatcatgacggtgatgtcagctctgtcggtggccccctccaaggcccgcgagtactccaaggagggctgggagtatgtgaaggcacgcaccaagtagcgagtcagcaggggccgcctgcccgggccagaatgggcagggctgccactgacctgaagactccagactgggaccccactgcaagggcagctcccggccttgccggcccaataaaggacttcagaagtgtaaaaaaaataaaaataaaaataaaaaaataaaaaaataaacta

SEQ ID NO: 234 - DNA, 434 bp, Macaca Fascicularis
  misc_feature (1)...(434): n = A,T,C or G
gcaggcaagcagctgnnnnnnnnnnnnnnnnnnnnnnnnnnnnnnnnnnnnnnnnnnnnnnnnnnnnnnnnnnnnnnnnnnnnnnnnnnnnnnnnnnnnnnnnnnnnnnnnnnnnnnnnnnnnnnnnnnnnnnnnnnnnnnnnnnnnnnnnnnnnnnnnnnnnnnnnnnnnnnnnnnnnnnnnnnnnnnnnnnnnnnnnnnnnnnnnnnnnnnnnnnnnnnnnnnnnnnnnnnnnnnnnnnnnnnnnnnnnnnnnnnnnnnnnnnnnnnnnnnnnnnnnnnnnnnnnnnnnnnnnnnctggtcctgcgcctgaggggtggctgttaattcttaagtcttgcgtttgcagtgcccagtgatggcattactctgcactatagccatttgccccaacttaagtttagaaattacaagtttcagtaatagctgaacct

SEQ ID NO: 235 - DNA, 659 bp, Macaca Fascicularis
  misc_feature (1)...(659): n = A,T,C or G
tgcatttgcgttcnnnttctctantttttctctttcatgttnaacaaaaaggaaaaaagaaaaaaaaaaatcccatccctnntgtacatatgcctgtaaattgttttaaatacttgagcctttttctcggtggggggtggggaggggggtgagaagacaagatgaagaaaagccttacannnnnnnnnnnnnnnnngttggattggatgcttacagggtttttcttgtaacatttatnnnnnnnnnnnnnnnnnnnnnntaacaacaaaaaaataataatggagtagctgttgcccttctccggttgtgtgtacagtatgtgtggaataaaaaagggaaactgttttcacaagctgttctttgtttcataattggattcatcaatcccgtagctacccatattgcactgannnnnnnnnnnnnnnnnnnnnnnnnngtcatatgatccactttgttggttgttgttgcagaagactgaactgttttggaatatttaacaattacagaaacagagtcaagtgttttccaatgtggttgtccggtttctatggccttgctgtgtactttccctctttttgacagtaaacttcnnnnnnnnnnnnnnnnnnnnnnnnnnnnnnnnnttagcgctgctatgcacccctcccttgggacgggag

SEQ ID NO: 236 - DNA, 1739 bp, Macaca Fascicularis
ctgagtggcactgcacagggatggggaaaaaaggttggctggcatcacaggtgctagaagatgcccctggcttccctctcccaaaagatgagagcccccaatggtggtagagagtttattctgttcaaggcgtattcttaccttttacttcattagatcttctcaacaacccaggaggtcattaggggccattaactccattttatgggtgaggtgacaagtccctggaggagaggggtcttgttcagagtctcattgtcagctattgatggaaccaggactgggatccaagccttcacaatacagttttttagcccataagtaatacagacaggttgtcagatcccttgaagtctccttagacaggaaatggaagatgatttatcctggaggtcttggtcacttctctgcatggagatactgtctcccatggctgaaggcttattccacaaagccatcatggagagtggggtggccatcatcccttacctgaaagcctatgattatgagaagagtgaggacctgcaggtggttgcacatttttgtgggaacaatgcgtcagactctgaggacctgctgaggtgcctgaggacaaaatcctccaaggagctgctgaccctcagccagaaagcaaagtctttcactcgagtggttgatggtgctttctttcctaatgagcctctaggtctattgtctcagaaagcatttaaagcaattccttccatcatcggagtcaataaccatgagtgtggcttcctgctgcctatggaggctcctgagatcctcagtggctccaacaagtcccttgccctccatctgatacaaaacatcctgcacatcccgcctcagtatttgcaccttgtggctaatgaatacttccatgacaagcactccctgactgaaatccgagacggtcttctggacttgcttggagatgtgttctttgtggttcctgcactgatcacagctcgatatcaccgagatgctggtgcacctgtctacttctatgagtttcggcaccggccccagtgctttgaagacacgaagccagcttttgtcaaagccgaccacgctgatgaagtccgctttgtgttcggtggtgccttcctgaagggtgacattgttatgttcgaaggagccacggaggaggagaagttgctgagccggaagatgatgaaatactgggctacctttgctcgaactgggaatcccaatggggacgacctgcctctgtggccagcctataatctgaccgagcagtacctgcagctggacttgaacatgagcctcggacagagactcaaagaaccgcgggtggagttttggaccagcaccatccccctgatcctgtctgcctccgacacgctccatagtcctctttccttcttaattttcctctctctcctccagcctttctttttctcttgtgttccttgggaagttatctttccgtgattttggtttcccttctcctcctacaatttttccccgcaatcattagcttctttccaagttcagctgctttctatggggatctttgcagaacaagctgcttttgctgatattttacggacttaggaatgatccttatggaattcttttcaacatcaaaaagtgcaatttgtcttggaaggcaacacgatttcttcaataaatttggaaaagaactgaaaaaaaaaaaaaaaaaaaaaaaaaaaaaaaaaaaaaaaaaaaaaaaaaaaaaaaaaaaaaaaaaaaaa

SEQ ID NO: 237 - DNA, 674 bp, Macaca Fascicularis
  misc_feature (1)...(674): n = A,T,C or G
ttcccttatgggctcccatgcacttgtccaggcggcctctttggggcagggatggtttgaggaatcacttttaaagaaaaaaggaagacattgaaaggttttagtttcttccctatctgcatgtcctgtcatatagaaagcccagaattaggggctagaactccaggagagggtctccccgactcatctcttgctgacagtcaccaggatgcagaaatagggagacggttagtgggggccaaagatgccccctcccaggccttcggggttccctcctccgccccctgcagtctttggaggagtcagtgtctcactccagcagtgagtgtctactgtatgcaggtagtcagccaggcaaagggggacgggcggtctcacgggggaaccctcttgcaggaggccaggtagcgggagcgaagtgtccggccgcccttgctgctgggggagtggagagggagacttcttttcgttggttttaatttaaaaacacaaaggcctaaagaaatacgtatcttataatttttttaatttttgagaagttcatttaatgaattgtgcacgaatgaattctatatatataaaatatacatatatagctctatatttggggaggggcactgtttcttttttctctctcatttttaaaatgaagtnnnnnngcctttgtatgtggt

SEQ ID NO: 238 - DNA, 926 bp, Macaca Fascicularis
  misc_feature (1)...(926): n = A,T,C or G
atcaataaattataccaaatatatgtttacagtatgatttaaagtctgattcagaccagggactctattttaagttcaactgaagtaacactgggttttaattatatcacaggaaaaaaaaaagtgcatttaagtattgttatcgtggactttataaaagcaaaggaaattgaaaataacttttgattctgtatcaagaatcatattttcatacagtcataactgtctttctgtgaccctttcacagggcactgtaggatggatnnnnnnnnncaatttnnnnntaactgcagatgtntctactttgttctaaaatctaagtcatgaggtgatttgatttactttatagaagctggattttgaagatataatgaaaaattttttgataatatagtagtacaaaaaaagcaccagcaannnnnnnnnnnnnnnttttgtgcactacccaactggttacagccaatgtgatcttttaaggtgaaactcctaagaaataggtggttttgctggaaacttggtagacccttaattatagtggcgataacgagcactacaaaaaaaaaaaaaaaccattattttttatcaaacatctgaatacattttacaaaggctattgtgagggcattattttgagcatctattttgaggtgatgtttaaaaaaaactttaccatcaaattgtaaattaatttaaatatattgccctaaggannnnctaaagannnnnnnnnnngaccttaagtgatagttgcaatatccttgtctaaaaaaaaaaaaaaaaagttgacttaaacattttctttaacagttgtcttttttttgtaaattcagtctttctcttgcttttttccccnnnntattgaggaagtattttgccttccctactcactgagcaagtattgacttcgtggtacacattgtaaagca

SEQ ID NO: 239 - DNA, 730 bp, Macaca Fascicularis
  misc_feature (1)...(730): n = A,T,C or G
ctgggcatggtggctcatgnctnnntcccagcacttccagaggccgagatgggtgnnnnnnnnnnnnnnnggagtttgnnnnnnnnnnnnnnnnnnnnnnnnnnnnnnnnnnnnnnnnnnnnnnnnnnnnnnnnnnnnnnnnnnnnnnnnnnnnnnnnnnnnnnnnnnnnnnnnnnnnnnnnnnnnnnnnnnnnnnnnnnnnnnnnnnnnnnnnnnnnnnnnnnnnnnnnnnnnnnnnnnnnnnnnnnnnnnnnnnnnnnnnnnncgagaccctgtctcaaaaaaaaaaacaaaaaaacaaaaaaaaactggagaacaggcagtgacgtctgttgggggagctttctggaagggctggcttggaggttggaatggggactcccagggagacctgcctcctatccctgcctgcctcacccctgccacagactctgctcaccactggatggtgnnnnnnnnnnnnnnnnagtccctgtgcttgtcagagtcattatgattaatatcaactatgatnnnnnnnnnnnnnnnnnnnnnnnnnnnnnnnnnnnnntgttaacgatgacgatgatgatgattctnnnnnnnnnnnnnnnnnnncctcttggaggggaggcagctaggaggcccagcaggggggcttctaggctgctgggctcccctagggnnnnnnnnnnnnnnnnnnnnnnnnnnnnnnnnngctgtggcctcacccctgggccccccaattttg

SEQ ID NO: 240 - DNA, 1949 bp, Macaca Fascicularis
tctttagatgggggctgtgggatccagggtgactagaagaaagctaagtaaatggcaaaaaaaaaaaaaaaaaaaaaaaaaaaaatcccacaaatttttaaatgataataacaatagaaagtcatataaatgccattacaattatactttgtgtctctgacaatcaaaatagatttttttgaaaatgactttgctttagaatttttaaaggtaagacagtgtgcatctcaagttaccattttaatcactctcagtgagtcattcagccagtatgtgcatctctgacgcactttttgaaaacttgttcatcatttgtatctcgtttcctcccactaccaccaagctccaccatggctcctgttgactatgaaacacgtgcctgtgtcatgtttagtgggtgtctgttgaatggatggatggatgtggttagtgcagagcagtttgtgaggaatggaaagaatagatggaaagagacttaagattcaggaagtagttcagaaaataggagaaagaacagtcctcatgctgggttctttgaagcattactttagagttgttggtattgactcttgtcaacaaacaggtttttaaattttagcctgtaaacctggggtcattcattctatgctaaatgcaattcgtaggatcagtcactgaatgaataacacaaaatagaaggtgaagtgatagtgtccacatcttcctttctcttcattactttctttgctcacttgctttttctccagtccccaagctttcaaaatgatttcttccctcagccactttgaactggccacttcctcttttttcaccggcattctgcctccttctgaggtgtcagaaccacacaggtaagcaagagagacagagtccatcagtgatgagccaccatgtatgtgaattggctgaatacctgaggcacagtgaggtgaactcattttggaaacacctgtgctattgcatccagcgaggaaccaaccagcagcagcaaacacctctcactactgcatggcatgcacacacttggtacatgcacccaacacagcctcctcagggaacagagagaatgaggcttttcaggctccatttgtttaagtgaacatttattattcttagctgacagttgcttaaccgcagatttctaacaacgcaacttggataaccttcctgatttcttttttctgttcagcaaaacagaatgcatccatttagagatgacagacgaagtaaatcaattgaagagagagaagaggaatatcagagagtgagggagagaatatttgcacacgatgtgagtagttgttttaattgcctcttcagtgcactccttccatcagcagtaaggcttcctcattccccagacagcgaggtggcaggaataaaaagcctggagccaaagaacaaatcaaaccgaagaaaactagaggtgattttggagaaggatctggttcagggaagtgatagaaacctagccaagggtttgggcatgttcttaggatatgactggtggggacacatagagaggtatgattttggtcagtgatacagaccttaagtacagagagcggttgtcagatttgaagaaatgccttcacctccacattagccaacagattacctacctagggttgttttctttttaataacaaccttgtacaggggaaagaattacaaagaagaaagaatctgtttatctcacacacacatccatatacaatgagtgttttctgggttcttagcaaatacggacatttcattacactaaagttagattgtttctcctcaattccaaatcagatctgtgatcagtttgtcaagggaataatcataaaacaaatcccaacaacaacaaaaaaggttggaattttttatctttacccgctatggtcaagataaaatgcaattaatgaaacattgaaaggttaaaaaaaaaaaaaaaaaaggccaca

SEQ ID NO: 241 - DNA, 2320 bp, Macaca Fascicularis
  misc_feature (1)...(2320): n = A,T,C or G
agagaaattcagtttatactttgtcatcagtgacagttcaggagatacatatacaaaaatggaatgaagtgctcatttttaagaatcttaatctcatcaaaaccaagtttatttccaacatatggggtgccatacagatcatataatatttaagttacccatggtattatttgaatgtctatttaaatagaaactgaaaagaaattatttaggattatgaatcctaaaataataggctaaggaaacagaaccaacatttagcaaaacccactattacatgtcagatgtgtatatacgttatttcttttactactcagcataactctatgacgtttcttatccattgtgagtatcatatccatatgtgagcacatcttggagaataatttgcttaagattcaagcaggtaggaaatgacggatacatgtagacctgaggcttgcctgcctgcaaatcctgttctcttgtgaacctaccatgtttgaattagattggagtctatggtcagtgtaggcttgggatgaacctcttcatacaactccccttaaaaactctgaactactgagtttattgctttgaaaagttttgactagttgagccgaaagtttagtagaagcaaaaactttttaaagtccaagctcagtatcagaaatggtgtgaaaatattgctgcttggcgagaatagcaagagaatccaaatttgaggggtgaaaaggcaccattcactcttcccagggtgggaaaactggcacacaacttctgtctgaaaagagtctatcaaaaggagtcctctcaattgaaactcactttttaatttttaacaataataattttaaaacaaagatactatttttcttcaccatccccacagaacctgactttcaaattgatctcaggtaaagggaacaacactagttgaggatgaatattttaggcagcctgcaggagcgactgcaaagggaaccaagtataagtttaatttagttgtagtgaaaccacagaggtaaatgagaacccaaatggggatcttaatgatgattcaggtatacaagcaggaagagccaggggtctcactgtgaagccccaaatgggaaggaaaacagaaagggtgggagggcaggaaagaaggaatggaaggaggaagggatgcaggattggcaggaaaggaggatgtggagttattctctaacgggggcaggttctgtttggaatgaggagacgttctggagatggagggtggtgatggtggcacaaccaggtgaatggagttaatgccactgaactgtatgcttgaaaatggtgaaaattgtgagttttatgctatgtctattttaccacaattttaaaaaatagacaaaatatctgagtggtcatttctacaaagaagggattaaggattgacaaggataatgtctgattggacctaggttttcatttaataaaatcttatagtataaaatggttctttttgcattaaaaattctttacggttgccacgtttccctttaagaattctgttttcataaggcaaggaatggagtgcaaaggtgtcttctttctaaatgaaaccatgtctgtggcagcatagctttatatcttctctcaacaaatgtatgctaagaacccaccttgaactggacatgannnnnnnnnnnnnnnnnnnnnnnnnnnnnnnnnnnnnnnnnnnnnnnnnnnnnnnnnnnnnnnnnnnnnnnnnnnnnnnnnnnnnnnnnnnnnnnnnnnnnnnnnnnnnnnnnnnnnnnnnnnnnnnnnnnnnnnnnnnnnnnnnnnnnnnnnnnnnnnnnnnnnnnnnnnnnnnnnnnnnnnnnnnnnnnnnnnnnnnnnnnnnnnnnnnnnnnnnnnnnnnnnnnnnnnnnnnnnnnnnnnnnnnnnnnnnnnnnnnnnnnntggcaaaaaacaacaacaacaacaacaacaaaaaaaaaaacacccaccttgagccatgtacagttcagaattgtgggaatacagcaatgaaaacagcagttcctgctttcgtgggtcttacatggtgagggggacaggcgatacacaaatgtataagtaattacagtcagagttcttatcatatgagaagggtcatatcagaaagtaaatggtgatgctgaaagaatgggcctcaccaccgagctttaatgggggatggttagtaataaagaaatagaagaggccnnnnnnnnnnnnnnnnnnnnnnnnnnnnnnnnnnnnnnnnnnnnnnnnnnnnnnnnncacaaggtcaggagatcgagaccacagtgaaaccccgtctctactaaaaatacaaaaaaaaaaaaaaaaa

SEQ ID NO: 242 - DNA, 691 bp, Macaca Fascicularis
  misc_feature (1)...(691): n = A,T,C or G
aaccagggcnnnnnnnnnnnnncnnnnnnnnnnnnnnnnnnnnnnnnnnncatctatgatgagtttnnnnnnnnnnnnnnnnnnnnnnnnnnnnnncgggtggtcgggaacccctttgacagcaagaccgagcagggnnnnnnnnnnnnnnnnnntcagtttaagaagatcctcnnnnnnnnnnnnnnnnnnnnnnnnnnnnnnnnnnnnnnnnnnnnnnnnnngggcannnnnnnnnnnnnnnnnnnnnnnnnnnnnnnnnnnnnnnnnnnnnnnnnnnnnnnnnnnnnnnnnnnnnnnnnnnnnnnnnnnnnnnnnnnnnnnnnnnnnnnnnnnnnnnnnnnnnnnnnnnnnnnnnnnnnnnnnnnnnnnnnnnnnnnnnnnnnnnnnnnnnnnnnnnnnnnnnnnnnnnnnnnnnnnnnnnnnnnnnnnnnnnnnnnnnnnnnnnnnnnnnnnnnnnnnnnnnnnnnnnnnnnnnnnnnnnnnnnnnnnnnnnnnnnnnnnnnnnnnnnnnnnnnnnnnnnnnnnnnnnnnnnnnnnnnnnnnnnnnnnnnnnnnnnnnnnnnnnnnnnnnnnnnnnnnnnnnnnnntcaaagtgcctcagaagaactcataagaaccatgtgggctttctccctcagccattgatgnnnnnnnnnnnnnnnncagcgacaaaaccaagaaaaatgat

SEQ ID NO: 243 - DNA, 727 bp, Macaca Fascicularis
  misc_feature (1)...(727): n = A,T,C or G
atttcattaatattngnttccagatatcttgtnnnttcattgcgattttttcntagactcagattatttagaaagcaatatatttaaaatttttagtatgtatgggagttattgatttcaaacttaattatgttgtagctagaaaatgcagtgtgtaaaatactagtcgtttaaattttgctgaagtctgtttcatgacctagaaagtgttcatttttccttaatgctctgtgtagcttaaaaagcttgtgttttctgtgtttggaatctatttcggtccctttgatcaggtttactggtagagttggtcaaattttatgtaacctttagttagctagatttatcaattacagagagatacatcaaaatcccccactgcaaaaatggatttgctcatttctccctagagttttatcagttttgctttattattttgaagctatattataagcttaaaaaattagagttattgggtgggcgtggtggcttacgcctgtaatcctagcgctttgggaggctgagacgggtggatcacctgaggtcaggagtttggggccggcctggccaacatggtgaggccccgtctctgctagggatacaaaagatgnnnnnnnnnnnnnnnnnnnnnnnnnnnnnnnnnnnnnnnnnnnnnnnnnnnnnnnnnnnnnnnnnnnnnnnnnnnnnnnnnnnnnnnnnnnnnnnnnnnnnnnnnnnnnttacacnnnna

SEQ ID NO: 244 - DNA, 765 bp, Macaca Fascicularis
  misc_feature (1)...(765): n = A,T,C or G
tacaggcagtcactgccccagccgtgggnnnnncaaggctggcacgaagccgtgcagggacagggctccagaacaagctgagggtgcccgactcaaactgtagaaccgggagtggacacccacagacgcacaggctggatgcgtgcgcaggcacactggatnnntgggccactgccaccgcctttgaacatgtcggggagcaggagccaggccagagtctggcccnnnnnnnnnnnnnnnnnnnnnnnnnnnnnnnnnnccactggaggaagctccgtccctctactctcagcccacaccaggcggccagctcagagcaccaggcgtggcgcaagcagggcggtcatggnnnnnnnnnnnnnnnnnnnnnnnnnnnntgtgcccagcgggatgtgggcccaagcaggccagagaggctgagggcctggggtctctgcggcagccacagcctgtggtgagtagcagccttnnnnnnnnnnnnnnnnnnnnngtctcatggagtctaggcaggctggggcactgtggctgcggccgtggccaggtgggaagccccattcatacaggaaagactggccacctgggaacccacgcctccgcggagggacttgccggccacaggctgtgggctgcccaagaggactatgcaggcagggctgcctgctgactggcagctccggatcaggcctggcgcccttggacctggtgctcccctcgggcagggctgggtgccgcagccgcctgctggcttttctggcagctcctctg

SEQ ID NO: 245 - DNA, 718 bp, Macaca Fascicularis
  misc_feature (1)...(718): n = A,T,C or G
ggccaacnnncagcccttgccagctgacgtcacagtctaagatggnnaactgtggtacagatagacatgaagagagcttagcagtgattgaggtggtgactaaatatacagtcattaaataaataccatgtagcaaatgtactttgtggagtgttgagtaagtggaaaatggaaagccagttgcatttagagnnnnnnnnnnnnnnnnnnnnnnnnnnnnnnnnnnnnnnnnnnnnnnnnnnctgaaggatgtagaaacttaactgccttagtgaagagaacctgaagatctgaggcaagctggacaggagaggtgggtatttgtcgaaggaaaaattcaagtttataatcacttcccacttagtgagcacctactgtgtgctaggaacttgaatgtgtatttttgacaagtcctgcttggcctgaagggtgagagaaggaacctgagcctggctgagatggccaggtggagggctttgaagtccannnnnnnnnnnnnnnnnnntgggtttctacctccgaaactgcaaggcttgtttggagctcttaatcacaatatctgatatttttaaagtctgatcttttggcttctacatatagtggaaatctgccaacactaattggtagaggtgggaactgtaaaagatgaagtatgctaattttaagcaaatgtaaaaactcataaaacagataaacagtgaggtgatttcatttgcca

SEQ ID NO: 246 - DNA, 693 bp, Macaca Fascicularis
cagctccagtccaggccctgtggcaggacatccatggtgagcccagccctgggacgtcagaagactgggctctggctctgttcagccttagggtgtgtggtagattctccctgggcctcagtgtgcccacgtgtaaaggggcagctgacagtttgtggcatcttgccaagggtccctgtgtgtgtgtgcgtgtgcatgtgtgtgtgtctccatgtgcgtccatatttaacatgtaaaaatgccccccctgttccgtcccccaaacatgtacatttcaccatggccccctcgtcatagcaataacattcccactgccaagggttcttgagccagccaggccctgccagtggggaaggaggtcaagcagtgcctgcctatgaaatttcaacttttcctttcgtacatgtttattacccaagtcttttcccgtccattccagtcaagtctgggctcactcaccccagcgagttttcaaatccctctccaactgcctaaggccctttgtgtaaggtgtcttaatactgtccttttttttttttttttttaaacagtgttttgtagatatcagatgactatgcagaggcctgggggacccctggctctgggcccggtctgggggtcccaaactccaagacccagacacccggggcgtgggcccatacccagggtcccccaggcctctgcatagtcatc

SEQ ID NO: 247 - DNA, 1725 bp, Macaca Fascicularis
ctcctgagcccagctagccagctccgcgtctacgccgctgcctgctctggccgggccgggtcagagccggagcatggaacctggagagccccaggagccccaggagccccgcgagcccgggccaggagcggagaccgctgcggcccaggtctgggaggaagccaagattttctacgacaacctcgcgcccaagaagaaacccaaatcggtaaaagcaatgcacgggtatgcgcgggactgggaagggttaccccggaggaggggtcataagtctcttgggaagggacccgtggcgcccctctgggaggggacgcaggtcctcagccccagaatgcgtctggcagctggcgcgggatcgggtttattttgggagctctgctctggtgtattttttaccgggactcgggttccacgccaggatccccctcccccatgctgtcatcagggcccagctagaggcccgcagccccagcccctccccgcgcgggccgcaggggagcgcggattgcacttgttggcgaacccggtcggcagcgcttgcagaagcgccccaggcgcgggtaaccagactcgggaacccggttcctggcctgtgcgctctggtctccttcacctgggcatcgggctccggacctgagactctgcgtgttggagtctggctctgggcccttggccctgggctgggggcagtgcgctccccgcgtcctaagttgctctctccaggcactgggatccacactctgccctggctgcaggctcccagcgctggactctgccccccagctcggcttctgctccccttgcagtggacattaacatctccacgaccctgtggtggtgtcagccgtctgggacctcacacagaggagctctctcctctcccccatcaaacaagttgatgatgccctggtctgcccctgggccttgctgtctccagcttcccagatggcagagcttgaggagagaactgagaatagaggtcggcccacagcggtcctccgaagagctccagcttgatcttaaagcaacttgctgcttccctccaaggacccctccccaagaggtccaccctatcagcaatcattcacttagcacctccaagctctgctcaagcttgcacactgatggaggctccagagatgagagcctgggggagttgcaggggagtggagtagtgatgtcacactggggaaagctttgtagaagtggcatgtatcctgatcttaaagcctgagtagctggagtttcccagagagagggaaacaggacaggcagaagtcatgcagatgtctcggaagctcaagactgtgttcccgagtaagttctgaatgaagaatgcaggattgttgggagaagagctggagggacgtggaagagcccacagagggccttggggatcatgttaaggagtctggaccttactcaaggaggtcagggatttccaaactagcttccccaagccctgtgtttcagggagtctgcacatgtgggaatccaaattattttctttcttcttcagactatgttttaaacaattaaaaatgtggaataaaacccaactcactctaatgtattaggtggacattttagcagcttaaaggccactagcttgggctgcagatttttttaagcaaacctcagaataaggcttcccctgtgatctatttcatcaaagagcatcttgagattgcaaggcctgtagtttaaaacaaaaaaaaaaaaaaa

SEQ ID NO: 248 - DNA, 852 bp, Macaca Fascicularis
  misc_feature (1)...(852): n = A,T,C or G
ctcagggcgggctggctaacattgctatatcgaacaacaacttgaatgtcacgatccagctttccaaccatactcaggccaccaatgatccccctgaggtgaccgtgtttcccaaggagcctgtggagctgggccaacccaacaccctcanctgccacatgacaaattcttccctccggtgctcaacgtcacgtggctgtgcaacgggcagccggccactgagggtgtcgctgagagcctcttcctgcccagaacagattacagcttccacaagttccattacctgacctttgtgccctcagccgaggactactatgattgcagggtggagcactggggcttggaccagccgctcctcaaacactgggaggcccaagagccaatccagatgcctgagacaacggagactgtgctctgtgccctgggcctggtgctgggcctagtgggcatcatcgtgggcaccgtcctcatcataaagtctctgcgatctggccgtgacccccgggcccaggggcccctgtgaaatactgtaaaggtgacaaaatacctgaacagaagaggacttaggagagatctgaactccagctgccctacaaactccatctcagtttttcttctcacttcatgtgtttgctaccccagtgggtgagtgaattgctgacccttcaagctctctccttatctgttgccttaaaatagtcattccttagtaaagtttagaaggtaatgaataaatgttgacacttttgtagcaccgatatggagattatcccttcactgagccttttatcctttgttctcctttgaagcatccttcactgtcaccttcccgagaataccctaagaccaata

SEQ ID NO: 249 - DNA, 753 bp, Macaca Fascicularis
  misc_feature (1)...(753): n = A,T,C or G
acggaggcactgncnnnttnctagttattgtatnnntacaattaaatattaaaacaaataagagctttctcaacaaattagtccatctcattgatgtaccacagaactccaaagctttgctatcatcacataaatgaactaaatcacatgtgaaagggaacacacccgattttatgttaaggtgaaaccagcagtttgcttcttttattagtaatgtggattgatgttttctcagnnnnnnnnnnnnnnnnnnnnnnnnntttttgatcttgtccnnnnnnnnnnnnnnnnnnnnnnnnaatgctagcctaaagacacaggagtctgtgacaaaatgaccttcatgttaaggggaaatgctgtttatctactcagacatgcatctgtgatgttcatagccttgtttcagttataatagttgtcttgtttttttcttaattgattttgttaataataccttaacacagggtagggagaagtggcacagtgtattgcattatatacatttatcattgatttacttaatgttaccttgtagattaaacactattaagtggtaatacttgaaaaggagcacttataccgtaagtcttaggaaataatgtttgtaataaacttaactatgttacatatcaacaggcaaaaatatagaatgttacatagtgttgtatgatgtgattaaattatagttcctgctgttaacattaccttttgaaaccttggctccagttttggtggtgcnnatacaaataa

SEQ ID NO: 250 - DNA, 1212 bp, Macaca Fascicularis
  misc_feature (1)...(1212): n = A,T,C or G
agacaggagaagagggaactgaaagaagccattcggagcagcccaggagcaaaattaaagnnnntggaagaagccgtggctaccctggaagctcagtgtcggtcaaaggaggagcgccggattgacctggagctgaagctggtggccgtgaaggagcgcttgcagcagtccctggcaggagggccggccctggggctctccatgagcagcaagcccaagagtggggaaactgcaaataaacccaagagcagcgnnnnnnnnnnnnnnntccctgtcaactgtgtttctgagctgaggaagaggagcccatccatcgtagcctccaaccaaggaagggtgctacagaaagccaaggaatgggaaatgaagaagacctaggaagagaatgaggatttcattccaaaggaaatatcagcttgtccacctgaggaagaaatgcttttttcacaaggagacaccaagagaagactaggaagtagccctcgttctccagggcacccaaaagaccagcctttattgtctgcatgattttaggggatatggggagggaagaagtagaagggaagagggaaatggagagcattcttatgactttacaaagggtggaaatgaggatggagggattcccttctgaagaagaaatgaaagcacatgtgaataaccccttccatcccattcacagcatcgcactcccagtccttaaggcaaagggaggcagtgctgaagcattngtggtgcagtgtagagagacaagacctgataatctgatcacacttgttccaacttgattcatattgggcattactgacaaccactgggcaaggcaaacaggttgaacaatcaataacattatccnnnnnnnnnnnnnnntgaacaaaagctgtagaggacatgcaaattctacagtcattcctcatttgctttagacagagtgcagctnnnnnnnnnnnnnnnnnnngagtgttttaaaatcagagctctgaatacacaaaaggaaagagaaatggagcagctgacatattttaagctcacggtgatactcagtgacaggagcacagagctcnnnnnnnnnnnnnnnnnnnnaaggtagggtctttcagtaaatcaagtcccttacctatgttctatgacactgaggttcttggagctatgggttagaaatccaggaggcaatatgtcattaatctaatgaagtcctcatcttgcactcag

SEQ ID NO: 251 - DNA, 797 bp, Macaca Fascicularis
  misc_feature (1)...(797): n = A,T,C or G
aagacngagccagannnnnnnnttaaaannnaaaacctgactangttctgtagagccaattagacttgaaatacatttgtgtttctagaatcacagctcaagcattctgtttatcgctcactctcccttgtacagccttattttgttggtgctttgcattttgatattgccgtgagccttgcatgacatcatgagaccggatgaaacttctcagtccnnnnnnnnnnnnnnntaacaaatgctcccacctgaatttgtatatgactgcatttttgtgtgtgtgtgttttcaacaaattccagatttgtttcctttttggccccctgcaaagtctccagaagaaaatttgccaatctttcctactttctatttttatgatgacaatcaaagctggcctgagaaacacaatttgtgactttttaaatgatcagtgatgtccttaaaatgtggtctgccaatctgtacaaaatggtcctatttttgtgaagagggacgtaagataaaatgatgttatacatcaatatgtatatatgtatttctatatagacttggagaatactgccaaaannnnnnnnnnnnnnnnnnnnnnnnnntttgtttatatttttttaactgtgataatccccacaggcacattaactgttgcacttttgaatgtccaaaatttatattttagaaataaagagaaagatacttacatgttcccaaaacaacagtgtggtgaatgtgtgagaagaactaacttgatagggcctaccaatacannnnnnnnnnnnnnnnnnnnnnnnnnnnnnttt

SEQ ID NO: 252 - DNA, 748 bp, Macaca Fascicularis
  misc_feature (1)...(748): n = A,T,C or G
gcnnnnnnnnnnnnnnnnnnnnnnnnnnnnnnnnnnnnnnnnnnnnnnnnnnnnnnnnnnnnncaaannncaaaacaaaacaaaaaccaaactattttgttctttttctctagagaatttgcctgtgtttccagtttgggtagtggtgggcatagttactgctgtggtcctaggtctcactctgctcatcagcatgattctggctgtcctctatagaaggaaaaactctaaacgggattacactgggtaagaaacactgttttttagggcaggggtggagggagggaatcagggtttataaaaacttatgtatttaatgaaaaaaggattttgaagaattaactactgttttctttcatgtcagaatcaggcagtctcctttggaggtgttctaacatgggcaagcagaaatcagtgggcctgctatgaaatgtggaatgattctaatctttgttccagtttccttcttaggtttggtgagatgagttgctcagcagtttgtgctctgtgtttcaatatatgcactatgcaattagtattcttagtcttaagacttaagacttagtcttaagtcacttacccaatttaagagtttaatttcaatttcttggtaataaactcacaaggtggttctttccagttgggaaatataaaaccctaattaagaagaagttgtgagctggaagtggtggcatgcgcctgtagtcccagctacttaggctgaggcgggaggattgcttgagcccca

SEQ ID NO: 253 - DNA, 691 bp, Macaca Fascicularis
  misc_feature (1)...(691): n = A,T,C or G
cngnnnngacctgtgcaagcacattcaccaagtgcatcggtagccctgcccacccctccagacctcggttcttattttcctatttttattaaatttggaaccattttgtgatggtatgttgtccatcttcccatcccacttcttcctgccccacttcctctctcccacactctctttcttctctcattttattcccttgttgatttctgttaacttgaaagatttgggatttttttcccacctcatcatagatgggaacttttgttttcagtgcaaacaatgttggagctgtaatagtaagagctttcttacaaagctttgtattactgtgtggttttgttttttttgttgttgtttatttgattttgggtttttttccttttgtgtgatctttgggaaaacacattcagaattatatctcgtttctacttaaatgtagtgcttagggttaattttttgtactgaagtctttattggtgggtgcatgctactgggaacaagtttttgtacaaaagcttcaatcagaatcactgtgcattactgagactctgtttatcactagccttctgtccctcacgcagaagactgttggattgaacaaaataatatgtattttgatttacttaaagtgcttgtaaatttcttagggacctgccacttttgactgtggatcagttgatgtacacttgta

SEQ ID NO: 254 - DNA, 739 bp, Macaca Fascicularis
  misc_feature (1)...(739): n = A,T,C or G
tcccacagtactcccatagtgagttacccttaataaacagtaaattgaattgaattaaaattacctgtaagttttaaaatgcgggattagattaagaatatgttgctttggaaacacccaaatgtctatcgatggatgatgaatggataaacaaaatgtggtatacacataatggaatattattcagccttaaaaaggaatgaaattctgacatgtactacaatatgatgaacctggaagacattatatgtgaaataagccagacagaaaaggacaaatactatatgattccacttatatgaagtacctagaatagtgaaattcatagaaacagaaagtacaggttgacatccaaaatctgaaatgggaaacgctccaaaatctgaaactttttgaatgctgacgtgatgctcaaagaaaatgctcatcggagcatttcagattttggatttttggnnnnnnnnnnnnnnnnnnnnnnnnnntgaatattccaaactctgaaaaaatctgaagtctaaaacacttctggtctcaagaattttggataaaggatactcaacgtgcaacatgtagaatgttggttgcaaggtgggaggggagaacggagttattgtttaatgtacaatgtttccgtttgggaagatggaaagttttggaggtgtgtgatggttatggttgtgcaacagtgggaaggtacttagtactgctcaactgtgtacacttaaaaatggtaaaaatg

SEQ ID NO: 255 - DNA, 738 bp, Macaca Fascicularis
  misc_feature (1)...(738): n = A,T,C or G
catnnntcnnnnnattaagaagagannaaaatagccaaacgacactggtcgcacgctcnnnntntggtctgtctgctgaatgtctatttttgtctcnngacaagagacgtgannnnnnnnnccttgatccctccaacagaccagaaacccccttccttgcaaaaaaaaaaaaaaagccaattgaattaggaagagatcacccaacctagctcagatccaccaagataagcacagcannnnnnnnnnnnnnntttgaggaataaaaaccttctgcagaaagcaccaataacctttaagatctgaatgagattctaatataacccgtctaaannnnnnnnnnnnnnnnnnnnnnnnnnnnnnnnnnnnnnnnnnnnncacgtggctcagggattctctgaggaccaggagttgacacacaaaccccgccatgggtcccagccagctatttctcaaggctcccacctcgccaagctcccaagggcctgccggcagcgcctacgctgtgccaactaccctgtctggtacagaccacggctgggtagcaccctcaaaagcaacagaaacaacgtctggaagctgaaaggcgaaactgtcgggatggctcgggagaggaaggagcggacccactggtcttcggcattttgtatttagaattattctaatcttatacagaacgtataggcagatcttttggaagggatacggttttcattcttgtgcaactcattattctcatta

SEQ ID NO: 256 - DNA, 760 bp, Macaca Fascicularis
  misc_feature (1)...(760): n = A,T,C or G
tacacagagagggatactcactgttgttctnnnnnnnnnnnnnnnnnnnnnnnnnnnnnnnnnnnnnnnnnnnnnnnnnnnnnnnnnnagaagtcagagggtcacaactgctcccctagaactcccnnnnnnnnnnnnnnnnnnnnnnnnnnnnnnngcaattctaatcaaggagagtctagtcagaggtatagtcggcgaggtgaaatggcaggtagaattatgataaaaaggccttgatgaaaaaagnnnnnnnnnncctcccgagctaaggnnnnnnnnnnnnngttgagctgtacattggacatgatctctgtcaggtcctcatactcctcaacgtcttcacttagctcnnnnnnnnnnnnnnnnnnnnnnnnnnnnnnnnnnnnnnnnnnnnnnnnnnnnnnnnnnnnnnnnnnnnnnnnnnnnctcaccactgcccactaagggcacaggaaaacccctcaagccctaaccannnnnnnnnnnnnnnnnnnctttatgcnnnnnnnnnnnnnnnnnnnnnnnnnnnttgccaacttcttccctacatacacatccttgcaggaggtgaagatgtcttctaccaactccatgtcattgagcatcaatgccaatnnnnnnnnnnnnnnnnnnnnnnnnnnnnnnnnnnnnnnnnnnngggcacaacgcagtagggctgagttctcaggctcagnnnnnnnnnnnnnnnaactacaaaagtaaaagtaacaaagaattcagaaagtgccnnncactc

SEQ ID NO: 257 - DNA, 784 bp, Macaca Fascicularis
  misc_feature (1)...(784): n = A,T,C or G
gagcagttggctnntcagagcaggggtnnnagagcaagctgggtaggactgatgggtagggtggaannnnnnnnnnnnnnnnnnnnnnnnnnnnnnnnnnnnnnnnnnnnnnnaattggtttgggcaggaaggggtggagaggaaaaagaagaaagaaggccttggccctgccatcctttcaccttcttatctaatctacgacctcattcttcagtgttacctccacattgtctctctcatggaggccactgcgagcatacatgcagctctgtgcaagttaggaaaagacaccccattctccagtggactcagctctgtgccaggactcaaagagtggcatgcaaggccccagctgaatcagagaccccacccaccttcttggccttgagcagtgagcaacctgcacattatgaagtagtggactctgtggggtcagttcacttgtctctatccccatagtccctctggtccccatacaactccaccatctctctcttctnnnnnnnnnnnnnnnnnnnnnnnnnagataattaggaaagccacttacaaagaggcctacatttagacgttggtgttgttgccaggtacgttatacatttagtcctagagatacaacgactagatgaaaagatgttcaccatgttttttgctttttagtttgggatctattatcagctcacactgccctatgaattaaaaaaataaataaatcttaagatttattctgcaaaaggcatatttgtatagcattgtattcttgagtctgtatattaggaattaaaa

SEQ ID NO: 258 - DNA, 750 bp, Macaca Fascicularis
  misc_feature (1)...(750): n = A,T,C or G
agattccagaggccttggccagagcaggttgcnnnntgccagttcatctaacttgtgccctcagcatattgggggccaagaacaagtcctagtgtgtgatagccccatgcaggttcctagattccttccccttcagacaggcttctctctgtcttccctcctctactcctggtgctttccctctgaagatctgtcaggagtgcgccagcattctcagtccctctgaagatctgtcaggagtgcgccagcattctcagtccctccgggcaactcttctagctggccgcggctagtcagccatcttgccccagcatctacttttataaagtcagtctcttttcacacattgcattaatttcttcctagataagaaaatgagtaagtttggagtgtgtgtagtcagaaagattacaaggaaagagcattaattcctatgttgataacatggaaaaccatctcaatgccgaaacttcattgtgggtacagttgtaaagcatgtgaaggcaggctgagcacgnnnnnnnnnnnnnnnnnnnnnnnnnnnnnnnnnnnnnnnnnnnnnnnnnnnnnnnnnnnnnnnnnnnnnnnnnnnnnnnnnnnnnnnnnnnnnnnnnnnnnnnnnnnnnnnnnnnnnnnnnnnnnnnnnnnnnnnnnnnnnnnnnnnnnnnnnnnnnnnnnnnnnnnnnnnnnnnnnnnnnnnnnnnnnnnnnnnnnnnnnnnnnnnnnnnnnnnnnnnnnnnnnnnnnnntc

SEQ ID NO: 259 - DNA, 670 bp, Macaca Fascicularis
  misc_feature (1)...(670): n = A,T,C or G
caagcaggcagtgggacctnntggtgtcaactcaggcccagnnnnnnnnnnnnnnnacaagtttctggcatggagcggcgtcatggagtggcaggagcccaggcctgagcccaacagtcggtccaagaggtggctgccgtcccacgtctacgtgaaccagggggagannnnnnnnnnnnngcagtggccaaggaagctgtacatgcagctcatcccgcagnnnnnnnnnnnnnnnnnnnnnnnnnnnnnnnnnnnnnnnnnnnnnnnnnnnnnnnnnnnnnnnnnnnnnnnnnnnnnnnnnnnnnnnnnnnnnnnnnnnnnnnnnnnnnnnnnnnnnngctgcgtgcacttttcctacaaagcatcatgtgaaatccgtgtgcttatgctcctnnnnnnnnnnnnnnnnnnnnnnnnnnnnnnnnnnnnnnnncacgaccagggcaactttgtcaacgccccccacccctgcgtccaccatgaccctcttccccacgctgacctgtgttccctccnnnatttatctttcctgttccggggaggtggggccgggatgtctttannnnnnnnnnnnnnnnnnnnngcactgaggtgtatcttcttccttcnnnnnnnnnnnnnnnnnnnnnnnnnnnnnnnnnnnnnnnnanttattatcatgagagcgttg

SEQ ID NO: 260 - DNA, 1896 bp, Macaca Fascicularis
  misc_feature (1)...(1896): n = A,T,C or G
cattcacaaccacaacaccagctcaccgtggaaaggacattatcccagtgcctcatccccattttcacctggatgcgcatggtatttcaaattcagcttatcccaaagcaaatccatctgtgtcaagctggcttctctgctttcatccatgcatctttcattttcctggcttctaatgctcccgctaatgttataaagcagttaacaaggcaatcaggctacgtaagcagaaatctgtgaatactaagacccgtcagctgagggtattatggaaattgaatggcacttgtaagaaagcccaacatgtataatgatgtgcataattcttacaggcagcaaggtgactaggcatgtctagttattcatgaacattaaggttgttattgctttaattcacaagcagagcaagcgttttgggtaacagatggaaaagccggggaggggtagtttgtggccctcagtcccctccctgatgccaggagggaattgaagctttgcttttgtcatccctcctcccagctgcatttccttggtgccttcactgttcctagtgtcactggttagggaatagtcctttgctttcggccaggcatttcttgaatgtgctagtccttttttaattctctgaaaggagaatcgaattaaaaactgacttgggtcctgatataatgtggagttaactgttaatttcacccgctgcgcccatgcaggaagcatgaaagtgcctgattgaagggccggggccggccctcttctgtgccctgatctcagcccggaatcaccttgctgacagctgtattcccgcaaatgctgaatggtgataggaaagcaccaaattcacatcggctttttattttcattatttcttattttaaaagtaggtatttcattgagttatctttccgcaaaaactactcaagggtgtgattgccatttatgttcattttttagcctgagtcgtgaaatttgaagtgcgacagatattttagtttttctataggcttacatagtagagtgcatccaattaatatcaatttaaaaatgatctctagggatatcagggtagtgtttacagtgacttatttcttttcctaatagaactagtttataaaactttagtcatttcagctactgggatggaaccatgacttggcaaaaagagacaagtctttggagtcaaaaatatctgagtttcagttattggttctactgttggaaaaattactttatctttctgagtcccttccctgttgcataaagtaaaatctgccccatcagataaaatccttaacttgctctgcacgtgttcatttcccctctgctgttcctggaagctggaggaggagaagggaagcaacgagaaagatcaggaggctgaagccacaagggtatacaacagctgtgattttagaagagtgtaattgggcacgtgtgtgtgtttaatctatttgattagattgctttcctaatatcaagaaccaagagcatttgaggtgaaatgccccattacttgatctcagttggagggccctggaatcctgggaacttgatggggagaagagagctattcagacagggataggaagatcagtgaggcacctgcttctgactttctcttttttttcttttctttctttctttcttttttttttttttttttgagaggaaggcttcctccgtcacccaggctggagtacagtggtatgatcacagctcactgcaacctctgcctcccaggctcaagtgatcctcccacctnnnnnnnnnnnnnnnnnnnnnnnnnnnnnnnnnnnnnnnnnnnnnnnnnnnnnnnnnnnnnnnnnnnnnnnnnnnnnnnnnnnnnnnnnnnnnnnnnnnnnngtnagcactcctnanaccnaaaaaaaaaaaaaaaaa

SEQ ID NO: 261 - DNA, 1220 bp, Macaca Fascicularis
  misc_feature (1)...(1220): n = A,T,C or G
gcagtttgagaccagcctggccaacatggtgaaacctcannngtactaaaaatacnnnnnnnnnnnnnnnnnnnnnnnnnnnnnnnnnnnnnnnnnnnnnnnnnnnnnnnnnnnnnnnnnnnnnnnnnnnnnnnnnnnnnnnnnnnnnnnnnnnnnnnnnnnnnnnnnnnnnnnnnnnnnnnnnnnnnnnnnnnnnnnnnnnnnnnnnnnnnnnnnncaaaaaaataaatgaataaatttaaaaaaaaatagaagaaaaggcgaaaaccggaacctggagctctgtgggccccggttgcaggcccctccctgtgtgatgagggatgggtcagctgggggaaccacatggccagcctgcatgcctggtcatcaggaggttgaggaaagccttgaaagttgtgaagcactaagcagatacaagtgttcattaattttgtagaaatgaactttcctctctggcctttatctccaaagtcggtattgttgccccgtgcagactgcagtttggtttttgattgtgactttgacattgcaaagtgtgaaatagtaagtggtctccccaccccgccatcccaccctggtgaccagctcagtataatcnnnnnnnnnnnnnnnnnnnnnnnnnntttggagtgacctctgcagccagtcagtgtcacctgggtacagcacccgtacttttatgtggtgtgtgtgtgnnnnnnnnnnnnnnnnnnnnnnnnnnnnnaggttcaactacctgtagattaaagctttatacaataaactgattttttccagatgggtgaaatcgttccccttgatatgttttnnnnnnnnnnnnnnnnnnnnnnntactgggttacattctatgtgtagtttgtttttttcagtttttttcttttaaaatgctcacgtcttattctaagcatcttcctctaaagtctccataaagctgcatctccaacacattgttatgccagtaaggttttatttaactttatttaaggatgattgtgtattcgaatgacaaatgtactgctgcttgctccctgcaagacgcacaatgtatgtttttaagggtgagcaagtgttatttcttaaatttctcaaatgcctgcagtaactattgtttctgcctctcaattnnnnnnnnnnnnttgaagaaggggagaattgctgtctttctgtgtggggatgtttctgatatgctgctacagttgcaacttagaggaagatgc

SEQ ID NO: 262 - DNA, 2818 bp, Macaca Fascicularis
gtctgagcctccttggcagttctgatgttcttagctggtggacttcacctccaagtcccagaatgtatgttaatgaaaccattagcaactgatggaatggttttggaaaacttgcatcaagaaataggttcctctcttctacagctgtcccctgtgacctgtagttcacaaaacaaaaaatattcagaggaagcaagatcctgggaacccacaaaattacagaactcaacagatggtttaattgtacagagcctgggtggttggagggtgcttcctcacctaattatccccagtctgatggtctcggcatcatggggctggaacatccaccaaaatcaggccacttccacattttatgcttggaaaatccaaggctcttcaaagccttggatatggcctttattttaaaaatcctctttttgaaatcagatcctcactttcctctttttttcatgaaaaccagagtctcaagggtcagttggtcactcagacccacaaatcctccttctgcctctagctgcccgggccatccaaagaggatcttatctgccagcaaatgctagtcaatgctgcagaggcagaaacctttgtttcttcttgtaaacatctgtagtcataagtaggaaaaagaaaagaaatgcaagaaaatccatcaacctaattgtttggaagtggaatgttttccatgaagcattaataatactgacctagtggtaatttttctttttcagctctggtctagctcctgtaactcccagcgagacaaatgaggtgtggtgtgcatatatgtgcatgcacacatgagtgtgtttgtgtatactcttgactaaaatctagctagaaaccacagtcagtaatatatctgtttggtcttgagctcctgaagctgttcatactagctgggaggcagtgttgcacatagccgaaaacacatggacctgcctttgaactccagctctgtctcctgcaaactgtgtgatcttgggaaactgtacaccttctctgttccctcatctacaaagtgggactactgtgataactatcttataggagtgtgaatactgactgagatgatacctaacaaacaaaggcattaacacggtgtccagaatgcaatgaatggcaaatgttatttctattggaacttaacatacaaatgttaagctggtgtattaatacattcacccctggggatccaagtggatctgggttccacccacaagaacaaatcagacctgatagaggcgtagaatagaggataggacagtactctgtaaatctaagaggccaaggcagtctgtgtatgttgttaaaatggagagatgtgaccatagcccaatgaaaagccaagttcttggatgaggggaagagaacacataataagccaaagatgttgggtaaaggcgtaaaagaaggatgagtggcagaactccagctagaattgccaataaacagagtcaagcgcaagggacacacaaggtcaggtagttcaagaactaaggccaagaatgaaggggcggcaccacgctgcactatgtgaacagtaccggagcatctgtacacccatcgcaggactgggcacagacttttctatggctcggggaaataatgctgaagatattacccaacatattaaccctgggaatggcagaccaaacaaaagcacacttttgccattgtcctttcctggcaggctgagtctgtgccaacacatccagagaggtgtatcgggtccttgtagaccaatttgtcctagaacagagcggactgtaacaaaagctgtttgtagcagggccggctgtattatgcatgacattcatttgctaatttgcatttccttcacctcttaaaaaatgaaaagcagcagcaaataaatgatgaatgtaagggaaattgaacgcctaataaatgaaaaagctgcaatgatgaaagaactgggtgcagtttgaaaatgaaatgagttctcctaaagaggtgggacatgaactatctgagcaagatagccttatggtatatggttaacactcttgattggaagaaggttcaggagagaataacaagaccccagttcttcatgctctgcacgaccttaggcaagtcactccatctctccaaacctcaattttcctgtctgaaaaatggacatgatagtacctggcctgcttacctcacagggttcatgggagagcagcatgagtaatgtaaatgggaaagctggagctaaaccaagaacttaccgatcaatacaagggatcattcttagtacaattcaaggactgtctctgaaatcaaagggattttttgcctttacaaacaacttggggtgggaagagcacagtctttgaatacagatctgagtttgaatccggaaactatcatctattagctatatgactctgagtaggccactttaaactctctgagcctcagtttccccatatgcaaagtgggaaaaatggtacttgcaccctcattgcattggtctaaaaattaactaaaataaaatataagatggtacctggggccagtgtagtggctcatgcttgtaatccccgcactttaagagctcaagacaggaggatcacttgaggccaggagttcaaggtcagcctggtccacgtaacagaccctgttcccacaaaaataaaaaattagccaagcatggtggcatacacctgtagtctcagttacttgggaggctgaggtgggaggataacttgagcctagaagttcgaggttgcagtgagctatgattgtgccactgcactctaacctgagtgacagctcaagaccctgtctcaaaaaaaaaaaaaaaaaa

SEQ ID NO: 263 - DNA, 682 bp, Macaca Fascicularis
  misc_feature (1)...(682): n = A,T,C or G
tgnnataccacnngaganttgaagccacagacannnccagccnncaagcctgaaaccaaaagactgaaaaccaaacactnnnnnnnnnnnnnnnnnnnncnnnnnnnnnnnnnnnnnnnnnnacacaaggacctaaggtctatctctcctcatcttggcacttcgggtagtctccccagtcttgacaaagccctggagaaaggggcgggcctcccgttgataagattgtcactgcagataaatggaggtttcaaactgaaagaaaggaggagggcctcccgtttgataagattattgtcactgcaggtaaatggaggcttcaaatagaaataggtttcagttacagaaaaaaaaaattatctttgttacacatttgagtttacaggcctaaggtnnnnnnnnnnnnnnnntcatctgtaaccataagacactcaacattttaaggtaactataaggatttttgctnnnnnnnnnnnnnnnnnggttttattcacatttttatttggtgactatagttgacaagaacannnnnnnggggaatcaacaaacactgccatgcctggcattgtcacctcactagattgtgcattcctctgggacagggtccatacattgccttcgaatccctcacttagtcattagcctgctacagtgcttgtacnnnnnnnnctcaataaatgtt

SEQ ID NO: 264 - DNA, 596 bp, Macaca Fascicularis
  misc_feature (1)...(596): n = A,T,C or G
tcccaaccccctccctcccaccaccccaaagctaagtgaagtgaccccnnnnnnnnnnnnnnnnnnnnnnnnnnnnnnnnnnnnnnnnnnnnnnnctgagacataacctagttccctgttagacttaacgtttcctaagggcaggtttggaaccttactcgtctttatatggtgtctggagtagtgcttgccttnnnnnnnnnnnnnnntaaatgttgtcttgaatgagtnnnnnnnnnnnnnnnnnnncaggagttggatggagagcagactnnnnnnnnnnnnnnnnnnaggggccctgcctcttcctgagctcacaatacccagagcnnnnnnnnnnnnnnnnnnnnnnnnnnnnnnnnnnnnnnnnnnnnnnnnnnnnnnnnnngggcgggtgcactatgatggtttttctttcagaaagaaactgcactatcaaagccctagcaccttctctatacccacctcaggatttcatattagatggggcccaagtgatattttctttaccatccnnnnnnnnnnnnnnnnnnnnnnnnnnnnnnnnnnnnnnnncctcaattcgtggnnnnnnnnnnataagtcaactacatgta

SEQ ID NO: 265 - DNA, 735 bp, Macaca Fascicularis
  misc_feature (1)...(735): n = A,T,C or G
cattgcctagttctgtgatgagctcttcacacctgtgcccatagggactgtgggagagtttgtctgnnnnnnnnnnnnnnnnnnnnnagaaaactgctactcagagatgctgaacataacgtggcacagctgataagtagcaaagatgaaagtccaggtgcagagaagttccgagaatgtggccctcctgggatggaaggtgtccttgtgctagtcatgagcgagacagaaagaaactgccaaattgtcttccaaagtggctacatcattttgcaatcccaccaacaatgagagtccnnnnnnnnnnnnnnnnnnnnnnnntttggtattcatgttttggatttcagcattctaatagaaggacagaataatgggctccagattcgcaagccccaccaagaggatcaccccaggaacccttggaggctgaggaattcactgaggctagtgcatctcgagactcaggatgaagacccaacttggggctgtcaaaggttttttgcatatttgacacccgtggctccacctggacctgatggctccacccagaagcaattcagccccacaggaggacagcttcaacccattaccatttcctctctgccccaaccaatcagcagcaagcacctgttacctgtccacccccaccccttcccccaaactgcctttgaaaaatccttaacctatgagctttgaacaagatgatatgagtacgaactccatctcccatgtggc

SEQ ID NO: 266 - DNA, 728 bp, Macaca Fascicularis
  misc_feature (1)...(728): n = A,T,C or G
gaaggctttagcacgggtttgtttttggacagcatagcagctctctcctgttgatgggaccccagatggtgaattccttcggcagttgtactgggaacagtttggaagtcctggtttacctgctctggggacaactagactattctgatggactgagcctagcaaaagccttccccacactgcccctctcttccgctacatgttcttagacatggggctaatttctcctttttgaccagcagccaacttctgttccaggcctcattgggctccggttccaacaatccaaactttggacctcaaagggagagatgagggtgggcccggaataaatgtcacttcctccatacggcctttctggattgtctccagacttgcacacccaccctcctgtgccactgtagcacttccaccctggctgcagtcctcctcctgatgtgtgttgtggtcaggtgcctttccctttaagaagggccccggtcgggcatggtggctcaagcctgtaatcccagcactttgggaggccaaggtgggcggatcacgaggtcaggagtttgagaccagcctggccaatgtggtgaaacctcatctctactgaaaatataaaaattagcctggcgtggtggtatgcaccannnnnnnnnnnnnnnnnnnnnnnnnnnnnnnnnnnnnnnnnnnnnnnnnnnnnnnnnnnnnnnnnnnnnnnnnnnnnnnnnnnnnnnnnnntg

SEQ ID NO: 267 - DNA, 1247 bp, Macaca Fascicularis
tactaaaaaaaggatagccgagggctgtaaatcggagggatcaccaggtctgcctaccagccaccaggcaagtggggagaagctgtcaccccaacttgagtttcaagaagactccttggaagaaaagaccaccaaattgagaatgaaaagatcatacacgggggtcgtcagacatggtctgagacctgctgggaagaacagcagcctggcgctgctaccctctggcttctgttcacagcactgaccccagctaatccaagaacatgtcacctataatgcgaatattgaagaaaaatcaaccatcttccagatgtgtctatatcatgatacggtacatgggatctgcactggacgggcaccaggtctttcttcagcgaacatctaaactctctcaagtgtctccagagactttcacacgtctacaaagatgacctcattctgtagcagcatggatttaacttgctcttcgatgtcactccttcacagagtgcactgttcattgtcaccctatccactagtgtcagtcttactaaaagtcaaacatcaacgttagtggtaactctggaggcctggcattgtagcgatatcccaagagaaaattgttttgaacctttctgggaaaagttcacgtacgttttattcaaacactagtttttataacctcgctaccatgtggctttcctgaaggatgaaatttctgacgtccttcaagtagagagagataaaaatttttctagaacattaattgcccactcctctcatcccttctcagaaactaactgaattccagtgggtgtgcctggcaaacccaaacacggttttccgttcaggatgctggtcttacctgtgaaggcgttcatgaaggtggggagggactggttcaacattttgaagaaagggtctctgcacggatacttccgagacccacaaaggatggtatgctcaagaatgtgaggaacaccggtactgtccatgggagtggtccggaactgcacgctagggaagaaggaacggcacgccagggaagggagaggaacagaacgctagggaaggagaatggctagaatacaaaatgttcatctttgtgctgcggacacagttcccagatgcatcatcacctcaggctactagaaatcatcattctgacaccataatcctccaacacggggtttcccaactctaatgtaaatcattaattcagactataaaattgtattttgatgagattgtaaaaaaaaaaaaaaaaa

SEQ ID NO: 268 - DNA, 2323 bp, Macaca Fascicularis
aatgcagtttttctttttttggaacatgccaattaaaggtatgtgtatatgctggaaattttcttacatatcctttttaagtcaaagttattaacattatccagcatgctttaatatgctccacatatcaaagatataaccaataatttaacgtagtttaaaagataatatttgttttgtttttagctttgcatacgtttgtaattccctcccaccaccaatataccttaggtaccatttgtgtacatttctttatttaagatttttttttcaataaaaaggggggagggggaaatggaatcactttgccaactattgttctaagagtggacatcagttaccatttctaatgcattgttgtgattttgtagtgtcattcataactggtattgacattttagaaaacaccaaagtgatttaaaatatatgtggaaaaaacttctcactctagtaacaacgtttaaatcatgttgtttgttcaatatttaaaagttattgttcaattgttgctagactatcttaaatcatgatagtgttgggaagggggtatcaaaatataaaattgtttgtgtatataaacaatgcacattaaaacaattgaattccttccagcatacaacaaactaccttaaaattatgttcaaaatctattaaatatattttcatggctaatgtcgattatatgttttcatcaattacactgttattgtattaatcgcagttaaacttggcatctcttggcaggatcctatttgatttcttttgccatcaaaatatatttatatgcatgaattttgctataaacctttattttctgctgtagagttatatattattgacaaattgacaaatacaattataaattgggtaagaacaagctgattaaaaattgttcccatgactaatattagtcttcatgcttatagcatacttttctttaagacagtaacactcatcccatcaaattattatattacatttagtatttttctgtgagttatgttgacaagaacttaaattatggcctgttattaatattgatttccaacgactgaacagtataaaagatcaataaaaaaaattatacactgcttttactatttaatttttgttatcctcatgtggcttaatgtagttagtcactaaaacagaattcaagtaagcttggcgatggtgttgagtaacaagaaagaattttgcgttaatgatttctttatattttcctcatttaaacaaccagcattactgccaaacaccaaccgtggtccatatttgtaacaggtttttaacatgacatagttagcaagtttgattgaagagatttttaggtcctgggcctataagattttagtatgatcttttttcatgtttctaatgcttgaggcattactgcttaacttgggggaaaaaaaaacagtgttgctgccatttgtaagttttcctataatattccttttattaactttaaaactggccttatggggttcaaataggcagtatcccttttaagtgacctttgcaacccaagtgttacttgcttatttgatgctctcttgtattttaaatctcatttaaatctctgtctgtgaccaacaaagcttaaattttgtcttaatttaaaactctggatctattccattgatcatgttagacgttaaaatgtttaatggtatagtctgacctagtgaaacaaaatggatgttgtgacttttttaaaagaatagaatggaatgactatttcacttgcccaaaattttaaatattttttcatctaaacttgtattgtttcccatagcagaatgttaatattcacagtatatttctgtgaagagcaaaccagtacaatatattgagtgttgaaaaaattccagatttttaaagaattaaacaacccttaccaatagtttcatctaccttctttctagttcacacagttatctcaaagaaattccactgaaactaatgggatactgtcttgtgtagatgccaattcagtttataatgtgacctagtcaagctgtctttttgttgtgttgtatgagtgtcagatcatgcttttaggaatacttttattaaaatggtgtgcattcatgcaaaaggccaactggcttttgtgaacaatagattttttctcccctttattttgttctcttgacacttttgtgaaaattatctagcctgataaaaacattttgtaaaaatttgtataatactgttataaaatatttataatcccagaaaatgttgtgttaaatcttgtgcaaaaacagtatattcagaataaaagtttatcatttaaagtcaaaaaaaaaaaaaaaaaaaa

SEQ ID NO: 269 - DNA, 772 bp, Macaca Fascicularis
  misc_feature (1)...(772): n = A,T,C or G
actaagtattcctttagtactttcggtgatactctgtatggagggacaggcctnnnaaggnnnnnnnnnnnnnnnnnnnnnnnaaactccttctcaggccctaaccactatctttattagaggtagaattaatgcaggtaaaaagacaacagctgaggcatgatatggtttgagagtcaggtaggatgttaatttttcccactgccaacataaaaggaggtttaacacagctctgcaatgggaccgtccgattagaggtcatggctacaacaaattgaagtttttaccatgggtctctgttttatattctcctttccaaatctgaattggggtttgagccatcattaatttccacaattctggatgttctgtacttttaattgggtcaatcatttttgggcttggaggagccataccattctcctcccacttaatagggtaatttgtttcaattattctatgtaattttggtgcattatctgggtagtcgtttgcaaaagtagtctctctacaatcttctctctgtccagnnnnnnnnnnnnnnnnntgtcccctaggggctcaatcaatgatgattccataggaattattttgcagcacnnnnnnnnngtttgcaatacaatcttccgaggttggcacctctagcttctcagaccattcaatggcaggaggttcttattaggtttaaatttattaatctggcgatgtgtcataacatagccatgctcaaggtatttaatagtgtccaaagnnnnnnnnnnnnnnnnnatac

SEQ ID NO: 270 - DNA, 742 bp, Macaca Fascicularis
  misc_feature (1)...(742): n = A,T,C or G
gctgaactagatccaggtgtcaaactgcggtaatttttatcaatgaagtggaagcatgtgtttaattgttttgggaatttttatcaagtatcttcagagaagattatttcctgctttatcttcaaaaactggaaaggaagggtcaaagaaaagacagtagctggccaggcgtgatggctcacacctgtaatcccaacactttgggaggctgaagnnnnnnnnnnnnnnnnggttgggggttcgnnnnnnnnnnnnnnnnnnnnnnnnnnnnnnnnnnnnnnnnnnnnnnnnnnnnnnnnnnnnnnnnnnnnnnnnnnnnnnnnnnnnnnnnnnnnnnnnnnnnnnnnnnnaggagacttgccaggcagaggttgcggtgagctgagnnnnnnnnnnnnnnnnnnnnnnnnnnnnncaagcgaaaccctgtctcaaagaaaggaaaagacagtagcttnnnnnnnnnnnnnnnnnnnnnnnnnnnnnnnnnnnnccaaagaaaaattccagtgtttcctacattgggnnnnnnnnnnnnnnnnnnnnnnnnnnnnnnnnnnnnnnnnnnnnnnnnnnnnnnnnnnnnntcttagggtttaatgttggtaaatgaatcactctagcatttgtacaaggctccctaagactcctgcagcagttgaccaagcccaaggacgtaattgaatctggagagtcctagggccttgttttgaaaaagacttgaaatacacataggaagaaa

SEQ ID NO: 271 - DNA, 697 bp, Macaca Fascicularis
  misc_feature (1)...(697): n = A,T,C or G
aggattcagatatcttcccagtattcttttccccaaacctctttattcccaattaaccatttgttttgttaccattggggtatccaggtagtaagaccatttgctacagaccgagttggtatacaagtgacaaatccctctggcctcctcttgaatagcttggaggatggctactagttcagttaactggctgctcccaccccttccttcatcataaattcttatgtttttaatagaattataagccatggccttcgagcatcgggtccccaatgtatttggtggatccttcataaaccaagcatgtttctgatcctttgggcttagttctttaaaggatctgccccattgggcgggggaggtttccttccctatctgcaggacttgctctgtgatttcctgagctgggaagtttcatacatcctcatgtaaaactgatacccccggccgggcgtggtggctcaagcctgtaatcccagcactttgggaggccgagacgggtggatcacgaggtcagnnnnnnnnnnnnnnnnnnnnnnnnnnnnnnnnnnnnnnnnnnnnnnnnnnnnnnnnnnnnnnnnnnnnnnnnnnnnnnnnnnnnnnnnnnnnnnnnnnnnnnnnnnnnnnnnnnnnnnnnnnnnnnnnnnnnnnnnnnnnnnnnnnnnnnnnnnnnnnnnnnnnnnnnnnnnnnnnnnnn

SEQ ID NO: 272 - DNA, 1809 bp, Macaca Fascicularis
gaaagtggtggcttggattacatgggcaagtggtagaggtgataagaagtgataggttgtgaccaatggcatttgctaaatggattggatgcacagtgtgagaaaaagagggaaatcattaccagtcaactcagtgaaactgtaggagaatgattttggtaagtatccagatatttttagtaatcaaaatttttaaagagtgtttttttccttttttggtaggaattcatagttttacctaaccttgagatgttgcctgctgcatatttaggaaggagcagctcatcagaagaggtgatcatttagaaagctgcattttttctgagaaataggaatgctgtgaatattgaaggacctgggatagggattgtgctcttcactgccttttggccatatctttcttttgtatgtttgctttctcttaaaggcatacctggccttccagttctttttaatgcagtatcctttatcatattcataggtcaaagagaaaaatcagaatatttttaacagatgccaaaaagacatttaataaagtttaaaatctcctgatttttaaaatgacaacaataaaaacccatggcaaaattaaagtagacaaatattttatgcgtacatatatatgttcgtatgtgtctattttttgtgtatattaaacatgatggctccaaaagcatttttgactaccacttggccaatttgatggattaacctacccattccttctgtaaaacaggccagtgctgctgagcccacacaccaaaagtctgccacttccttctgtgcagtttgcttttgtcttcaccccacttaagtttagtcagctgtgtttattcacaaatctgtttatgccagctgtatttagcattttatgtaaattaattttttaaatatgaaaattgatgaactattggggggcaaatgaagaattcccaggaaaactaagtcaacactttggaaaagagtcactacaaagaactgctgtcaaattaggtgtgagaaagataacaaatttgggggtgatcagtaaaaacattggattgcttcgctaatgtcaagttcgttttctgctttaaagggactagaattcaaaaaagataactttggatctctcgtcaatgtatccatactcccaagaacaggctttgacccttctttaaaattggtacccaagtatacatttatctattttaaactcaaaatgcttaacaggatgtatgttcaattttttgcgatgtcccaccttaatttatgaattagtgacataccagctacagttaccagatacagtaagattttcatgttacagaaaggaggtaaaattatttgcagatatgactgtcttggaaaactcgtgaagtaaatgggaaaaaaatagaaataaggtgcctttcagcttatgtccatgtattacacatttgtgtagtatgtgtttgcagttgtgcctgctttctattcatacacgtttatgccattgttcacaatagtagggcatgatggctgatcaccagtgaatagcagaggcaggtttccttctaatatttacttttgttaaaatgaaccactgatttaattgctgcaagatgacgatacctctgccaaaccaagatgaagtttggcagagtggccaattatgtataaatacgcaaaaaacagttttgattagtaacctgttatataattttaaaagatgacactattcacaaagatgtaaattaccaagaaatgtgtagggcctctataaagaaaacttaatgaaagtaataataaagggaaaataaagaataaaaaaaaaaaaaaaaaaaaaaa

SEQ ID NO: 273 - DNA, 415 bp, Macaca Fascicularis
gggtatgtttaggtgtgtgggtcatggggcaggaatgcaaaaatgagagcaaaggagaatgagtcttaaattatgtgtgaccagcagtgctgtgcgtatttattcctgttgactgaggttgtacgtgctatatggcagcaatgcagccagcatcacccattagttagcatgtgacttcctgaagattattttttttacccactgctgaccccgtattcaatttttcatgctgttccagtcgcaggcttaaggaaaaacatggcgtgctgttgcagaataccagcgtggttagcaggagaacgtcgttatggaacctgcttcttcctgggaagagtatgggcatttttctgctgagcttgcagaaaaaaaaaaaaagaaaaatgagctcaaaatttgcttcgagaggtatagggaa

SEQ ID NO: 274 - DNA, 594 bp, Macaca Fascicularis
aaggatagccacacatttttcttctgaaaatgtaataggctcaggtctagtaatatagatttctgtttttgagtacaatttttttttgtgtgtgtcattttaacactttgaatggaagaggtaataattcataggaactatattgactttgggcttttcttgtagcatcgagttataccttggttttaattcatggaagtacattatttggtagtaatgaatgccatgttggcttttgttatcttacaggcaaattgtaagagacaattttttaactatgctcttaaaaatttaccttactacattcatgagcctgtgaactctattttaagattactttgcatatgctgctgtggtttattcattacttaccagatttcaaatttatattgaaatattaaataaacatcattctttattggtggttttgatatatatatattttttaatgtgatagaaatcacattttgaaaaacagctaatggatatttgtattagttggattatttatccttgtggatactttgcttttgtttcattttgactaatgtcttttggatgtttacagtatgcctggcacagtgttaagtgttt

SEQ ID NO: 275 - DNA, 737 bp, Macaca Fascicularis
  misc_feature (1)...(737): n = A,T,C or G
gacagaagcagcnnnnnnnnnnnnnnnnnnnntatcccataggagaaggagatgccttgaatgcctagcgtagtcgttaccagcctgtggtctctgtcatgtttgctgtcctttaatgttattgaaactattacagtgtcagttttatggttaaaatgtttgtttcattttcactgaaagagaatagtatctcgtctcaaacttgttttcttctcttttgcttgggttcaattcacnnnnnnnnnnnnnnnnnnnnnnnnnnnnnnnnnnnnnnnnnnnnnnnnnnnnnnnnnnnntaaactaatttatnnnnnnnnnnnnnnnnnnnnnnnnnnnnnnnnnnnnnnnnnnnnnnnnnnnnnnnnnnnnnnnnnnnnnnnnnnnnnnnncaaaaaannnnnnnnnnnnattaaagaggttnnnnnnnnnnnnnnnnntatggcagtgagagaccacaatgtggannnnnnnnnnnnnttatatnnnnnnnnnnnnnnnnnnnnnnnaggccagnnnnnnnnacgcnnnnnnnnnnnnnnnagaggtcactttgggatcatggagagggtttattgccattattttgtgaagctggtggaagggcccccaccnnnnnnnnnnnnnnnnnnnnnnnnnnnnnnnnnnnnnaaagagnnnnnnnnnnnnnnnnnnnnnnnnnnnnnnnnnnnnnnnnnnnnnnnnnnnnattcagactccacagtgtatatattttgcca

SEQ ID NO: 276 - DNA, 2171 bp, Macaca Fascicularis
ttttcaaacagccagttcaggtgcacagcaactttttctacatgcagttcccagggaaactgcagaacttagaatttgtactttttgtaaagctatactctatgggaattgcaagcaatatatctatcttagtattgtgtgtgctaatgagagcctcagtggctcccccactctctcagtgtttcctgcttaaagaaccaacagtttaaaagccctctaagatattctgtgtgtcaccaaatctgtgtgtcaccattttttgtcatgtggtgctatttttgttaagtgtctttttaggtcagtatagttgtagaaaatgtgaaatctaatggtaataatgaattataattgttttcctctcttgagttcgtagcttgaaaagagacctcaaaagcatgtgctggcaaacacattactgtatgaaaagatacctgagtcctatttgaataatgttttattagtactttcggaaatgtcttcagttctgtattgtgttcatgtacacaaacaggctttacaagattgcttcggtactgtaaactctggcagagagtaattttataggcggtttggtggtgagtttgtgctgcaggctgcctgtgggatgtcagcgttctggtatctggctgagaacctggggtctgagatgcacaaccagtgcacctccgtaggagaacagtgtagccacctaaaagaaaaaccaacaaaggaccagcctcagaggctagaagttaaaggaatacagaatttgatgtttgctggttttctgtgcttttttggctcttaaaataccaatggtggattgttattttgtttttgttttttgttttgagaaaaaaaagtcattcaagccctttgtgtgtaatagcccccaggggtggcagctgtgcagtcgcatctctttagcacacaggatctgttcacgtgtgaactgctgcgctacacatcagtgttaactccctacagattacactctaatcccgctgctcccgaggagcggcctttgctaaatcgggtatatagtatgcctttttcctcgtcaaactgcctaagtaggggtttgttctctccctgaagcacttgttcaactcctgttaaagccgcgtgcctcaaggggaggctggaccccaagtgtttacccacttaaatatgttctggggtttcaggtaaatgtttgtgattttttttttccttacatgaataagtttggttttgatttttcttttaattgaatgcaaaaaatttgtgttgtgatacaaattaagtttgtgacaagaaatgcccaaatccaaggacataagaggtcaagctcagggaaggaacctccttttcactcaggcttggggccttcagcgaggtctccagagcattccgtggtatgagagacagtgaggagggagggcacctggtgcgggcacctccagcgtcctggctcttggcattgtccgtcttaaccttatttacatggagttctttgtatttgtgaatctgtttaactggtttgagtttaccaaagagtgacttatccaaaattgtctttgacaaaaatatccattgctttgattgtacagttcaggttcaaacattgtaatgggactgttaaggggcagaaaattgattgagtttctctctaagaatcatgattccacattttgcaagttccacttgctcccattcgtgttgctaacactttaccctttccactgctcgcggtgttaagaatgaattctcaagccataacacagtactgtaaagttccgcagggcttcgagggaggcagcgcctaggccagcacggagctgtgtagcctctctgagcgttcgcactgtcatgcttcccaggggcgtgactggtgagagattaactccattcagatcgggcagcagcaattaattgtgccttgccgcatgaggatgtgtcaggaggattaacatgaccacagaaccgaaacattctctccctgaaggttcacttcacgtctccgcagacgaagtacgctgtgtaactccttagagcaactctttttggaaagcaaagtccctatttctgtacagttttaggttaggtgtttcatttataacagatgcagaaatcaattaagataaagtgatatgtgaagaaatcttttacggttaaagaatcctacccatataaaaaaaaaaaaaaaaaaa

SEQ ID NO: 277 - DNA, 766 bp, Macaca Fascicularis
  misc_feature (1)...(766): n = A,T,C or G
tttnnnnnnnnnnnnnnnnnnntgtcactagcnnnnntttttccagcaaggaggnnnngagagaagcagaaatatttgtgacaaaaaattaaagcatttagaaaacttctttgctctcttatttacatagatgcattatacctttcatgtaaaattaaagtgaggaccagatcataccatattgtttccaaaaataaaagggacaacgttggttgttaaaatacaagcatatgtcaaccaaacagcatatatcatatggggctattcatgctccaaacattttattttgagttggccaagtacatacacattaagcagtcctttactcaagatgctggccctacatttccatccatttcagaattcaccagggagctagagattcaggatggccttttgacagccctgcttttctagttttctctttccctctcccttagactgctaattatcttcttcccctcaccagtgactcccacagctccgtggttcctttagcccagatgccacaacctactggcataatctttttcagttggcccacggagtataatcttaaaatttggtttcattgccaggcactaaaaatcaagagatttcacatgtttgcatttctaggtttcctctaaaaatggaaggatctggaagtaaagaacccatgttccctcatagcaatcattatctgatactgagtagtggctgtcccctttcaatggggtctgctttctgtttcaccacagtcctcatgactctctattgcacactc

SEQ ID NO: 278 - DNA, 2081 bp, Macaca Fascicularis
  misc_feature (1)...(2081): n = A,T,C or G
tcgctttctaccaaatccttcccaccttgcatgcgtcagttacataaagccttgcgggaaaatcaccatcttcgtcatggaggccgaatgcagtatggcctattcctgaaaggtattggtttaactttggaacaggcattgcagttctggaagcaagaatttatcaaaggaaagatggatccagacaagtttgataaaggttactcttacaacatccgtcatagctttggaaaggaaggcaagaggacagactatacacctttcagttgtttgaagattattctatccaatccaccaagccaaggggattatcatgggtgcccattccgtcacagtgatccagagctgctgaagcaaaagttgcagtcatacaagatctctcctggagggataagccagattttggatttagcaaaggggacacattaccaggtagcctgtcaaaaatactttgagatgatacacaatgtggatgattgtggcttttctttgaatcatcctaatcagttcttttgtgagagccaacgtattctaaatggtggtaaagacataaagaaggagcctatccaaccagaaactcctcaacccaaaccaagtatccagaaagccaaggatgcatcatctgctctggcctctttaaattcctctctggaaatggatatggaaggactggaagattactttagtgaagattcttaggcagttttgtaaccctttatcctcaaaagccttcattttgtttgtaagattttgcttttgttgttgttgaaaaagggtttcactctgtcacccaggctgtagtgcagtgacacaattacagctgattgtagcctcgacctttccagctcaagtgatcctcctgcctcagcctcccaagtagttgggaccacaggtgtgcatgccatacccagataatttttttaaaaatttttttgtggaggtgggggtctccctatgttgcccaggcagatctcannnnnnnnnnnnnnnnnnnnnnnnnnnnnnnnnnnnnnnnnnnnnnnnnnnnnnnnnnnnnnnnnnnntgtgcctggcctttcttttttttaacctttttatttaacttctctcttcactgcatcccagtccatctacagaaagcaggtttgaggtaaaaacaaagaccttcactatattttgctttgacaaaaggaaagaggaagaatttctattaaaatctatcacttgagtgatgtcatttaagtcctgttttaggagataaaaatagcttttgggactggttaaagtcccccagaaactataatacagttaagaccgacttttgttttaactcttatcactttgtaattttgactcaatccttttctggaccatttttgttaataaatatcaaagtgtacgtgacagtgtctgtgtataattgggaaagtcgtatgtcataacagaatgaagttagctttagaaagccgagcatagaaatgtaggtcttcattgtgttaaaagggaaatattagaagcgctctcgccactgtagttcagtgagaaattttatgatggaatgttttgtatctggcagtttttaaagtggtcatttggaatatccaacacactgcttatcactaatgaagagtttaaacttttctttacctttttttttttttaaagagttgacctgtttttggttattctacatcaggcacctttgagtggcaccaaactctccggagggaactgtgacttgggaattaaaagaaacaaaatttgtatagccagttatatttattaaggaataatagggatattttattatgtaaaatagtggcacatcttatctgctgccattactctggggacaggttcatgaagaatagacaattaccaagcaagaagattgtacatataaagtgtttattttactctccaacttccataccttattacttatgtggttgctgtgaattaccaaatagattcggtaaattaacttcagcaatgaatagtgatacttgtagtaactccctcctttcagtgccagcaatagaatttaataaatgttgtggatgattacagacatacgagaaaaaaaaaaaaaaaaaaaaaaa

SEQ ID NO: 279 - DNA, 711 bp, Macaca Fascicularis
  misc_feature (1)...(711): n = A,T,C or G
ttcattaaaccatgcaaaaannnnnnnnnnnnnnnngcacataactgtctccttaaccactgaacagttcagccatttgaataaattgtacattgtaaagcttatagtagctgattgtattattgattgtattgtatactatattannnnnnnnnnnnnnnnnnnncattttaaaaggtcattgtgttctactgcctattttagattactttggggttggggaagggtgttttggtaagcaggattttaagtcctctctctcttgattggttttatgaagatataaggttatgctcttactaccaagctcaggattcttgattttaaaggtacaaggatagttgtgggagttttatttttggttatatttgaactgtatgaatggtgggtctgaatattgagaatttccatggtcttatgtggaggtaannnnnnnnnnnnnnnnnnnnnnnnnnnnnnnngcaacatgttctggttgcacaacagttaggcatgctatggtttatatttgtgaagtttggatgcctgtgaagaatgattaaatacatgtttctaatattttagtgttttgtatttaggttatttattctttgtatctaaaactgaacagctactgtgctatattgattttattggtagtattgagcagaccttgtttctgcatgaaactagttgcaaaacccactatttggaaataaaaatgtatttgac

SEQ ID NO: 280 - DNA, 779 bp, Macaca Fascicularis
  misc_feature (1)...(779): n = A,T,C or G
gcattcagtaaggngagtaaaaagaatgaataaactgccaagttaaaattaaatttgggcaattnnncttttgcagcaatgtatgtatatttactgaaaacatgtatgccaaatttagtgttgaaaggctcattcaaatcaattgggaaagcatgtaaatgaacaattcataaaagaaaagcattgcaaatggccaagagcatagaaaatgtgctcaatcttatcagtcattataatgaaataatgaaatttgtgtacatatgaaatatatacttaaaatatatataaaaacaattatttgccttttttcacctatcagattaacagatacatgtgttaacaaggtggggagaatttacaactcctgatgtgttaaaatctttaaggaaggtagtagaaaatatatataaaatggaaattagcacttttgaccaacaattttggttttagatatttacctataaggatataataggaggtgttcaacgatgcatgtaaacttaagggtactcagtgtagtgttaattataattgtaaaatagtaaataacatttttgtcaaatcataatggtagaaaaattagtgatggcacatttaaccaattggactatattcagttatgaatacggtgatgcatgttcaaattaattgatataaaaatccaacaacttcagcagtttatttgccagttattgagtaccaactgtgttcaacattgttatttctattcatttgaaatgataaatgtatgtgcttgttgtgatatggtcaataaaacc

SEQ ID NO: 281 - DNA, 2292 bp, Macaca Fascicularis
gactagggagtgctgcctccgcgactctgaagccggaagatccgtaactaagggcaccagctgcaggatcacacccctctggccttgtgatcaagtcagtgtaggatatggtctgctgtggaccataagttcctcttgttcgagtttcaattttgtaagtttctcttttttgctccccaatacagtgctacaggagggagggtgttttgttttgttttgttttgttttgttttgttttgtttttggcgctgaggaaacagactttgaaagagtaaatgatgtgaacaaggtcacgtaagaaaaggaacacatttattctttgtctattgtatcttagtgaaaaatgccacgaactcgtctgtggataagagaggaaacaagaatgttgggggccatacaaataatgactggtatacttcttgattgcctgggactgctctggatgtatttgtttttcacacaaattgttgcatttggagcggcatatactcctattgcattactaacagcatacccattttggtcatcctggctttttatcttctcgggagcctttacagtattgttagaaaagagacgttcaccattcttggtgtcttacgctttagtagtaaacatcataagtgcctgtatttcagtgattggtctgcttttactatcaattgagtttataaaatatagtaaaagttcaaaaaatccactttggccacaaaaactggtaaactcctttcggaatatctgttcatattaaccatcttggagttgtctgtcacaagtatagtcatccactgggcattccaagcaaaatatacaggaagataaaaatgcagttcatagcagaaggagatcctttttctacatattaaagaaaccatcggtgagctcagtcaaggacgaaagtttagtgacagatgaagaacttcattctgttcaagaggcttcttggaagcacctgactgcgaagtgctatccgtgcgagaacagctattccacgagaggatccgcgagtgcattatctcaacacttctgtttgcaacactgtacatcctctgccacatcttcctgacccgctttaagaagcctgctgagttcaccacagtggatgatgcagatgccacagtcaacaagattgcgctcgagctgtgcacctttaccctggcaattgccctgggtgctgtcctgctcctgcccttctccatcatcagcaatgaggtgctactctccttgcctcggaactactacatccagtggctcaacggctccctcatccatggcctctggaaccttgtttttctcttctccttctccaagctgggctcctttggtgccgtcgttcaggttgtactcatcttttacctaatggtgtcctcagttgtgggcttctatagctctccactcttccggagcctgcggcccagatggcatgacaccgccatgacgcagataattgggaactgtgtctgtctcctggtcctaagctcagcacttcctgtcttctctcgaaccctagggctcactcgctttgacctgctgggtgactttggacgcttcaactggctgggcaatttctacattgtgttcctctacaacgcagcctttgcaggcctcactacactctgtctggtgaagaccttcactgcagctgtgcgggcagagctgatccgggccttcgggttggacagactgccactgcccgtctctggtttcccccgggcatctaggaagacccagcaccagtgacctccagctgggggtgggagggagaaaactggacactgccatctgctgcctaggcctggagggaagcccaaggctagctggacctcaggacctggaatctgagagggtgggtggcagaggggagcagagccatctgcactgttgcataatctgagccagagtttgggaccaggacctcctgcttttccatacttaactgtggcctcagcatggggtagagctgggtgactgggtctagcccctggtcccaaatctgtttacacatcaatctgcctcactgctgttctgggccatgcccatagccatgtttacatgatttgatgtgcaatagggtggggtgggggcagggaaaggactgggccaggccaggcttgggagatagattgtttcccttgcttctggcccagcagagcctaagcactgtgctatcctggaggggctttggaccacctgaaagactaaggggataggaggaggcttcacccatcagcaataaagttgatcccgggaaaaaaaaaaaaaaaaaaaaaaaaaaaaaaaaaaaaaaaaaaa

SEQ ID NO: 282 - DNA, 593 bp, Macaca Fascicularis
  misc_feature (1)...(593): n = A,T,C or G
gaaggggggaattggggtccaccatagtgtnnnnntatggtcctccatgggtggaccaggatggagtctcttgcctacctcnntgcgatgcactgganctgggatgcctatccacccnnnnnnnnnnnnnnnnnnncaggttgtttgtgaagagactaggggatcccatcacctcaaagccagagggtctccaagtcacagctgagagcacttgagcctcacggatgtaagcctgaccacaggactccaacagcggcaacccccgcccccatccccaaagtggtccgtccttaannnnnnnnnnnnnnnnnnnnnnnnnnnnnnnnnnnnnnnnnnnnnnnnnnnnctagcatccccctcctaaagctttagactcagagcccatggtcccccacaagcctcaaggtagcctcaggtttttctgatttcctccactcccagttggaagcaaacagcttactgcctagtccccaccaaacccaaggaagggnnnnnnnnnnnnnnnntggtgggctggccagggtgtggagtgaaagagtcactgtggtgggagcgagaggaggacttgggagctggaggtgtgacaccttcag

SEQ ID NO: 283 - DNA, 2196 bp, Macaca Fascicularis
  misc_feature (1)...(2196): n = A,T,C or G
tcctgtttgtaattactattagcattttgccagaatgtttctgttttctagttattaaaagaagcgacagaatcgaggcacaaatacgaacaaatgaaacagcaagaagtacaactaaaacagcaggtaacttcacagcaggggagagtacaatttgtaagaaaaatctgtggttcctttgattctgcgtatcttcagtctcctctaagatggttttgctttttgctttttcccagccagagctgaccaggattgaggcagaaatctcatggccctcttgggattttccacttcatttaggttaactacctcatcgcaatttgcccagcactttcctgggtttagtactgaaagccttgtgtcccaggagatgccccatctcagccagcctgggatggttggtcagcctgtctccagtaacctttccaagagtccagataattcctccctttttcagtctgttcccactacatttcccactaaaggaaaactgagacatctgcatattttatttattttgtattaagttgaactgcatgaaattgctaaagaagacaagaatatgtccttggcctaaaaaaatggcagtttcatgtcgtgaactctaatatttttagagttttgtgctataagcacataagttattttaaaaactacatatagctgggcgtggtggcatgcgcctgtagtcccagctactcaggagtccgaggcagcaggatcgcttgtgctggtgtttttcatcagggccttccctctcgctcagtccagaccctgtaagtgtgtcctactgtgatctctctctgtggttaccttgtgtggaatgagtgtaggaggagctatctccttagaaaaaaaaaaaaaaaaaaaaaaaggtacaggaaagacttgctgtggctttacagatgggtaaaattaggcgtttgtacctgtacattcatccttttttcagttaactagattacatttggctgaaagaagtgttacttatttaaaagtttatcataagttttcgtgaagactctagattagctgtgatataacactgatatcttgagactgacgtggtcttcacgcgcacctctttggagcgctgcttttctttgggaacatcttacaatgtggtgaatttaaggtcctataaagctagcctaactgagtgtgaatattcaagagtgtcagatatgaagaatctttggaactgaaggtcatgccagaaagcttcaagatttgaatcccttacttatcagccctatccagtcagttgtccatgtaaatagagatgagaattgatgtggagaaggtgtaaagtctccagatggttttggaagatgttcctgaatgtgggagtcattgataatgctgcagaagtcaccagagggcccttttaccaagcccgcaggccagctcccattctgttgtactgtcaccaccgtagcttctgctgtctgtgatctgtaccactcagagtcctcttatccagtcactattttgtttcctttgctgtcacctcttgttttcctctacctaaatgtggccgtccttcccaagcatatctccccttttctgctgtcactatgtcatttcccagcatctgctgctgatactttgtgctgtcttgacccgctgttttataatctagccatggaggtccatgtgtgatgataggggccacttactggctacccatcgggccagcgttggactctcacatgggacagtctttatttggatgttccatcttcaataaaagtggaccatggctgccaggcacagtggctcgtgcctgtaatcccagccaaggcgggcggatcgcttgagcttaggagtttgagaccagccagagcaacatggtgaaaccccatctctataaaaaatacaaaaattagcnnnnnnnnnnnnnnnnnnnnnnnnnnnnnnnnnnnnnnnnnnnnnnnnnnnnnnnnnnnnnnnnnnnnnnnnnnnnnnnnnnnnnnnnnnnnnnnnnnnnnnnnnnnnnnnnnnnnnnnnnnnnnnnnnnnnnnnnnnnnnnnnnnnnnnnnnnnnnnnnnnnnnnnnnnnnnnnnnnnnnnnnnnnnnnnnnnnnnnnnnnnnnnnnnnnnnnnnnnnnnnnnnnnnnnnnnnnnnnnnnnnnnnnnnnnnnnnnnnnnnnnnnnnnnnnnnnnnncaaaaaaaaaaaaaaaaaaaaaaaaaaaa

SEQ ID NO: 284 - DNA, 4501 bp, Macaca Fascicularis
  misc_feature (1)...(4501): n = A,T,C or G
ttcgattttatggtgaaaaaccatgccacatggatcatttggatcgaatcctactgtctggcatctataatgtacgcaagggaaagacccagctgcataagtgggctgagcgcctagttgtcctctgtggtacttgccttatcgtctcctcagtgaaggactgtcaaactggaaagatgcacattttgcctctggttggtggaaagatagaagaagtgaagcgacggcagtactcccttgctttcagctcggcgggagcccaagctcagacgtatcatgtcagcttcgagactttggctgagtaccagcgatggcaacggcaagcatccaaggtggtgtctcagcgaatcagtaccgtggatctctcgtgttacagcctcgaggaggttcctgagcatctcttctatagtcaagatattacctacctcaacttgcgacacaacttcatgcagttagaaagacccggaggcctcgacacactctacaaattttctcagctgaagggcctgaacttgtcccataataaacttgggttgtttcctatattattatgtgagatctctaccctgactgagctcaacctttcctgcaatggatttcgtgacctaccaagtcaaattggcaatctgctaaatcttcaaaccctctgtcttgatggcaactttctgactactttacctgaagaactgggaaatctacaacagctttcctctttgggaatttcgttcaacaactttagtcaaattcctgaggtttatgagaaactcactatgttagataaagtggttatggcaggaaattgcctggaagtcctgaacttaggggtgctgaataggatgaaccatatcaagcatgtggatttaaggatgaaccatttgaaaaccatggttattgaaaatctggagggaaataaacacatcacccacgtggatctgcgggacaaccgactgactgacttggatcttagctccttatgcagcttggaacagctgcattgtgagcggaaccagctgagggagctaacactcagtggcttctcccttcggaccctctatgccagttccaacaggctgacagcagtgaacgtctatccagtacccagcctgctcacttccttggatctctcccgaaacctgctagagtgtgtccctgactgggcctgtgaagcgaagaagatagaagtattagatgtgagctataatcttctcacagaggttcccataagaattctgagtagcttgagtcttagaaaactgatgctaggacacaatcacgtgcaaaacctcccaacactggtagagcacatccccctcgaggtgttggatcttcagcataatgcactcacgaggctgccagacaccctcttctccaaggccttaaatctcagatacttgaatgcatctgcaaatagtctggagtctttaccatccgcctgcactggcgaggagagtttgagtatgttgcagctgctttatctgaccaacaatctcctgacggatcagtgcatacctgtcctggtggggcacccgcacctgcgaatcttgcaccttgcaaacaatcagttacagacctttcctgcaagcaaactaaataaattggagcaattggaggaactgaacctaagtggcaacaagcttaaaaccattcccacaaccatagcaaactgcaaaaggctgcacacccttgttgcacactccaacaacatcagcattttcccagaaatactgcagttgcctcagatccagtttgtagacctaagttgcaatgacttgacagaaatcctgattccagaggctttgcctgctacattacaagaccttgacctgactggaaatacaaatctggttctggaacacaagacactggacatatttagccatatcacaactctgaaaattgatcagaaacctttgccaaccacagattctacagttacatcaactttctggagccatggactggctgagatggcagggcagagaaataagctgtgtgtctcagcgcttgctatggataactttgcagagggggtgggagctgtgtatggcatgtttgatggggaccgaaatgaggagctcccacgcctgctgcagtgtacgatggcagatgtgcttttagaagaggtacagcagtcgactaatgacacagttttcatggctaacaccttcttggtatctcacaggaaattaggaatggctggccagaagttgggctcctccgctctcctgtgctacattcgccctgacactgccgatccagcaagtagctttagcttgactgtagccaatgttggcacgtgtcaagcagtcctgtgccgaggtgggaagccagtgcccctctctaaagtcttcagcctggagcaggacccagaggaggcgcaaagggtgaaggaccaaaaagccatcatcacagaggacaacaaagtgaatggggtaacctgctgtacccggatgctgggctgtacatacctctacccttggatcctccccaagccccacatatcttccactccactgaccattcaagatgagttgctgattctgggaaacaaagcattgtgggaacacttgtcctacacagaagctgtcaatgctgtacgtcatgtacaagacccattagcagctgctaagaagctgtgcacgttagcacagagctatggctgtcaggacaacgtaggggcgatggtggtttatttgaatattggtgaggaaggctgcacttgtgaaatgaatgggctcaccctcccaggtcctgtgggatttgcttcaaccaccagtatcaaggatgcccctaagccagccactccatcctctagcagtgggattgcctctgagttcagcagtgagatgtccacctcagaggtgagcagtgaagtggggtccactgcttctgatgagcataatgctgggggcctggacactgccttgcttccgaggccagagcggcgctgcagcctccacccaacacccacctctgggctgtttcagcgccagccttcttgtgctaccttctccagtaaccagtctgacaacggcctggaccgtgatgatgaccagcccgttgagggggtcataaccaacggcagcaaggtagaggtagaagtagacatccactgctgcagggggagggatctggagaactcaccccctctcagagagagttctcctaccccgtgttctgaggaacatgctagagggtcgtgttttgggatccgaagacagaacagtgtgaatagtggcatagtcctgccaataagcaaggacaggatggagttacagaagtctccctccacctcctgcctctatgggaagaaactctccaatggctctattgtgcccctagaggacagcctcaacctcattgaagtggccacagaagtgcccaagaggaaaactggctattttgctgcccccactcagatggaaccagaggatcagtttgttgtacctcgtgacctggaagaagaagtgaaggaacaaatgaagcagcaccaggacagccggctcgagcctgagccccacgaagaggatcggaccgagcctctggaggagtttgacacagcactgtgaccaccccactgggcacagtgtgggaggaggctgtgcagggttggggtaggaacctgccagaggcattctgcctctacatttctttttgttggttttggttttttttgtttttttttgttttttttttttttgnnnnnnnnnnnnnnnnnnnnnnnnnnnnnnnnnnnnnnnnnnnnnnnnnnnnnnnnnnnnnnnnnnnnnnnnnnnnnnnnnnnnnnnnnnnnnnnnnnnnnnnnnnnnnnnnnnnnnnnnnnnnnnnnnnnnnnnnnnnnnnnnnnnnnntctttttttnnnnnnnnnnnnnnnnnnnnnnnnnnnnnnnnnnnnnnnnnnnnnnnnnnnnnnnnnnnnnnnnnnnnnnnnnnnnnnnnnnnnnnnnnnnnnnnnnnnnnnnnnnnnnnnnnnnnnnnnnnnnnnnnngccctgcctctacatttctaaaccatagctgtgtggggttgaactcggagccaaaaagagtgagagccatcagtggctggctctggataaactagtagccaccatcagtgttaagtttgatatttaacctgcattggaattcccaggggtactgggaagaaagcagctgttctgtgtcagtcctaccacctgccattaaccctttctctcctaggatcattttgagaatttgcctgcctgggcaggaaagggactatttatgtggaggaaaaaagtgaagatcgattctctttactaattgctgctgatggatctctgtgatagagaaatcaccttatctcagactaatggggtgtgatgtgactagtcacatggctattcattcttctctacgagaatacagcctatcaaaatgatgtctgttggaaatgtagaaccaatcaaacataatttatgtatgtaatgtaataagagcacttttcattgactgtgaaaaaaaaaaaaaaaaaaaa

SEQ ID NO: 285 - DNA, 1352 bp, Macaca Fascicularis
  misc_feature (1)...(1352): n = A,T,C or G
aggagattggatntgctatgactagatacagatggagcaaatgtcctaaccgagaaaagaggtgatgctgctaaagggagaaatggcaggtggacaaagttcagtgttgggaattnnnnnnnnnngattcactggggcatgagattttggaagaaattttttactttggtttagcctttttttcctttttatttcagaatttctggtgggttgatggtagggtataatgtgtctgtgttgtttcaaattggtctaaaaggctgtcctgctgaaagtcctgctttcctatctagcatttatttctctggcaaacttttctttctttcctttcgtttttnnnnnnnnnnnnnntattgagtcttaattgtatttcagtattttccagccttacgtgttacattattccaatgatacccaacagtttatttttattatttttttaaacaaactttcacagttctgtaatgtaggcacttttattttcgttgtgatttatatataaggtaatgtagggttatatttgggagtgactgcaagcatttttccatctgtgtgcaacgaactgactnnnnnnnnnnntcccctctcctgccctttcctaggtaatttaaattggtcatggtagatttttttcatacatttgaaaaacttttaggttgttaccaagtatgaagtataaatctggggaagaggctttatgtgcattttagggtgggtaagaaagccaccttgttacaaatcttttaatttccaaaataatctatattaaatgagagttttctgatctgtactttgtgtttagctacctttttatatttaaaaagttaaaaatgaaaattatgttcttacaagcttaaagcttgatttgatctttgtttaaatgccaaaatgtacttaaatgagttacttagaatgccataaaattgcagtttcatgtatgtatataatcatgctcatgtatatttagatacatataatgctttctaagtgaattttactcttaaatcatttgacttgctgtttactcccttctgtagtttttaattaaaaaatttaaagataagtctacattaaacaatgatcacatctaaagctttatctttgtgtaatctaagtatatgtgagaaatcagaattggcataatttgtcttagttgatattcaaggcttttaaaagtcattattcctgggcttggtaagtgaatttatgagatttactgctgtagaaagtatagatggccaaaggaccgttttgtattgcttcctgattaccagtctgattataccatgtgtgctaatatactttttttgttatagattgtcttaactggtanntcaagtgcctacatacag

SEQ ID NO: 286 - DNA, 615 bp, Macaca Fascicularis
aatggatggggtttttttaatgggttgaacctctgttaatacttttgtatgctttcactacaatttatatttttataggctattttctcaaggtgtttctagattccacatatctattttatataacaagttcttacgttatgtgtgtgactcccttgtatctgtgccagcctgagcctccgagttgctcttccctctggccctgactctcactgactcgctgttgtgatgtgcgggcccacttcttaccccaggtagccccgggcgctgcctgtagtcatgctgacagctgtacagtagccgccaagactgctgatggcatggagacggttctggttccaagtatggtatattgatataggaagtatcgtagacagatgctgggttgggttttctaagtacaagtttgtattgcagagatctccacctgccattctatagtcttgtcttcgtgtgtgttcctgggcttgtgggtaggtgggcctgcccggggaagtccttgcaggtgggaggccatacagagacctagtgtgtgccattgagtgtcccaccattgcattggcaaactggaggagtgcagggggcgccaggtgactttctctttgtatgtcacag

SEQ ID NO: 287 - DNA, 763 bp, Macaca Fascicularis
  misc_feature (1)...(763): n = A,T,C or G
cacacttagtgannngaggtttcgcagagtagatttgnnngactcatggtttattagtctggattacttaagaacaatatgttgattttaatgttaattcccactaaatatataatattgataaatacatgtgaaattaatattgttttgaaaatgtagaggannnnnnnnnnnnnnntgaatgcttttttcttaataggtttggtgtgtgtggcttaggttctgctgatgcatcatggaaagacagcagtgaactgtagcctgccatcaaaactgtatcaactcttttaatgagcatgtgactgtattnnnnnnnnnnnnnnnnatataagtattgatgataaagtctaatatgcataataggattttggaggcatttcaggaattttccttttatagtatgctttttaggcatctgtatgtgtaatgtcatggtatcatttattgctgggatggattgaaaggcactgcttttacttttctgataagtatcaaaataattttctagtacnnnnnnnnnnnnnctttaattattgtcacgcacacacacaattcaactcaaggtttgggaaaagtgtatttttttctatacaagataaaagtgtcataaaaaggaatggatgaattgttgataggaacattagcagttaatttttacctgatactgagtttactgcataggaaggaatacctcttaaataatatgccttatagaatgatgaaatcttaccatagttcgtactgaaaatgtttattaaaaagt

SEQ ID NO: 288 - DNA, 770 bp, Macaca Fascicularis
  misc_feature (1)...(770): n = A,T,C or G
ctaagtacagatcattcaaggtggccagtgaggcggagaagtacaagctggtcctggggacctttgtggagggcagcgcgggtgattctctgacataccacaacaactaccccttctccaccaaagaccgagacaacgaccaagatgctaaaaactgtgctgtgcactatcagggagcctggtggtatgccacctgtcacctgtcaaacctgaatggtggctacctcgggggggcccatgacagctttgcaaatggcnnnnnnnnnnnnttcggggaaagggtacaaatacagnnacaagtgtcggagatgaaggtgcggcccacctagcccggcgctgaggtcagagggtctctccacgaaccctggctggaggagcgcatccctcagccctcaccaagagggcaacgtggggatcgtggcccccatcctcatggaaagagggagctcccaccagtcccttgtaggcatggcccacagagctttgcgcccagtgccagcgtccagccccctgcctcccatctgcaaggttaggcaaagccccagtgtgcctcactcaccgcagctgtcagtgcttgcttgcctcacaggcgatcatggaatgccatggctatttgccctgccctgaccactggccatgccactgtgctgctcatccgtccttgcttccctgcgacttggccctgtgggtggatcagatgccctagggctgagggggtttcccactggctaagacaaagcagggccaccctgcatgttggtgaataaagt

SEQ ID NO: 289 - DNA, 688 bp, Macaca Fascicularis
  misc_feature (1)...(688): n = A,T,C or G
tcttaagaaccaccattccagtggctgctcccacagagccctctccaggcccttcccccaccaccctgggtatccctagcacctgtaggacagcatcgttgaaacattaggggtgctggggtctgagagggtgtcctcctggtacagtgcccgctgaacctcctgcctgtctttagacatggacaaggaagatgcactgatctgttttgaggagcacattcgagctttggagagggaagaggaggaggaacgggagcgggcccggcttcgggagcgacgccaacaacgcaagaatcgggaggccttccaggtatctttgccatcctttctagatcagagctcggctctgccctagagcacctcttcacccattccctgcccctttttggataggctgcctgttctttatgtgcctagcctgtccaagctccatgagacctctctctgcctgcagtctgtttctgctgtaccccctcaattctggactgtgctcttctagggagactagatgtatgcaccacccagaaactgccagcagagagcaccctacaggcacgacttggcagctaggccatgtttatttcccttggtggggcgccagacaggcagagtttattcccccaccttgcaggtggtagtggggggtggtagtgctacgggttactgcangcaggtttctgtttctttg

SEQ ID NO: 290 - DNA, 593 bp, Macaca Fascicularis
  misc_feature (1)...(593): n = A,T,C or G
agagggctcacgacaggttttggctnnngctttgcttttctttttgaaagagtaaaagtactgatgcttctgatactgnnnnnnnnnnnnnnnnnnnnnnnnnnnnnnnnnnnnnnnnnnnnnnnnnnnnnnnnnnnnnnnnnnnnnnnnnnnnnnnngaaatttataccannnnnnnnnnnnnnnnnnnnnnnnattaaatcaatgtagagatannnnnnnnnnnnnnnnnnnnnnnnnnnnnnnnnnnnnnnnnnnnnnnnnnnnnnnnnnnnnnnnnnnnnnnnnnnnnnnnnnnnnnnnnnnnnnnnnnnnnnnnnnnnnnnnnnnnnnnnnnnnnnnnnnnnnnnnnnnnnnnnnnnnnnnnnnntactgttatgattttgctttttacagatgttggacgannnnnnnnnnnnnnnnnnnnnnnnnnnnnnnnnnnnnnnnnnnnnnnnnnnnnnnnnnnnnnnnnnnnnnnnnnnnnnnntttattttattatacattgtgtccctgttttnnnnnnnnctgctgttttttattctgtttacaggnnngatttttaaactgtcaaatgaagtagtgctaacctcag

SEQ ID NO: 291 - DNA, 699 bp, Macaca Fascicularis
  misc_feature (1)...(699): n = A,T,C or G
ggactgcttttgtttcctggtttcanttnnaggctggccctctctacataatgggccagtgtgagctccaagcccacatctttacgatccatgattcaaaagggagagagagaacttcctttttcagggttcacaaatcaaatcctataaaaggactctggtcttcccaggatcacctgcccttgcattggaccagtccctatggaaaaggggatgggggcctgtgatcttggccaggcctgggctatctgcgctgtcattgctgactcctgtcagaatcacatggatgagcannnnnnnnnnnnnnnaaaggaaaggggtttagagcaagtggaaacaacagatgttcactatagaagcaagaatgaaaaccatgaagtggttgaaaattagccttaattttattctgatcacttaatacagtagagtcaaacaggaatccaagtttccaactttacttttggcattgaagaatcacaaacaaccctagcgtctttataccttcatggttcactggagttaaagcagtcagggtgttgtacagctcacttgagtttgtaaaggttctactaaaaagtgagaattccaccccagcatgggtcattgttgcagagtatcacaaaggtctgttgagtgtaatccttttcactgggaaagggatagtcatggtttttttcactgtatnnnntatttaagtga

SEQ ID NO: 292 - DNA, 758 bp, Macaca Fascicularis
  misc_feature (1)...(758): n = A,T,C or G
tagtagggagttnntgtaccatgntnnnaagattgtatttcataatggaagtaactttatagttgtgagagttttgatgctggagggcatttttcagaggttaggtagttctgttacctgtaaaaaaatacaaagattgacagctacttatgattggttgagtgtgaaagatgggaatgagatttataataactgaagtttcttgagcacttactatgcgccagacactgttccaagtgctttatatgggtggttgttttaaccccctcagctacccttaaaagtaggtgcgatcattattttccttttataaatgagaaaactaaggctaagctatgcccaaagtcacacagagtagtcaggaaaagaacccaagtatattgactttagaatatgcccccttaacctctactttttgtcaaaacatttcaagaaattcttttctaaatccattatcacatatgtagtgatatttaaaatctacttaaaatgtttattgccttgcctttattaatactgtattttattttttcccagaagattaaagttgtgtattcaccttgagttaccaaactttaggtgcttctaatttgtttggtttcatgttaaatagtggttgcttctaatatttttatgttcatttttgggaatgataaataaactgttttccaagtatatgccaatatggaaaatttgcttaatcgtatatttgataacagtgtttacatgttgaatgtactattcttgaatatttgttt

SEQ ID NO: 293 - DNA, 722 bp, Macaca Fascicularis
  misc_feature (1)...(722): n = A,T,C or G
tgtagttttttaatatatacttgaaggaaatgtttcaccttatttttggtctttgtttattcatttagatcctgcaagttgattctcattaattgtcagattccactaccctttcttcctcataggtagtaattaccaatgtaactaagcatttgtgnnnnnnnnnnnnnnnccagtaactattaatatctagttctcaaagcatttggaaaggttatcttaaatggctacctaaagtgaaatcctttcagagaaaatataattgcaagtaggtaggagtggcctcaattgtctaatgtaataaagtcagacaaaatgcatactttatagtttcaagattttcagtatataaaatctgtccattcctacctggacatgtcccattaaaaagtggaagattttaaataatttctttacagatgttttatttaagcaggtagcacaatctactaatgttgtttgatctgtgtttgttatactggttgtaattaatttttttaattcatgaactagcagaaaatttattaaattaactattaactacattcaccttgtaaattactgtataaaacttgttgacaatgcactgacattagaaagatgttaatgtacataaatagagtgtaaataaaatagtgttgatgtactgaaatatgaactgtataaaaagtattggtaattgtatatggggtgtacctgtttatctgtaactatatccaaac

SEQ ID NO: 294 - DNA, 2233 bp, Macaca Fascicularis
tattcctacgctagtccaccttcctataaataagatgtattgagatgctcaatcctacagtcgcccccactctgacagcatccagtcgagtgaatcctcacttccttgaaatcacccaaccagggccagaatcctaaaagaggttctttgtgacattctctgtctgagaagcccatggttctctgtgatgaatagacccaccttgttcaaatcaggcgtttctggtgggctttggctaaaggcattcacaccccccagtgaatgtcttgcgcttctcattgtgtctcggggcgtgcctggtggaggacctgactgagacaattgtgactggatgtggtctgagagcaggcagtagcatggggcttggggactggctcactcactgcccaactgacagcaaaacccatctggagcagcgtgtgaggtatggacagtcacctcacgagggggtgacccagttgctgaggattccactagtggtgccctgggaaaatatccctgtggaggggaatgtgaggagtcaaacctgtgggaggtaagaggagtaccgcaacaaggacagtagagtgtcagttccctgcagagggatagtgagaaactgatgaggtgactgtgagtgcctggggcctctgtcattatcttggaggcgctggtagaaataatcaaaaccaatactgaggccagacggtgactcacgcctgtaatcccagcgcttggggaggctagggcgggcggatcacttcgaggttaggagttcgtgaccagcctggccaacatggtgaggccccgtctctactaaaggtacaataattggcgtggtggtggttgcctgtggtcccagctacttgggagggtgaggcgggggaatcgcttgagcccgggaggcggaggttgcggtgagctgggattgcaccatggcaccccagcttgggtgacagagctagattccatctcaaaaacacacaaacaatactgcatcctgggggtggaggtgaggtgacagtcaagatcagtgctacccttggaaatctgacagatgcagtaagacggtccttatcatagttccatttaatttgccagcctcgtctgcagaatccagatggatcctggagaaaaattaaccaagtagtctcaatcacaattgctgggttggatattacatcaatgttagagcagttaagggctcaggtatgtggtgtgcaagccattgactaggtgaatccattcttacctaccccaattacaaaacagtttgcattcatgtggaacagatagtattcccttcagttttgctacaggaacatgttacctcttccatacgtcataatatcccattttttctctctcctaacttaatcccgaattggataatttctcttcatctccactgtctgtcacttctgtgccatcactgtcatctctagaccactctgctcttgagagattgatggaatcattatgcaaactaaaacagaaagaatgttttatctatcaaattgtatttctttgtcaatagtgttgggcacagcaggttcatttactgcaggtaagggtgtaaattgctagaaacttgctgaatggcagtttggtaatatcaaacaaaaagcttaagtttgtgtccttaaatgccttacttcaatactcaaggcatatggcctcaagaaaaaattatagaagcatgcaaagattttgttaacaaagatataatcattgcagggtagaatttagaaatttaagaagatctttcaggcgcctgcaacaagaaaggagtcaaaacagatgtacagtcttaattagtaaaattctcttcctgcccggggatcacacctctaggactgtgagtgacacatttccattgtttataaattatccagcataagtaagatattttgttagagcagcctgaacgaactaagatactctaagcaggaaactcacaaaaaatatttggtaatgaaaaacaatatggcgtgttaatgtatgatgacaagtgtttgtatttaaaaatgtattggggcctctttttgattaggcggtaaatttacctttaatatgtaagtttgtttgacagttataatgtataatcagctttttttttaaggtgatgtgattgaggttaatgtgaagtgaactttctatttccaagctgtcttcatctcattttacctttctgtggaaaatcaatacaagtcaactatttttattgcccaaaaaaaaaaaaaaaaaaaaaaaa

SEQ ID NO: 295 - DNA, 725 bp, Macaca Fascicularis
  misc_feature (1)...(725): n = A,T,C or G
cattttttcactgaacnnngatcaatactctaaaatgnnngtcatcctttagaatagtgggaattaaagttgaggagttttccatctctaccaaatccttaaccacaagcagcattctattacagtatgaagaattgtctcataagttaaaactgtactcttctctaaccttcctctcactcctacaaggtccttttctcaagtcatatttttgagagaaatgtgtggttctttctcacaggnnnnnnnnnnnnnnnnnnnnnnnnnnnnnnnnnnnnnnnnnnncatcagacctttttcccctcatgaggttcagtggaaccattctagttaaagcagcatgaactgaactcagtttacattcatattctatgggcaataccatttggtttttggaagtgcttatctgctgttccctatcaagtattaatgtaggaatgtcacgtgggctgcgttgcactggnnnnnnnnnnnctgcggtgctcccactgatgcgtgcttacgtgtgcttctcacctccggagcgcaggcaggtgtctgcagggtcccagctctgaatggatgcccgtgacacaactggggcagcccttgcttttttgcttgctctcccacagaagcctttgtccttgcaactttatcctttgcccctgactgggtcccaaatannnnnnnnnnnnnnnnntaaacttgctcattttattaaaattcttttagttctttgttct

SEQ ID NO: 296 - DNA, 733 bp, Macaca Fascicularis
  misc_feature (1)...(733): n = A,T,C or G
ctagagtcatnnnnntaaaattgtggacctgatccttccatctcccaactgaaagctntncatttgcttcctgttctcatgagtatgtcaaaatgtattaattctgggctgggaggccctgaggaatttggtccttccctcctcccccattgttttctgtgctttgccctcactggcttgcttttgtcttccttaaatacatcctattctctcctattttagacccttttcctagagggtatggaaacatttatttctgtaagcttattctatatagatgggaaatttttaaatcaaataaggttctaagggtatatggacaattttcatgatcataacattgttcataacttccatcattattctgtagactctaagggcttacttagctcgtgtaagaattatccttcaaaaagcatttttaaggtattagtgttggtaatctataaactttgtgcaagaagtcctcaagtcaatagcaacatttatttaaagtacagtttgtcatatataataaacctctggtatattttcctttattatgtttgttaaaaacacagtatatatgggagaaataattaagaatcattaaatcnnnnnnnnnnnnnnnnnnnnnnnnnnnnnnnnnnnnnnnnnnnnnnnngtaatcaagaataacttgtatcagattcccttccagtgattnnnnnnnnnnnnnnnnnnnnnttacatacctgtagcaagagaccacttt

SEQ ID NO: 297 - DNA, 695 bp, Macaca Fascicularis
  misc_feature (1)...(695): n = A,T,C or G
tgagtgtgcatccactgtgaatggagcgaactgccctatacccattgataaccaagctttcttattttgtggatgtaggaaacaaaatagtgagagagagagaaaggggtacacagggcatggtatattgatcagcagtgggaaaaaagtgcatagatcatttagtccaagaacttaaaactaaatagagccataatttactttggagagtcatttgaatttgtctttggtaccaacgagaagacagagccaaaaacaaactctccaagtgtattcacactttcaacaaaatttttgcatgccttctatgtcgtaggcatttttagttcctggggatttggacatagctaagtcagaggaggctgttgctcaccatgaacactgtataccagaaggagagtggggaggagacaaacaacaaataagaccacttcagacaaagtatcagttaagagaagaaaacaggcctgacgcagtggttcacgcctgtaatcccagtactttgggaggccgaggttggggcatcacctgaggtcaggagttcaagaccagcctggacaacatggtgaaatcccatctgtactaaaaatgcaaaaattaactgggcatggtggcaggcacctgtaatcccagttactggggaagctgaggcaagagaatcgcttgaacctgggaggcaganggttgcagtgagc

SEQ ID NO: 298 - DNA, 727 bp, Macaca Fascicularis
  misc_feature (1)...(727): n = A,T,C or G
ttatccagctaccannntggcctaacaaattcaaactcaggtaagaaatgagacaagagacctgatgcctgcttggagtaagggtaaaggagatggtgctccattgatagtctgtcttgtaggtggccacagggcagccccatgagggctccagctactcttcgaggaaggactgtcagatggctctgaagcgagtggactatgcccgcctcaagctcagtgatgtggctcgaacctgtgagcagatgctggagaactaggccagggaggtggacccagagctcagagggagaccatcacctgcgccatgggacagaacctgagaacatgtagggtggggagtatgggcaccaacatgccctgctggtcagagtaccctaggacaaaggggcaaatggtgggcacagaaaaactgaagcccaagcctgcccacagctatgccctggcctctccaacagggtgctcctgctctgctctccacaaacaccctgacaggctcagagaggagatggaaactcccatacccaacccacttcctctaacacttcatgctgctgccccaggcttcccgcagacttggcctaacgaagacacattcttcttcattcagagagacaaaacaagaactagagtctcaataataataaaagcaataacaataaaaacaagatcagactctcactggggtaggcaagagactgaggaagtgaaaccagcccatgtggtg

SEQ ID NO: 299 - DNA, 3304 bp, Macaca Fascicularis
tccagaaaagatcattttagagtttggtttcaaattttattcctttttccccaaatgatatttgtatatagaaattcagaaaattaaatgatgtcctctacactgtaatacccacaggtgtctctgggtgaactgttgactgcataaatagatcgttaccatagtaacctaaagaccatgctgttcaagaccagagatttataggttcagaaactcagactcatcagtgctcaagggtcattctttcactgacttgggacttctgattcttatcaacaatgtgcttgacatattttaaaaagaaaaaaaaatccatttgttaatgtacaatggaagttataaccatcaggtagattaggtaatatctaagtttattatttaccctattggcaaattacatgggaaaacaatgatcaatagtttgcctattagtcatagaaataaaaaaaaagggggagaattttgcaacttgaatgtagaatggcctcagactctgagaatgttaaattcccttcctgactgaggaccaaactgcaaaaaaggccagatattccttatggtgttatagcttaccagatcaccacacaattgcttaggtggctacaaccagcattgtagccgagaagctccttgttttgtgccaacgactggcaaactcccttctgaggaccatcttcttttagataaaattacagtgatattgctaacaagtcatctgtgagatactctgttttgaaggtgccttttcatatttcctcactgtcccatatatgcctcttgttttcaaattactgaaatagatcttgccatagcccccagattgagaaacgaacataagattaacttgtgtttaacctaagtttactgctatttggcctcagaggagttgctaaaaacgataaggactggttaaagacaggtaataagcagaaagatgaagaaggaacaagttgaaatccaagctatgtaatcaacagttgtataatggagagttctttagatagataattacttgttagccttagtgcttgcagagaaaagttttcaataacttttactctaattttaagctgataccagtgcctcttagttcactgactccattaatttctgaaacatctgttaagctacctcttgattccctcatcacaaaatttagtctctcttcccatgagaccaaagtaagaaaaggtgcttatatttttaccatttcaaaataaaatgtagacttaaaaatttcaaccaactttgagaaactatagacaaagttttgatgtaggaggagcccaaaacaataaattgtgtccaggactgctcagtacaaatgctaacctgaaacttgtatttcagaacttccattctcctaaagggtagagtcactggaccagtatgtgttatatgtattttggctctttacctttactctttagttccatcttaatacacaccagcatgcgtgcacacgcacacatgcacatacacacatttatttaaaaccttaacattttaatagttacttctaaagtgtgtcaacttaatctcactctgagtgtgacagagagttagtgcctgtgtgaatatattttttcatcagattcagcttttgctattgagggaaaattatctttccatctcctcatgtagtgcaaacttaaatcatttaaatatgttttatttttccaaaacttacatttctgcattacaaatggtttctattgattggaagtcaagctcactagcattcactgcatgagctatgcatgagcatgttaaggccaccatattctgcctggtaacattaatactttgtcattttcctaagtgttggataattccctgacctttaaaaaggactttggagaacagattttcctctaaataatgtattaatagatcaacaagtaatttttttaataatcatgaagtttaacatacttgaagctatctttacagctctgaaggttatctttgggtttctgttttttccatagaataagttgaaccagaatgtaattgccttgctgtcactcaaaagaaatagatactttttgtaattgtttgcattgaggaatcagaggaaggatttgcagatcaaatctgactaattttcacattttctcaaattccttatcttgttcttttaatcataggcttatggtatgatttggccctgcatgagagttcactgatataactcaaacacatgtttttactaaaagtggaattagtcccatatcgtcatatgaaaagacattataaacagcaaaactcactttactacagttttatttttatcattccctagcaatatattactgatcattgctagcatgtaaaatcttttcatatttttgcttaagagccatatataagtaattcattaaataaaacttttctaacttgattcttccactttgtttagaatagtacctactgacagaggtttctcatacttttaacacacattgttagaagtattttattatatacacttttaatggctctattaaccttaagaaaaaaaagttagtgatatccacataaatcactatccctgctaggaggagaatgttggtggtataaaaatctaggcctcttaatctgcattgtggatgtgtgatgaaaaacgtagcttatctttcctttttctcttttttagccttggaatggatggctttggccaaccagttggcattcttggacgccctgccacagcatatggattccgccctgatgaaccttactactatggctatggatcttgataaagtatctgtttccatgcgttacctcagcttagaagaaatctgtgtgggttgggttaattttggatctttgcctaataatgcatgttgatgttattgtgggtctgtgtttatttttatttttatatgttgttagctgcagattaaccccagccccttctgtcttctgttaagtacagtcgatactgacattgttcactcatcaaaccacatcttgatactgagtaacatttcccatgagcctcaaaactgaatgctgaaaagctactagactggaaaagaaacactgcattatgtacgttaagtgactaatttaatttcaattaaaaagtataaagtgaaaatgaataagtgaaagtcatgtgtttatatttcacacgtttcattacgaattacatgttaacatagggtgcacatgagttttattttttgtcctttttttctgcttgtaaagtcttgagtaattcatataatatatgctacctttataatttataaaaagaacatcaccatcatattaccaaaaaaaaaaaaaaaaa

SEQ ID NO: 300 - DNA, 843 bp, Macaca Fascicularis
atgcagcagcccttcaattacccatatccccagatctactgggtggacagcagtgccagctctccctgggcccctccaggcacagttcttccctgtccaacctctgtgcccagaaggcctggtcaaaggaggccaccaccaccgccgccgccgccgccactaccacctccaccgccatcaccactgcctccactaccgctgccacccttgaagaagaggggaaaccacagcacaggcctttgtctccttgtgatgtttttcatggttctggttgccttggtaggattgggactggggatgtttcagctcttccacttacagaaagagctggcagaactccgagagtctaccagccagaagcatacagcatcatctttggagaagcaaataggtcaccccagtccaccccctgagaaaaaggagcagaggaaagtggcccatttaacaggcaagcccaactcaaggtccatgcctctggaatgggaagacacctatggaattgtcctgctttctggagtgaagtataagaagggtggccttgtgatcaatgaaactgggctgtactttgtatattccaaagtatacttccggggtcaatcttgcaccaacctgcccctgagccacaaggtctacatgaggaactctaagtatccccaggatctggtgatgatggaggggaagatgatgagctactgcactactgggcagatgtgggcccacagcagctacctgggggcagtgttcaatcttaccagtgctgatcatttatatgtcaatgtatctgagctctctctggtcaattttgaggaatctcagacattttttggcctatataagctctaa

SEQ ID NO: 301 - DNA, 584 bp, Macaca Fascicularis
  misc_feature (1)...(584): n = A,T,C or G
tgctggaaatgagnnnnagttcaaatattagggtggatatttaatgagtnnnacggcttccatnctgccatgtgagctttgcttaaaatagtgtggaactgctagattctgtcctcatactgaattcataggaaaagcagaaaagatgctgtaaataacctgtctccttccaaagtaaaaagtggtaaaaatctatcctcttaattgttttgtaattttacaaatctctaccacttcattagcaaagcagaaacaagttttcaaaagtatcaatttgtcatgtctgatatctcaccaatgggagctacctttagtctttcacttcagtaaggtagatacaatggcttttgtcacatcttcagttcatttccgaagtctccaccagcacagctataagacctctaccctatttacttctctcaagtttcctaggtaatttcagagacctaaatttttgtaaatcctttagtgaaaatgaccccaggccaggcgcagtggctcatgcctgtaatcccagcactctgggaggccgaggcgggcggatcacctgaggtcaggagttcgagaccagcgtagccaacaca

SEQ ID NO: 302 - DNA, 171 bp, Macaca Fascicularis
atcattgtggtggcagccatcgccatatttcacaaatccaagcaacaaagtataatattccgcgcagtcagccaattcctattatgactcgtaatcacaatcctactgacccttacctgaattggaagccaaccggtaacccaacccctcatcactattggccaagtagca

SEQ ID NO: 303 - DNA, 171 bp, Macaca Fascicularis
aaggccttaaaaaggtcactggtgtgaccagggagcaccttctgcctccctccatgcaccgggaccatagacacaaacagctctacccacaaagtggcccgtcatgcggggcaggcctgtgcgcccctcaccagggctgtcgtcagagtccagacttagggcagaggaagg

SEQ ID NO: 304 - DNA, 682 bp, Macaca Fascicularis
  misc_feature (1)...(682): n = A,T,C or G
ctnnnnnnnnnnnnnnnnnnnnnnnnnnnnnnnntggtgccacgcagcannnnnnnnnnnnnnnnnnnnnnnnnnnnncccaacgccacggactannnnnnnnnnnnnnnnnnnnnnnnnnnnnnnnnnnnnnnnataggcttcnnnnnnnnnnnnnnnnntttaaatagactcaaccccgagatgttacagatnnnnnnnnnnnnnnnnnnnnnnnnnnnngccnnnnnnnngtttgacataaacgacgccactggagacctagatgccaaccgtcctgtcccgtttcgactcacgcccaacatttnnnnnnnnnnnnnnnnnnnnnnnnnnnnnnnnnnnnnnnnnnnnnnnnnnnnnnnnnnnnnnnnnnnnnnnnnnnnnnnnnnnnnnnnnnnnnnnnnnnnnnnnnnnncagttctccgggatgagatcattgcttggcacaaaaaaacgcaggaggacacgtcctctccnnnnnnnnnnnnnnnnnnnnnnnnnnnnnnnnacagccagcaactggtgtccctggttcagaaagccgtcaccgccatcatgacccgcctgcacaacctcgcccagttcgaaggcggggaaagcaaggtgaacaccctggtggccgcagnnnnnnnnnnnnnnnnnnnnnnnnnnnnnnnnnnnnnctggcacccctggctgtgac

SEQ ID NO: 305 - DNA, 724 bp, Macaca Fascicularis
  misc_feature (1)...(724): n = A,T,C or G
tatgaagacatcctctgataacttatctgttgtannnnntagtgtcaaagtcaagaaacccgtatatgtggacttagggctactaggaggtccctgnnnnnnnnnnnnnnnnnnnnnnatggtgcttttcaactacagaaagaagtaatgactaatgggcctgtctgtagagaagaaaaggaaaagagtacacatttgctgtaatatgatatctaattcacagtggagatagttaatttttttccaaaactaggttttatgagtatattttacaatctacatttaagtttttgtttttgtgaaannnnnnnnnnnnnnnaaacttcataatattaagtagatacagttatgtattaaaaacttccttatatacccttttgccagccaagatnnngatacctgttttaaaacaaagcggaaaaatgtccaatacaatattctctttctggaggcttcctacaagtgaaagcagattttgtcattttatttggcctttgcttgtctttgatatatttctttatgtgtttttcaaataaatactattctagatttattgtctgggatttgcaannnnnnnnnnnnnnnannnnnnnnnnnnnnnnnnnnnnnnnnatcagaaagaggaagtgtacttaagattattttatttatttagatgaaaggcttctacataaatgcactgaaatacatgctagtaatttcttgtatcccacttttcttcttt

SEQ ID NO: 306 - DNA, 2195 bp, Macaca Fascicularis
agcggtgctacgggcgggagggctttgaactggcggcttcttccaccaccagagaggctgaggtggcgggagagatccctcttctctgtggggaagtggctggctcggcgagtgtcggcggcgcgcttctgcggccgtctgcgctctgactgccggcggccagttcctcgaggaggcccggcgagaaggatttcaatggatattataaagggaaacctagatggaatttcaaaaccagcttcaaattcaagaatacgccctgggagcagaagttcaaatgcgtctttggaggtgctctcaacagaaccagcatcctgcaaggttgatactgcaagcaacttgaactctggtaaagaggaccactccgaaagcagtaatacagagaacagaagaactagtaatgatgataagcgtgaaagctgctctgagaaaataaaattggctgaagaggggtcagatgaagatctggatttggttcaacgtcagataattcctgagtgttcagatgaacacaaattagaagaattagattctcaacttcaagatgctattcagaagatgaaaaaacttgataaaatattggcaaagacacaacgcagagaaaaagaaattaagaagcaaggtctagaaatgagaataaagctgtgggaagaaattaagtctgcaaaatatagtgaagcttggcaaagtaaagaggagatggaaaatacaaaaaaatttttatctctgactgctgcgtctgaagaaactgttggtccttctcatgagaatgaagacagcttttcctccgtgtttcatactcagatccctcccgaagaatatgaaaagcagatgcagaaactcagtaaagattttacctgtgatgtggaaagaaatgagtcattgatcaaagcaggaaagaaacctttctcaaatacagaaaagattgagctcaggggtaaacacaaccaggattttattaagagaaacattgagttggccaaggaatcaagaaacccagtagttatgattgagagagagaagaaaaggctggttgagcttttgaaggacttggatgagaaagattccgggctctccagttctgagggtgatcagtctggctgggtggtcccagtaaaaggatatgcactggcagtcacccagcatcagcagcttgctgaaattgatataaaactccaggaactctctgcagcctccccagcaatttccagcttttctccaagacttgaaaatcagaataatcaggaacctgaccttgatggtgaaaaaaatatggaagtaactccaggagaaaaggtactcaggaacaccaaagagcaacgggatctgcgtattcggctgagagagattgatgaaaagctgagaatgatgaaggaaaatgtgttacagtccacatcgcgtctctctgaagaacagttaaagtgtcttctggatgaatgcatagttaaacaaaaatccatcattaaactttcttcagaaggagaaaatgaagacattgaggatgtaatacctatgttcccccagctttccaggtccatcatctctaaattactaaatgaatcaggaacaaaggtccagaaaactgaggcagaagatgcagatatgcttgagagtgcagaacgtgaggcttctaaaggctactatctcactaaagctttgactggacatcgcatgtcagaagctcttgtcactgaagtagagaatatgaaatgccttcaattttccaagaatgatattattagtgacacaaaagactattttatgtcaaagactcttggcattgggagactgaaaaggccctccttcttggatgatccactgtatggtatcactgtgagcctttcatcagaagaccaacatctgaaactcaattctccagagaaaacaaaagcagatgagcaggagactaaagatgcagcagaagaatgtaaagaaccctaatcaaggacttgctgggtgtgcttttaagaaagttggtaattaagttaaattacatttttgattgaattatttgaattcaatgaatgcattgtagagactattctttactgattttgacatttggagtcacctttgtggattatatttccttgacactttcgagacttggagtgtaattgttcaagggtttttgctcattaaaatttctgggaccattgtttataaaaaaaaaaaaaaaaaaaaaaaaaaaaaaa

SEQ ID NO: 307 - DNA, 367 bp, Macaca Fascicularis
aagcctctgtcagctcagcctccaaaggagccactcctccgttcctgaaatcctgggtgctgcctgccaggcgccatgagaacttcctaccttctgctgtttactctctgcttactcttgtctgagatggcctcaggtaagctccggtacctgctagagtttcccatccccagggcagtgtctgtgttccctccttacaggcgataactttctcacaggtcttggccacagatctgaccattacaactgcgtcaggagtggagggcaatgtctctattctgcctgcccaatctataccagaattcaaggcacctgttaccacgggaaggccaagtgctgcaagtgagctgggagtgaccagaagaaa

SEQ ID NO: 308 - DNA, 620 bp, Macaca Fascicularis
  misc_feature (1)...(620): n = A,T,C or G
aggaacggacagtgtgagggagggtggctgccagaaaagggcgggtgggcagccttcttcctccttacccaaggttccatcgtcctcagaactcctttccagctcagctgcttccctactttgtcactagttttttagaatgcccttgagaactggatggcagggcacggtctccgcaggggcccctccctcgtacaggggtttcggaagagaaggtgctctcatacacagcgcagggcattgggtcagtacgtagcagggtgtttcagggagctgggagtggcctcggaagcacactgggggctcgctccatctcggcccattttacttcctgttccagacagcctgaccctggattctggccttctcatgacctctgctgatcctcctctcctctcctgctgagccttccacctctgacctctcactgttcacgctggacctgtggatctcctgggactccgagcaaggcctcagctactctcccctgagatcctggtcccctattttgaaaagagcaaaatttagggtgcatccctcacatttggggtgcaggagaaaggaaccgccccagtcgcatcgctggcctccttcctctcggctggctcnnngactgggga

SEQ ID NO: 309 - DNA, 674 bp, Macaca Fascicularis
  misc_feature (1)...(674): n = A,T,C or G
cgaccccannnnnnnnncaccctcactgcccccggagcccaagaccaccaagctgggccagcggcgggagagcagccggcctgtgaaacctccaaagaaggacgtgcccgactcnnnnnnnnnnnnnnnnnnnnnnnnnagcagcaaggtctcagagcagctcaagtgctgcagcggcatcctcaaggagatgtttgccaagaagcacgccgcctatgcctggcccttctacaagcctgtggacgtggaggcnnnnnnnnnnnnnnnnnnnnnnnnnnnnnnnnnnnnnnncatggacatgagcacaatcaagtctaaactggaggcccgtgannnnnnnnnnnnnnnggagtttggtgctgacgnnnnnnnnntgttctccaactgctataagtacaaccctcctgaccacgaggtggtggccatggcnnnnnnnnnnnnnnnnnnnnnnnnnnnnnnnnnnnnnnnnnnnnnnnnnnnnnnnnnnnnnnnnnnnnnnnnnnngtcctccccggcagtgccccctcccaccaaggttgtggccccgccctcgtccagcgacagcagcannnnnnnnnnnnnnnnnnnnnnnnnnnnnnnnnntgactctgaggaggagcgagcccagcggctagctgagctccaggagcagctcaaagccgtgcacgagcagc

SEQ ID NO: 310 - DNA, 720 bp, Macaca Fascicularis
  misc_feature (1)...(720): n = A,T,C or G
taaacattttaatnnnncttattaaagtagataggatatggtctccattttataaatatggaaaccaaagactagaagttaaatgacttatccaaaattgttagctacttctatattgaggactagaactgaagtttcttggtctccagggtctttctaataagccctattattgaacacctgtttgtgtgaaggggcagctatggatgccatttaaactcacgtaactgagaattaacttttggaatgtagttaccaaatcaaagagctcaccaaaaaatagcccaagactatttaatgcaatcttatatagttaccatttgttattaannnnnnnnnnnnttggtattacaaagaggaaaaacattaagctaaacctaaaaaaaatgaatgggtcattaaatttcagaaaggagccttattacaatttcagatttgagtataatttccatcaccctaannnnnnnnnnnnnnntttttttaagaatacatgtaacttgactagtattagattactcactgtttcccatctctgtattaaacataaatcacagataccaagattcactttagatatgaggaaaatggttttaatggacacaaaggagtnnnnnnnnnnnnaaccannnnnnnnnnnnnnnnnnnnnnnnncatgtgtttgatatgtgaataacagcaaatgcttttttcactattgnnnnnnncaatgcattgaaatgc

SEQ ID NO: 311 - DNA, 1183 bp, Macaca Fascicularis
  misc_feature (1)...(1183): n = A,T,C or G
tttgtcctgtctgctttgtgccaccactatgccgattgcattctactgctcttgttagaggcctttctccctctagtgggcagtaatttccttggggacaggggcagtgtttgatttctctctgcattcaccgtacatgcgtgtagtagtcatatatttgattgaataaatggatggtgaaggaggactgatttgaatatgtgtgaaatttatgaataatacttgtctttgacaagtaattgtttcaagacctgaattcctatatgttgctctttaggctttgtctgaagctctttgcagcaacgtagatgatacaaaaatatatgtaactaaaataagctaaatgatgggagttatttgattattccttttgttaggtgtatataggaactgcactctgaacactgtatcttaagtcgatctgtgaactcctttgctgaaatgctttttaaagtgaatttttgtgtctcttcatgtttgatacttcatagtacccccttgaggggtacccctctgcttccaagtgcttgtctggatagcgggaagaatatctttatttcacacctacacaccatggatcttttaaaggattttgttggttacttttacttcatctgccatgacttccatagttctgttctttgataaagatgtgctccttagggtgctcaatagctttctttcaaaagccactgtttacctctggcatggaggggagagtgtaaacagtaggagtgacaggtggggcaggtctggaaaataggaagaatgaaccagggaagtgagagagactttattcctggtttctgctctttgtatgctaatgttctgtatgagattttatttgagagatgattctgctgttggaaaagtaaaacaaaaaagctgtgctgggcacgnnnnnnnnnnnnnnnnnnnnnnnnnnnnnnnnnnnnnnnnnnnnnnnnnnnnnnnnnnnnnnnnnnnnnnnnnnnnnnnnnnnnnnnnnnnnnnnnnnnnnnnnnnnnnnnnnnnnnnnnnnnnnnnnnnnnnnnnnnnnnnnnnnnnnnnnnnnnnnnnnnnnnnnnnnnnnnnnnnnnnnnnnnnnnnnnnnnnnnnnnnnnnnnnnnnnnnnnnnnnnnnnnnnnnnnnnnnnnnnnnnnnnnnnnnaataagagcaaatctcaaaaaaaaaaaaaaaaaa

SEQ ID NO: 312 - DNA, 743 bp, Macaca Fascicularis
agcagccaagatgtctttcaggaggtgaatggataaagtgtggtacatccagacaatgcaatcgttttcagcgctaaaacaaaatgagctactaaaccatgaaaaggcatggaaggacccaaaacttattttagaattatagaaagccccacatcttattcaataacagttatttctattgttaaaaacccatacagtatacatttggataactgaatatcaattgtatgttaaatgatgatagttttgtataaatgttaaattttctgaatgttataattagatttttgcagtgtaggagccagtccttgttcttagagggtacacactgaaatagagacaaaatgccatgatgtctccaatttattggtgtagcaaagtggcttggcaaaaacagcatccccccaaatatatatagaaatgggcaaagtaactaatggtgattctaagtatgtgtattattctaacttttctttaggtataatttttttcaaaggagctgtggaggttaccgtagatgttgtaggctatttgtccatgtcaaattagctctggtccacttgaatgattataagcaaaaagaccgacaataccaagtgttgatgaggatgtggggaaattggaaccttcttacaatgtaaaatgtaaataggttggtagttcctcaaaatgcagaacagagttaaccataatacccagcaatttcatttctggttctataaccaaagaaatgagacgatacg

SEQ ID NO: 313 - DNA, 727 bp, Macaca Fascicularis
  misc_feature (1)...(727): n = A,T,C or G
gtcgcaaatcacatcttgaaagacataggagaattcatactggagagaaaccatacaaatgtaaggnnngtgacaaggcnnnnagacgtgattcacacctggcacaacatcagagagttcacactggaaagaaaccttacaagtgtaatgagtgtggcaagaccttcattcaaaattcatctcttgtaatgcataaggtcattcatactggagagaaacnnnnnnnnngtaatgactgtggcaagaccttcgttcaaaattcatctcttgtaatgcataaagtcattcatactggagagaaaccttacaagtgtaatgaatgtggcaaggtttttaatcgaaaatcaaaccttgaatgtcatcatagacttcatagtgaaaagaaatcttataaacgtaattaatttgcaaggtttttaggcaacaannnnnnnnnnnnnnnnnnnnnnnnnnnnnnnnnnnnnnnnnnntttacaaatgtgaagaatgtgacaaagttttcaatttcaaatcacgccttgaaatacataggagagttcatactggagagaaataatagaagtgtaaggtttgtgacaaggttttcaggtgtgagtcacacctggcacaacatactggaattcacactggaaaggaactgtacaagtgtaatgagtgtggcaaaagcctttagtggtcagttacaaatgtaatgattgtcacaaagtcttcagtaacactacaacca

SEQ ID NO: 314 - DNA, 727 bp, Macaca Fascicularis
  misc_feature (1)...(727): n = A,T,C or G
acaggaacgttctagagctgattgagttctnnnnnnaggaggnnnnnnnnnnnnnnnnnnnnnnnnnnnngcggggaggctccatcctgagccacatccacaagcgccnnnnnnnnnnnnnnnnggaggccagcgtggtggtgcaggacgtggccagtgccttggactttctgcacaacaaaggcatcgcccacagggacctaaagccggaaaacatcctgtnnnnnnnnnnnnnnnnngtctcccccgtgaagatctgtgatttcgacctgggcagcggcatcaaactcaacggggactgctcccctatctccaccccggagctgctcaccccgtgcggctcggcggagtacatggccccggaggtggtggaggccttcagcgaggaggcnnnnnnnnnnnnnnnnnnnnnngacctgtggagcctgggcgtcatcttgtacatcctgctcagtggttacccgcccttcgtggnnnnnnnnnnnnnnnnnnnnnnntgggaccgcggcgaggcctgccnnnnnnnnnnnnnnnnnnnnnnnnnnnnnnnnnaggagggcaagtatgagttccccgacaaggactgggcccannnnnnnnnnnnnnnnnnnnnnnnnnnnnnnnnnnnnnnnnnnnnnnnnnnnnnnnnnnnnnnnnnnnnnnnnnnnnnnnnnnnncacccctgggttcagggggtgagtgccagccnnnnggggcgccagggagg

SEQ ID NO: 315 - DNA, 485 bp, Macaca Fascicularis
gcaccatgcgcggaggcgggggctcatctggttcccaccggcggtgctgccggatgccccaggtttttctcaaccggggtcccggcttggagccctcgttggctgcgtgctttggcacaaccatggggaaagcggtaattggtctcgcccttgtggctgcctggtggaagcggcggttttgacacacagaacagtcgtgtgggagcagatccagagaggatgcatttgcaataataacgcttaatttatctctgccacaggggcgggaacaggccttcgcgctggtgtcttacatcagccaagcaaaccatgcacgcgatcggagccaactacctccagcggggttttgctccggacttaaggtgcgcggaaaccgaagcattcagcccttcctgggtgcctcccgaaaacctcaccatgccagtaacacgactgcgaacggcggtggcacatgccgggggcttgggatgggagggtttggaaac

SEQ ID NO: 316 - DNA, 792 bp, Macaca Fascicularis
  misc_feature (1)...(792): n = A,T,C or G
ccctcactgggggtgggcgcagnnnnnnnnnnnnnnnnnnnnnnnnnnnnnnnnnnnnnnnnnngcagaggggcaggccctgcactgtcctgccccacagcgttggtgagaggaggggcctgttgtctccctggtccccaaggcctcccacagtgactcgggctcctgtgcccttattcaggaaaagccttggtgtcactggctgcctccactcccacttccctgacactgcagggctcggctgagagggtggcattggcggcaggtgctgctaccctcccttctgtcccctcttgccccaacccccagcacctgggctcagggaccacagcaaggctactgtgggttgggccatactggcctcgcctggcctgaggtctccccgatgctggggcgggtgcgaccccttctgcccaggacggggccggccaggtgggcgggcagcacatcaaggaggctggctggggcctgtcagtgtgccccccaccccggcccatcagtgtacccttgcccaggctggccaaccccacagcccacgtcctgtcagtgccgccaccttggggcgccgcctcgcccaccgcatgccccctcgtgccagtcacgctgcctgtgtggtgtcgcgccttctcccccccggggctgggttggcgcaccctcccctcccgtctactcattccccggggcgtttctttgccgatttttgaatgtgattttaaagagtgaaaaatgagactatgcgtttttataaaaaatggtgcctgaaaaaaaaaaaaaaaaaaaaaaaaaaaaagg

SEQ ID NO: 317 - DNA, 733 bp, Macaca Fascicularis
  misc_feature (1)...(733): n = A,T,C or G
agattcgatcagggactggatagannnttcaggtaatcagaagctggaggtgtagacaccagccccctgcatccttcagtagacctcnctctgagaaccacagccaggtcctgccttctgggggcctgaatatttcagagctgacatggtgggctgtgcagaagggggctgtatcatcaattagggaaccaaagttgcactatctgggcccagattgtctggttgnnnnnnnnnnnnnnnnnnttgatgagacagacatcccacaacaaaaacccaagttttctgtgctacatgtgcaatatttgttatgaatgttatcacaagtcattcatcaaattatctttataatcactgtagttagatgtttcatgtccattcaagtgacnnnnnnnnnnnnnnnnnnnnnnnnnnnnnnnnnnngtgataactagtgttgcttttgttttagacgatctatgtgcagggcaatgcaatgaagttgaaaacccttgtaaataggagaggttgcaaaccaaatcaagagtatttattactattattactattattattaggcctgcctttaattttcagtgtaagtgttcagtattccgcatcctgcctcagtactgatcttgtgttctttgtgccaatatgaaagggagaggttggttctttcctttcttgttgaatgctcccatttaatgctttatggcttttactgtattacttttttagactcccgtctgcacaa

SEQ ID NO: 318 - DNA, 344 bp, Macaca Fascicularis
  misc_feature (1)...(344): n = A,T,C or G
aaaaaaaaagnnaggaaaanngnacagaaagagaaaagaaaagaaagaaaaaantnanaaaagaaaaaaaaaaaaaagaaaaaaaaaaaaaaaaaaaaaaaaaaaaaaaaaaacaaaatccacacccgacaagaggatcccnnnncagnnagggggggaacccgcaccgggaatgagcaggctcagcaggggggcagccccacccatagtctgccctcccctctcccccaggctctttctccagccctgtctccatctgccccaacctcagcccaccttgtctcttggacctattttctatgtcgcctggaggagtccggcaccccctccccggccattggaca

SEQ ID NO: 319 - DNA, 696 bp, Macaca Fascicularis
  misc_feature (1)...(696): n = A,T,C or G
tgttgataagaggtatatctcttaacaaagacacctaattaaagcgagagaaaagctaaagaaaatttcaatgtgacaactattatgtgtcaaaataaaacttagattccaaagtgattttgtagcgttgggcgctatgagtaggtatggatctctgttgattgactccagttgaaggtgagaaatctgtaacaatcattcaaaaagggaatctattattttgaaagaaactctcatatttttttaaattgttaatagttgttatataactaagaatgttatgaagaaaaatagcattgcaaaaagcaccattggtcaggcttacaagtcagccacaatgaatcggtataactactgtgttattctttttctagacaaattttgactcctctacttttatgagtaataattccagtattctatttatttcagcattatgtgaaaaatgatgagaatgttaaaaagaaaataataatgtggtttaattggtgtgagataccnnnnnnnnnnnnnnnnnnnnnnnngactaggtgtatctctcctgtgtgtgagattatgtcccctcgtgttaacccaggaaatgagtgctcctttttaacatttctttcttccaagtttttttcttccaggaaaaataatatgcagttatgcaggaaaagctgtcttaaataatgtgtacataaatctcaagagaat

SEQ ID NO: 320 - DNA, 627 bp, Macaca Fascicularis
agagattcctagacccacagacctgcctctgtgtgtcccaatttaagaacctctgttctttcttcatgactggatttgcccaattttgtgttattttgggacttcatttgtccctctttgggacatttccttatttattgccctcttcagagagtagacataggaaaaacaagataggaaacctagattacttaatttttattttaacattttctgtagataagcataccacgccaagtgtgctctgtcttgatccccttctttttagcatatgccagacattgtagagtttggcaagcagttgtaggtttgagttgcagccaatcatttcttttgttctttagaagtacatagattcgtctttttagggctttaccgaaagtaaaatattctgacatttaaattgatagatgtagaaggtaaaaaatagagtttcgaaacatgtgaatttatgtgatagctgaagtcacaagatgagggatgtatgtcctccagagaggatgcagaaagaagaaaagggtgctggaaacagcctgtcagttgtgccagctgtgggctggaggcagccaggagagttgggagcctgggtgttgggtggagagaggtctatcggggaagacatgggaa

SEQ ID NO: 321 - DNA, 2605 bp, Macaca Fascicularis
ctggagcaccaccaaagagacgtacacagtaccccacgaaagcagggtgcgattgagacccgggatggggaggtgtccagtcatgcccaccccagcatcacaggagacatggaggtgtgggcaggctccggaattgattatgcaaattaggaggacgcaggcgggatccactctcccgccgaacaccacacactggaccctaagtggccaaatgccggggcctctcactggctgcggcctgaggcctgtgggttgctgcattttgcttgtagttcaccaccattttgacactggaaaatgctgactttgggggacaggatgaggccctacattctgcgcccccagttggcagacaggcattgtccctgttccacatcgatgtcggggcaggaggtggcctcttcctcggtgtctttcctgtgtttgcacattgaaatgaagctgacaacctggcaggacgctcggccgcttcaaaccctttttgtcaattaacttatttttttaatacttgaaaagaagtaacttggtttgtatatctttactagagacactgatcacttgatgcccgggtgcgggagccacagcggcgtctgctgcgtcccacgcagcctggtccggggctgcccggcgctcgccacgtgcatctatttattagcctttctcttcgtatcactggcctggctggcatcagggagctgcccaggacccccgttgggccctgctcacagctttctgtcccctcctgcacctggtgcctgcctcaccctggtctggaccgctcacgtgatgagggggcatctccgttctgttttggaccaagctaacagcagagctgccactctcaccctcccgatgagaattctggctctgcagaactcacccttctctcagtttgggtgccagggcatcaccttcctccacacgtgtgttaaagaaggtttcaggatgggccctcgtccacactggccgagagggtgcagggtgggaccctggaatcatggctggtaaagtccctcctcccagcctaagattcacccagacggaaacgcgagagctgtagtggatgctgggatgcaggctggcctccctcgagcagataagagactcctgccctccctccctcccaagggcgacgagcacctgccttgtgccggatcttcatggggccataaagggtggcaagccccgaatcactagctcctatagccaaaccgttcctttctcacggttctgcaccagcctggctgggtacagctcatcaagccactgagctaatcgggggtagggtgcttgtccatcaaagcagttagcacatagtccagccaggagccccccgggctagacccacctgcccctcggggtgctccagccgcctgccgcctccctgggctggggccagctgggagcagaggcctggcgcctccaaggcatcccatagcggagcaggccgaggggccgtgctgaccttgggctttccatgggaaccacactgtgcctcaacttgaacattcatcccaactgcaaaggagcaaagaacctgtgtcatccctgtccggaagctgccatctctctcccatgcacatccaggaagtacgctgctagtggccgccatagctctgattctcctccacctgctctcacgtgaggcaaaggtctccttttctctttacttaaaaaaggggagaggagggttcctagattccatcttcaaaccccagtcttcccataaaattggatgtgggaaaagaccttcactgcggtgtggcctgtcccagacctctcctatcgaaggccacaaaaccagtccaggcccggcagagccgcctttggcccttgtagctcctgctggccccacaacggggaagcagtttgcaaagtggctcggaaggagtgtggcctaggaatctgctacaagtggccgggtgtagcaggagagcccagcgtcccctcctggtcccagtcagccttaacactgtggcatcctccgcagcacacacagtggcctgcagtctggaaagcggacccgagcctttgcagagaggcaccatggagccgcaggcccgcacagcagccccagcctcccactcctgactgtgaggacatcggttctaggagagcactttctttaaagctcccattttgtaaccactcgtttgcagttgacttgagtactctggtgacttgctgcgtgaagcgatctccaggcaggttttcttcccaagagttaagtcttcccttgaaggcagggaagcaggatggatacacatgtatcatacacataaagtaccaggcgcaggagcagcccaaactcggggctgactaaactggaggctgcactgtggaggtctgcatgcagcctccctggagggcagggagggggcgcccccgcccctgggcttgagggtgccactccccgtgggcttccaggcctgcccaggtgatgccttcaggcctttgcccctggcggccatcctcaggccaattttgaccagcaatgatagactcttcttaaccctttcaaaaaatttttttcagtgggacaggaaggagagttaaaaaacatttttttaaaggtggtaacatctgacccatgaagggtatgggt

SEQ ID NO: 322 - DNA, 659 bp, Macaca Fascicularis
  misc_feature (1)...(659): n = A,T,C or G
acaccatccagnncagcccacaacccaaaacaaaagccaggtccttgacaacaaccagcatgtcttccaaattccaagtgacagtgaacacaaaaatgaaagagcctggtcacccagcataaacaagccggaagaagcccacgcctatcaaaaggttccatcttcttctagcatccgaagatggcgtattttccaaatgtcttgatttttacgtgacccaagtgtcttagtctttccagtcattgaaaatttgggttctcaagtggtgtatcattttatcttgagccatgtgtcctgagtagaagccggcccggaacccgagctcgcaggtcgccacgcgcatgcgcattcgcctggccnnnnnnnnnnnnnnnnnnnnnnnnnctcacagctcccgggccgccttgctgcacnnnnncctgctttgttctctcggctctgttttaaatatctgacgaatattccccccatccctgcgccaaatccccggcctgactgcaggcgcggcnnnnnnnnnnnnnnnggggccaagcgaggggcgaagggggctgggggcggccggcgcaatggggacgctccgactgcgccaagttgactcagccgtttgggtcacctgggctgagtcgcaggcgtggaagcagaggatagggggtggggag

SEQ ID NO: 323 - DNA, 684 bp, Macaca Fascicularis
  misc_feature (1)...(684): n = A,T,C or G
agatggactttgcccttgtgagactttattctttcaattgactttttccctcnnnnnnnnnnnnnagcttttatgtagtgttttataaaattacaggaataaaaagaatatcttttatgctttttaaccaatgaggggggaaggagaaattatttgtcctctgaaatgnnnnnnnnnnnnnnntttctagccaggacagttggctgcaaaatgcacccgtgttgacaacttgccaccagcagagaacannnnnnnnnnnnnnnnnnnnnnnnnagatcgtttcgaatgttctcctctttgggggtttttcctctctttctttttcttaaatnnnnnnnnnnnnnnctctttatgtgggagtcatttagtggttagggaagaatggatgannnnnnnnnnnnnnnnnnnnnnnnnnnnnnnnnnnnnnnnnnnnnnnnnnnnnnnnnnnnnnnnnnctagctcggcgcggtggttcacgcctgtggtcccggcactttgggaggctgaggcgggcagatcaaagaagtcgaggagattgcggcgtatgcactggcggacaacggtgaaaccccgtctctactgaaggtgcagaggattggccgggtgtggtggcgggcgcctttagtcccggctgctcgggaggctggggcaggggaatggcgtgggccctgggggcggaggttg

SEQ ID NO: 324 - DNA, 370 bp, Macaca Fascicularis
cttggatttgttggctgaagcatttccatgtggcttagaagctttgcagatacagcacccccgccttcgtgaactgccattggccactgcaaatcctggtggtactgtagataagagctgtgttgaaaagatcttgttctagaggagaggaggctgatccacaggcatttagtcacttgcctgaatcacagctcattagcagcagacagaatgaggactcacagcgcctgatttactttttccttttgttcgaaggctcagtgtattgaatctgggcaatcatgcatggtatttactgtcttacacttgtccagtgtaagaaacgctggagctttgttgggagcagaattacaaactatatatattttat

SEQ ID NO: 325 - DNA, 747 bp, Macaca Fascicularis
  misc_feature (1)...(747): n = A,T,C or G
cccccgttggggttcnacgnnnnannncagccannnnnnnnnnnnnnntgggacatctgcttcaacggacaggtcannnnnnnnnnnnnnnnnnnnatctggatgcttacattaaactgatgttctgagaattcctatgggcaggactgaaagcctggtgtgtcctggtgtgatgttccacnnnnnnnnnnnnnnncacactcgtcccttccagcaccccatccagcggtgaccgcacacactgacagcacccagtccagcggtgactgcacacactgaatcctcctaccagcctcttccacccctgctgactgtcactgggccttgggatgggcaagactcnnnnnnnnnnnnnnnntggggaggaaacatcacggcctctgcccccagctgtgatgccactgaggggctcgcctgctgatgacttcaacagggtctcacctcatcttttcctgctctttggccctcagtcaagaacattcccatcagtgccccattaatatgctgccctgtggcacctgcctaggaggcccagccaggcgtgcacaggtgtgcattggtgtgccccggtgtgcacaggtgtgccctggtgtgacctggcgtccactggtgtaccctggtgtgcctgccataagaccctgggtgggagctcccatctcttctacatctcatgattcatgcgttgtttcgtaggtttcaatgtctctgtaaatgtggtagaaatgcaggttttgtgggcataaagta

SEQ ID NO: 326 - DNA, 1549 bp, Macaca Fascicularis
catctaacccacattctaataggtgattttattttgcagcactgcaccacagtcaggtaacaccaagaatatcgttaatgtaattttttaatttgatatatttaggattccacaaaagtcactgaaaataactgagtgcatgacttgtcacagaacaagggaaagaaatcattttttgagggtcagtcgccttacatcttttgtaactaatttaatccccaaaagaatccaataaagtagaagttactctgaattgaattttaagcatgggaatgttgaaattacttgtcaaaagtgaaaaataacagtgcatctgggcaaagactaaaggctgacatcagagcccatgttcttttcactgttaatgtgctagggctgcagtaacaaaatactgcaaactaggcagcttaaacaaatttattgtcagaggtctgacttgaaatccaaaatcaaggtattggcaggattggttccttgtgaaagctgtggtgggagcctgttaatgctctcagcggagagcgtctgggcattccttgacttgtggcagcatatccctaccagtcttcacatgacgttttccatgtccgtgtctgtctgcacacttagcattctttttatgaggacatcagtcatattggagtagggtaggccctgctccaatatgacctcatgttaaccaatcctatccacaacaaccctgtttccaaataaggtcacattgtataatactggaagtgaggtctttaacacatgaatttgaagggggggatacaatttaacccataacaccctgtatcctgaaataactatccagtataatttttttaaagacacaaaactagccgaaattataaaaagttacaattgcaatcctggtatccaattacatactcatgcagaagctgcagggaatcttgtctcagaaaaccaatttctatcttgtcccatgtccatctatgcaaaatacatgtaatttgtccctgacacagggcaacaatgctgaatttactaagactcatttatgagcatagtttgatagggaattaagatttactaggtatcctgtcattgtcctcattactgattattttaactgtgcctgaaacacttggatagttagttcactatagtgttataacctgtttgacatgttgctttataatcattcttaagttatatatatatatatacacacacacacacatatatatctcatgtaacaggcacagctgtttttgtgtgtatcacttcattgcacttcacaggtatcatgtttcttacaaagtggagatttgtggcagccctacatggagcatgtctatcggcaccatttttctaacagtatgtgctcacttcatgtctctgtgtcatggtaattcttggaatgtttcaaatgtttccattattatatcagttatggtgatctgtgattagtgatctttgatattactgtcgtaattgtttggggggcaccatgaaccacccctatataagacagcatactgagtcaataaatgttgtatgtgttctgacaaaaaaaaaaaaaaaa

SEQ ID NO: 327 - DNA, 721 bp, Macaca Fascicularis
  misc_feature (1)...(721): n = A,T,C or G
agaagggaggaccctgtggggnnnnnnnnnnnnnnnnnnnnnnggagaggctgagaacgcgtccgcccagaccatnntgagcccagccctgactccaggctgagagggccctccgacccgaccgttctgagcctgcaggctgagacaaccgcgcacccaggctgttctgagtctactgctgactccaggctgagacggcagtccacccagggcgttctgagcctagccctgactccaggctgagacagaaaacacacccctgggtggagatttaagatgctaatgagacacgcaactgatgaacaagcaggtgcaggtactgcgcatgtgcacctagaggaccccccccccgccccgccccgccgaacatgtttcctagcaacgcctctgcccacccgcgacaaatnnnnnnnnnnnnnnnnnnnnnncttcaagctaacttataacgatcccaaatgggagtatggaactctaagaagaaatggaatcnnnnnnnnnnnnnnnnnnnnnnnnnnnntcagggaccccaaatggaggnnnnnnnnnnnnnnnnnnnnnaggaacataaattgtgaagatttcatggatatttatcagttcccaaataatacttttataatttcttatgcctgtgtttaatctcttaatcctgttatctttgtaagttgaggatgtatgtcacctcgaggatcactgtggtaattgtgttaactgtacaaat

SEQ ID NO: 328 - DNA, 674 bp, Macaca Fascicularis
  misc_feature (1)...(674): n = A,T,C or G
tcnnnnnnnnnnnnnnnncttgcatctcctannncagggtttggcatattttttctttaatgggctaagaaagtaagtatcttcagctttgggggacatatggtctcaatagcatcaacttaactctgctaactggaaggcaaaagtgtatcatcttactcatccataaactccacagcactctgcatagataggagcctgtttataacgaactcaataagtaattctgacacagacataaaattctctaagggcagaatagacattgacaaatagtaagaaaggatgatcatgagtaacttagtcttcagtgccaccttagcaagaattgtaaagaggaaaaacctttctaggaagggtgacgcgtgctgggtgaggaaggagcatctctcaggagggtgaacagtagctgtggatttgctgagagattttggctgtgagtgacaagcctatatcaaaaagaaaagtgacttatcaatctcagtttttattgctcaaagcaattcttcactcctaatttttccaaattccattgtttttactctttagagctctatcctgagtgtagtctgcatgtttctttattgtcattgccatgtgacttctttggtgacaagttcagtaatatttcaannnntgatgtttgttttgagtttgagnnnatgtgtttgtga

SEQ ID NO: 329 - DNA, 694 bp, Macaca Fascicularis
  misc_feature (1)...(694): n = A,T,C or G
cgctctgagctgtgcatgtacatatatacatatatagatacatttataatatatatacacagcctatatatttatatacaccgtttcctggccccagagctcatttgggttcaggcgcacttcagaaccctccctgggggaggctgtttcttctcaggattccttgccagggaggaaggggagggagagggtgggttctctcactgaggggagaaagcagaaggttctagatcccggcacagactgcatcccatgttcccattctcttctccatccccaggaatgagaacagcagctttccctccgcagtgaatgtctaggtggggatagggtatcttggctcccagctggaccagagcgccctgcatgcctatgatctccctttgtgggcactcgggcagcagaagcacctggaagtctctgagtgggcggggtccccgtgacaggcaccccccgcctctgtttgaaaggtctggccaggctcacacctataatcccagcactttgggaggttgagggaggatcacaagaaatcaaaaatttgagacaagctggtccaacacgattaaatgtggtccaaaccaaatatgtaataaccatcctcgcgtagcagtatgtgctggtgtcctcagtngcatgtggcccagaggctcgagaagaantngannnnntcccagtacagggaggagcgagc

SEQ ID NO: 330 - DNA, 743 bp, Macaca Fascicularis
  misc_feature (1)...(743): n = A,T,C or G
tacatttgtgcnnnnnnagatacatatgtaagctcttattnnncatttggcaattcacttaatttttaaatgtttacataatggccagaaggcttgcaaatctgtatttaattgcattttaattaattgccagtnnnnnnnnnnnnnnnnnnnnnnnnnngtataaagaaaatgcacttannnnnnnnnntaaattatatagttcagttatgttgtatttggcattagatggttttaatacatttggtagttttttcaccccttggctttattttatataaacttttgnnnnnnnnnnnnnnnnnnctttttggtattttataaatggtccaaaaaannnnnnnnnnnnnnnnnnttaaattcagtgcatttcctcttgatttgtctgggttaaaaccattccttttgtatgaaatgttttgacttatgaatcattttatgtacttgttctacctggannnnnnnnnnnnnnnnnnnnnnnnnncatccnnnnnnnnnnnnnnnnnnnnnnnnnnnnnnnnnngagtacaggtcagtaaacctcattatttggaatttgagagaaggtataggtgattggatctgtttcatttataaaatgtccagtttttaggactagtacattcctgttattttctgggttttatcattttgtctaaaataggatataaaagggacaaaaaataagtagactgtttttgtatgtgtgaattatatttctactaaatgtttttgtatgactg

SEQ ID NO: 331 - DNA, 1089 bp, Macaca Fascicularis
  misc_feature (1)...(1089): n = A,T,C or G
gagagaagagataagcacnnnnnaggaaacagtttaagaaagttttgaactgcaagattcatgtcaattagcaattgactctcactgttcttgtcactggtagaccaaaataaaaccagctctactgatcttgtggaattgggagcttgggaatagatactggaggatgcccagttagggcctagccttaatcaggtcctcagagaatttctaccatttcagagaggccttttggaatgtggcccctgagcaagaattggaagctgcccatgggagctggttagaaatgcagaatcctaggctccaccccgtctagttcatgagaatctatatttaacaagatcagcagggggtgtgtctgctcagtaatttgaggacaactgttccagactgcttccaatttttctggaacacattaaatatggatcagttataagtagcaggccaagtcaggcccttattgtcaagaaactgaggaattttcattgtgtagctttgctctttggtagaaaagactaggcacacagctctagacactgccacacaggatctgcaaggtctttggttcaactaagccaggaatgaaatcctgcttcagtatatggaaataaatgtatcatagaaatgtatcttttgtaagacaaaggttttcctcttctattttgtaaactcaatatatttgtacatagttatttatttattggagaaaaactagaacacaggcaaaatccttgcttatgacatcacttgtgcaaaataaacaaatgacagtgtgctctcgggttgtgtgtctgttcccttttcctcccccagtgccctcattgtatgtcattaaatgggactcnnnnnnnnnnnnnnnnnnnnnnnaagcagggaggcctgccctgcaccccagcacttgtgttgtctggtgatggcaccatctctgattttcaaagctttttctagaggctatgattttcactgtagaatgatttcatactatctctgtgtgcacagatatttatttattttccttnnnccacnnnnnncacttcatatatgagganttgggtctctgtgcttttaaacacattataggattatttg

SEQ ID NO: 332 - DNA, 718 bp, Macaca Fascicularis
gctgcacttattcactattttcccacatctcgttcctcccttccctgattgccatatttttcatagcagatctcaattccttaaagaactggtctaggaaattttgtaagaattctgttacactttgagatttttatggtgaattctagtggtgagatccagtctattttgtctctctctctctttttttaatttttttctttttccctcatacccatatgaagtaatccaatggggaatgcaatattagaaatagatttttaagagagaacaaggaaaaaaatgcaagatcttatatttttcatgtaatgacctgttctgtatttatgagggagaccattctatggaaaagaaaagtaagcaaacaacagattaatttgcatatgagcatctataaaacccatgacttttaaacaactctagaaccagaatttgtagttaaaaagctaaaaataagattataaataaaatattgttggtttttctgtacctggacacaactcatttgtagtatggctcaaatgtgagaaacttgaaggtaattagattttctgctttctaagaaagaaaatactacagtattcttcagtcacaaaaccaatctctacagggtcctgtttgactagttgacttgagttttagatctatgtttaaggatgctgtggtattttttccttctcattaggcttatactttgtagaatgctcaggttcaaaaa

SEQ ID NO: 333 - DNA, 624 bp, Macaca Fascicularis
caggtatgccccgattagttttctcgcgtatttcttcatacagacatattctgttttgttgtactgtgttaggtttcagaggcggggagcttcttattgcagcagatgaacaggcatagttctctgaatacaggaaagcaacaagtctggtttccaggtggaggaggtgaatgaagtgtgccgtcatgctgtgcatttcaggtcaaatttctttatcttttcatatcgcatgtcattggatgtgacattttgatgaaaatactgaaattacaaaagcataactttagcaacacgaatgagatagacaattgaatgtgggacatttttctggcatgccttgctgctgagaatcggacttccagtcaaaaccctgttagtgacacccacctcttccggttatgcaaattgatgcttagcttggcaagccttcaaggaggtttgcttggaacaggaaaggaattagcaaccctttgagggtgtcatttttaccttgtaatacactgtggaaaattttggaagacagtccttgcctgaaaaggtgcaacgtagcattaggttgttatcagaaaccttgtcaagtctgatgggaaatggatacttctatatagacaatattattttaag

SEQ ID NO: 334 - DNA, 766 bp, Macaca Fascicularis
  misc_feature (1)...(766): n = A,T,C or G
agctgggcaacaagagcaaaactctgtctcaaaaaaaaaaagtggagaataaagataaaacctccttcatgatgttcttggaatattgatacaatttgaaaagattaatgttcgtgagtttcctcttaagagtaaatatagaaaatgagagttttattttgttctggtagataaactaggannnnnnnnnnnnnnnnatcacacacaggcatgactctcccataacctgttgagtatgtttacttaatattcaacatactgctattcagcannnnnnnnnnnnnnnggtttcctcctctgaactacctgtgttgcttctggtagagaccatgcttcccaccctgccagatggctagcctgccggctgcgaccctttgtaagaaacaaaggtctccttactaaaattagacattttttgacctttttggtcaatgctgttaagggtttcttggtggacactctgcggcatcctgaagcaatgtggcacatcattgtgagagcgctgagtatactgtttgctcaggtctctcttcttcctataaaaccatcatttctgttccgatggtaacacagtccattaatctgtgcatggattgattcattcatgacagcagaactctcatgatccagtgacctcttaaaggctccacctctcaatatggccacaccggggaccaagtttccaaatgagttttgttggggatattcaaaccagaggagtattgtattttattttcaatttccatgtattaattgctagtatata

SEQ ID NO: 335 - DNA, 640 bp, Macaca Fascicularis
  misc_feature (1)...(640): n = A,T,C or G
gaaagcggggcttnnnnnnnnnnnnnnnnnnngtacggggcagcctctnnnaggctacaccaccaaggggaaggaggacgtgcactgctacagcatgcagagcaagtagacgcctgccgcgagggtgagcactcaggaggggcagcctggggctccagggcctcactgtccttggactagcctcatgggctgggcttggccacnnnnnnnnnnnnnnnnnnnnnnnnnnnnnnnntgcagctcagggccagaaagagcaaagcaaataggacagagcnnnnnnnnnnnngcagggagagggagaccccttcaacccaaccaaacaagtgtggggaaggaggccggccagtgtgcctcagggatgctctgctttatttcagacacctctnnnnnnnnnnnnnnnnnnnnnnncacatgcaaagtgaagattnnnnnnnnnnnnnnnnnnnnnnnnnnnnnnnnnnnnnnnnnnnnnnnnnnnnnnnnnnnnnnnnnnnnnnnngaacctgctacagatacgtgtnnnnnnnnnnnnnnnnnnnntgtgagacagctgannnnnnnnnnnnnngagagctatcagtctgaagatgcggctttttttctgcaaaatatattatgaatgttctgttagtctgtg

SEQ ID NO: 336 - DNA, 718 bp, Macaca Fascicularis
  misc_feature (1)...(718): n = A,T,C or G
taaatggagtcaagactgtggagacgcnnnnnnnnnnnnnnnnnnnnnnnnngcagaaccgtannnnnnnnnnccacattgctcacagggactgggatgacgatgcctgnnnnnnnnnnnnnnnngagaggctggggatgactcctgcccagannnnnnnnnnnnnnnnnaaaggggagaagtttggtcgaggagtgatagcgggactcattgacattggggaaactttgcannnnnnnnnnnnnnnnnnnnnnnnnnnnnnnnnngaactagaaaatcaagctgtactgaccaacctgaannnnnnnnnnnnnnnnnnnnnnnnnaaccccaggtggttactggagcccatacctaggaaaggaggcaaagatgtattccagaatccatagaggttcagttggcgaatgaaactcttacaagctgtctgtttcgaagatcctctctgcacctctccgttgaagaacttccctctggaagagatccttcttgatgatcatnnnnnnnnnnnnnnnnnnnnnnnnnnnnnncttgaatgtnnnnnnnnnnnnnnnnatccaaagctttctttgtggttgtcttccgtgttgactacggattggtttcggtcttctggtgattccccttttgccttctctcgtgattggaagcttcctgagccctcacnnnnnnnnnnnnnnnnnnnnnnnnntctnnncagcctgcaaaaatggagcca

SEQ ID NO: 337 - DNA, 739 bp, Macaca Fascicularis
  misc_feature (1)...(739): n = A,T,C or G
gggccgctgcggagctgcnnnnnnnnnnnnnnnntcctgtgttccgcacgggggctccaccagggcagggatgggggtgagggtggctcgtggatccccgttgcggggagcagggtctggcactcaccagggcgcatgattaggacttgttgaatgactccatcgtcgcctttnnnnnnnnnnnntttgaagaggcttgagaatggaaatcatgagagatttttccatggggaagttctttttacaaagcgtttattnnnnnnnnnnnctcggtaccttgcggggcgggcaacgggcggggcctccagnnnnnnnnnnnnnnnnnnnnnaataaatagagaatcttagctgggcggtggtcgggcggtggtgggtggtggggcgtgagggcgggagcgggggaaaggaaaagcaaaagcagggaaagaagccgggnnnnnnnnnnnnnnnnnnnnnnnnnnnnnnaaaggctcgtggggaagcannnnnnnnnnnntccggaggtgagaattgcttttttttggtagcagaatggggaggaattgaggggaaaatggagatggaacctgaaggagcccgaaacgagagaatctgtagctccccannnnnnnnnnnnnnnnnnnnnnnnnnnntgaaaactaggcgtctgggacccctgaaatccttggagcagtagcattatcatgaccctctgtgttccttttggcaaaaggacttgcttccattgtttgtttgttca

SEQ ID NO: 338 - DNA, 581 bp, Macaca Fascicularis
ggatactccacaactgtctcaccaactcagtgccagtacacatgctctagaggacttctggactcgcagctacaactgtacaagtgcacacaagtgaatctaccctgttatcctccacccactgattgaggattgaattgcacatttctcttaaccatgacaggagaaagcaaacagtgaaacagaatcatgggtgatctttctcactttccctcttgttttcattggtttgtccataccattctaattatcatgaaagggctctgcgtatagagagattgtctcactgacttcctggatcaccgaaaaccatcagggttgaaatttcatccgagtctttcctgacgcccagcaaatattccccctcggattattttacaccttgagggcattttggtcttcagttcaacactcttgctctgttcccaaatggggcgctatttaggggaatttaaagagaaagctgagaagaataaacatttaccgagttctcttggcattcagtctctgaaaaaccacagtataaactattcatgctgcttcttacatctgtcaaatcgaaaattaaaagccataaaagt

SEQ ID NO: 339 - DNA, 687 bp, Macaca Fascicularis
  misc_feature (1)...(687): n = A,T,C or G
acttctttaatgtgttctttctttatgtgattatttgattaatctctgcctcccccactagactgtaagctccctgaaggcaagaatcctgtgctcaatattagctctcccttggtacagagtaggcattcaataaatgctccccaaaggctgagtggctgacnnnnnnnnnnnnnnnnnnnnnnnnnnnnnnnnnnnnnnnnnntgagccacctgtgtgctctgacagttacagactgaataagttggagacttccttaaatggtggcatttccacaaggtaacaacacagagctcagacatgggaaggtgccagtggcaggggtgcagaggggctggagctgagggtgggtgaagaggctggagacaggataacaggagagagtatacaggcatgcctcaatttattgcactttacagggagcagaatttttaaagaaattgaaggtttggggacatataggtgacagcaataggttaagaaaagtgaagcaaagaaattgaagatttatgtcaacactgctttaagcaaatctattggcaccatttttccaacagcatgtgctcgctttgggtctctgcatcgcattttggtaattcttgcaatatttcaagcattttcattgttattatatgtgatctgtgatcagtgatctttgatatattattgtaattgttttggggtgc

SEQ ID NO: 340 - DNA, 3045 bp, Macaca Fascicularis
  misc_feature (1)...(3045): n = A,T,C or G
cagctgaagaaatggcagtcttttccaacactgggctgggggcactggctgctttgaacctattgcaagagtgagttgaagtccagagtggccttgtggccttttaaaattgtcacttgaattgtgtatgtttttcaccttatgcactaaagttcaccttgccctaggggtgagactgaaataatgatgaaatgaagaagaagacttagagtagttgagcacctactgtgtgccagacatagtgtcagacttttcacaggtgttattttcatcagggacttgtggtcttcagagttattgtctcaagtttatacctcagagatgaaggctggaagagtttaagcgacacaaggccatgccactagtaagtggcagagctaggatctaaaccaggtccgtttgacctggtttcatcctatgcagtatggagactcagaagaatgcagcatgcatgcacaccctccacacacagcctccagaccagatggggtttggattgaaacgcaaagcagtgcaaagttgggttggatccttgggttggaacttcttgttctgttctccctcccctcttcctctcttctttattacctccttccttaatgtgcctggcccatgctgggtcttacatatttgtcaagtgaacaaatgaaagaaagttttccaagcacacagaaaagaaagtagtgattattaaccagcaaagattcagaagcctgagccatgtcctcccagctattgtgtagttttggattgggttgttaggcaggtaggggaggagaatatttgtttctagacggcagtagttagcaaagcctctccgtgatgtttttgtggaggaaatgtttttaaaatagaccactcgtgcttctaagagagcaaaggggatagggcgtttgtgactagttgagctggctgtctaagggagggttctatggttctgtgctactttttttatcccattttcatctcattttttgaatgatgatttttatttatagatctctttaatggcataatgagcagaattccaaatgacaggaagccaggaaaaatgtgcatataatgaagacctagtttatcagcattactcatggaaaaagtcattttagtcaatgtaaagtcagcttgactcagtgacatggaagtgagcatgcccttaggtggcattactagaagcccagagcctggaacaagggaggcagtgggtcggcattactggaagcccagagcctggaacaagggaggcaatggttctcttttcctcggcacttcctgctgacacggagagtactgattctattctggaaaatgcattttatttgggaggcccatgaactatattcagaggtagtaagtatggccagaagccgcagatgtatttcacataaaaaattcctgagagcaagggccgggcacggtgactcacacctgtaatcccagcactttgggaggccaaggcaggcggatcacgaggtcagnnnnnnnnnnnnnnnnnnnnnnnnnnnnnnnnnnnnnnnnnnnnnnnnnnnnnnnnnnnnnnnnnnnnnnnnnnnnnnnnnnnnnnnnnnnnnnnnnnnnnnnnnnnnnnnnnnnnnnnnnnnnnnnnnnnnnnnnnnnnnnnnnnnnnnnnnnnnnnnnnnnnnnnnnnnnnnnnnnnnnnnnnnnnnnnnnnnnnnnnngtctccaaaaaaaaaaatattaaaaaaaaaaattcttgagaggattggggatgattagcttggagacgagagaagactcaggtggggtggatcatagtagctgacctcaattcagagtaagaaagagctttgtactgtctgaggtgaaatggatggccagggagaggcagtgggtgccctatcatgctgctcatttggcatagcaggtgtcttctagacccttgctagtcttgagaatccaagcagggaagtagtcactgctctgtgcgtcatctagcctgttctaggcgaatagtaaggtcagataaactgggagtggacggagcttcagaaatagtgggaatgtgctcagtaatgccaaataattatagtttggggagctagaagaatgggaatgaagatgtttaattagaatgaaattagtaagttggggctggaaggagtgaggaggaagagttgagtacatttgtttttttctttgggtgtaagagtcctagaactcttttaaaatggaagttgcattgagtttaatgggaaacttaagcactatatggtgccactcaacttttgaaattaaatcatgagttctttgtgtcatcaacactaagattctaggtttttgtttttttaatttctgaatttctttaaagatgataggggcttaatattagaaaggaagcaatacattccaggtagaaagttagttgctaatatgagaaattagactgctaaatccacctacctagcattaaccacccgtgtccccctgttaaccagccccattgtcagttacttgagactccctgaaataagaaggttggaaatggaaaagtcagtctcctaagttaagatggccttatttattttttctgataagatttccagactgatggaataaagaacttgatatattcagctaacatttatcacttattgcttgcctcaaggaaggtggaaagtgaacccagaatacaatattttaaagcctccttgggcacgcaattttgagtagaagttgactgatgggaatgaagacattctgggcagagagaagcaggtgccagagtgcagggcaggaaagaggagggttgcttaaggaaaggctctgtggtctggcacgcaggtggttgcaggaagtgcgggaacagcagctggtgggtggggctggctccttaagccaatgtttaacaaggtgagtgaatgggactcactcaatttcatttgtggagtgaaaaagagagaagagtccaaaatggccaagatnnnnnnnnnnnnnnnnnnnnnnnnnnnnnnnnnnnnnnnnnnnnnnnnnnnnnnnnnnnnnnnnnnnnnnnnnnnnnnnnnnnnnnnnnnnnnnnnnnnnnnn

SEQ ID NO: 341 - DNA, 652 bp, Macaca Fascicularis
  misc_feature (1)...(652): n = A,T,C or G
acacgcatgctccactggaataatgctggtctgccctctgtcctgacacgcatgctccagatctcagtagcctacttgcagtttcaggaaaactgattttcaaggaaagaagacatagtcctcttatgataccttttttgaacatttacaaatagccccggtaaccctgagagcctctgccactccgtactttgcctcttggtgcttcacaaacccagtctccaaatgggttgtttgaccccaagatccaagatttcaagactcctgttagatgatgttcttgtctctcctcctttnnnnnnnnnnnnnnnnnnnnnnnnnnnnnnnnnnnnnnnnnnnnnnnnnnnnncatggtgtgaatttactgaagagaaagaaagactctccgccaggtgggctttcagccaagcaggctgtcctcagaaccccttccttccttcacaattgcaagcattctgatccccaccccagctggggcagcggagctcctgccnnnnnnnnnnnnnnnnnnnnnnnnnnnnnnnnnnnnccaactatttcagctttggacttgcacctggtaacaaaaaaacgaacagaacaaaacaaaactggagtaaaatagatcctccccccatggccattgtaaagtcactgtgaattcatggaggag

SEQ ID NO: 342 - DNA, 670 bp, Macaca Fascicularis
  misc_feature (1)...(670): n = A,T,C or G
gtccactgagaggaagctcgattgggaatcagccccagcgcgcacacatctccccagggtcccaaggccntgcagcttcctccccccaccaaaccccaggcgacaacagtctccacggtgagagcaacattaagggcaaaaccatggagaaatctgggagaggcctcaaatctttccgtttaacaaaccctagtgatgggcatggatagtatgcagggatttgggggcccttcctcctgctcctccatcgccctcagcctccacacttcaaagtacaagctgttcaagtttcctaccagcaaatagccctaacttgcctctagagtaggccaaatgccaactctgtaaaacacacttacattataggttacagaatgtcactcttaacagtcatgtcttgcaacaaccctgtgagggtggtagtaatgcccccctacagcagaagacactgcagcttggagaagccagcttaagtggcagaataatgctagaacagctcaggtttacacgtaccgaataacatgtttcagctcattccatcctcacagcagcctcctgaaagtgggtacatcccatattacagaaactgcagcagagttgaaaattgcctccaaattattggaagagtattgtgaagattgaatgtgatatattcacgtaacatgcttga

SEQ ID NO: 343 - DNA, 911 bp, Macaca Fascicularis
  misc_feature (1)...(911): n = A,T,C or G
aagatggccagctagagatctagcatnnccaggatnnncatgtgcctctcctcaaagcttcctcccatctgtaggagattagtgaggcaaggtgctgctcagagaggaggacctcattgttcttatgaccttggccagttgttctcaaagtgtggtacctgaatcagcaatatcaccatcacttgggcttgttagagatccagatccataatccatacctactgaattagaaactctaggggatgagtagtggtgttctctattgctaagtgatagtgggcccagccatctattttaacgagccctcccagtgattgtgatacatactaatgtttgagaaccattgtactaggccattccggctgactcacaaagagaaggcagtaatgagggcctacaaatgggagggacctaagtgcctacctactcactaatcgcaggtgcaaacacacaaggagtttggtgggcttaaggtcagaggaatgtgtagggaggaatgtatgtggaagctaagattcagggcaagctaaaaatccgatactgcaacgttttccaaaatcccagaaggcaaactgtgcatgttctaccctgaaccacccacgcaacactttctcccttgccttatttttaattggattcactgtccaaaatgcagaggtttgctttgctttttttcagaagttccaaacagcaactttgagagcaatggggtgcttggcagctgttctgtgttttccaggaatccaactgnnnnnnnnnnnnnnnnnnnnnnnnncttatttttataggaagccaatttaaaaaaaaaaaaaaagaaagttttcttatagtattggaactacttctaattttaaaatgacttttttgatgtatttttggttaaatactatgtagtgtaatgtataattgct

SEQ ID NO: 344 - DNA, 234 bp, Macaca Fascicularis
cggtggcagaggacagagtcttctggatatgggccctggaaatgaaaactcccatagcatttgttcttatgaccactggtgtttgttgcacatttttttcacatgggggagtctttgccacagggacaagagagggccacgtccacttttggacagatcttcgggggctgtcttcactgaagcacttatgcgggaaagccccttgaagtttcttaacaacttatcaagtcttag

SEQ ID NO: 345 - DNA, 323 bp, Macaca Fascicularis
taggtgatttttcccccatcttagttctctggagaaacaatgaagatgggccatttcaattccagatgtaaacaaaaagtaatttttatttcaacatttaatgtaactgttattgtggattcttgtttagtgtattttctttcccttattgaagtaatagagaataactttccttcaaatgatttgatccaagatacgtcatttatgtatggcaaaatgccactattaaaagtgtaattcttgaatttaagcgttgaaattgatgactttttgaaacaaaacagtaacactggacatttctacatggtattgcatttccaaat

SEQ ID NO: 346 - DNA, 749 bp, Macaca Fascicularis
  misc_feature (1)...(749): n = A,T,C or G
cagagacagccacctgactgccgtggggaannnnnnnggacannncaatcaggatgcaccagacacctatcactatgtgnnnnnnnnnnnnnnnnnnnnnnnnnnntataaggagcgctacctgttcgtgtacaggcctgaccaggtgtctgtggtggacagctactnnnnnnnnnnnnnnngcgagccctgtgggaacgacaccttnnnnnnnnnnnnnnnnnnnnnnnnnnnnnnnnnnnnnnnnnnnnnnnnnnnnnnnnnnnnnnnnnnnnnnnnnnnnnnnnnnnnnnnnnnnnnnnnnnnnnnnnnnnnnnnnnnnnnnnnnnncgagccccaccttccagtggctgatccctgacaccgnnnnnnnnnnnnnnnnnnnnnnnnnctgcgcctacgacaggatcgtggttgcaggnnnnnnnnnnnnggacgccgttgttcccgactcnnnnnnnnnnnnnnnnnnnnnnnnnnnnnnnnnnnnnnnnnnnnnnnnnnnnnnnnnnnnnnnnnnnnnngtcacatggggatgggacacaggaacttagggtcagcccagacccnnnnnnnnnnnnnnnnnnnnnnnnnnnnnnnnnnnnnnnnnnnnnnnnnnnnnnnnnnnnnnnnnnnnnnnnnnnnnnnnnnnnnnnnnnnnnnnnnnnnnnnnnnacnnnnnnnnnnnnnnnnnnnagacaaacagcccagcactcaggttaagaaataccttttaatttaggtaaata

SEQ ID NO: 347 - DNA, 3864 bp, Macaca Fascicularis
atgccaggcgctgctaggcggtagggagtgcccggggccaccgcctccgcccgcccgccccaagccgcgcccactgccccaggagtttcctgaggttgttccgcttaacatcggaggggctcactttactacacgcctgtccacactgcggcgctacgaggacaccatgttggcagccatgttcagtgggcggcactacatccccacggactccgagggccgctacctcatcgaccgagatggcacacactttggagatgtgctgaatttcctgcgctcaggggacctcccacccagggagcgtgttcgagctgtgtacaaagaggcccagtactatgccatcgggcccctcctggagcagctggagaacatgcagccactgaagggcgagaaggtgcgccaagcgtttctgggactcatgccctattacaaagaccacttggagcggattgtggagatcgcccggctgcgtgcggtccagcggaaggcccgctttgccaagctcaaggtctgtgtcttcaaggaggagatgcccatcaccccgtatgagtgtccgctcctcaactccctgcgctttgagcggagtgagagtgacgggcagctttttgagcaccactgtgaagtggatgtgtcttttgggccctgggaggctgtggctgatgtttatgacctgttgcactgcctggtcacggacctctcggcccagggcctcaccgtggaccaccagtgcatcggggtgtgtgacaagcacctcgtgaaccactactactgcaagcgccccatctatgagttcaagatcacatggtggtgagtagccttggtaggcaagagtcccatcagggaggatgtccaccacacttggtggctgtgggagtaagatccctgaaggggctgctgactgccccagaatctgccgaggtgaggaccgagtcctgaggcacagctcccaggggacagagatgtagccccactctccctgactgcacctcagggttgggctcagggcttgcagcctgcaggcactccggccagcgctcacctggcctttcctcaaggcatggtagtctttccttgaggctgatagctagggcttgagcaggaagtcccaagaagtttcgtcaccttcttgaccttgcaagagagtttctgcccattttagagccacattatcaaatcgatgaggcctaatcacttcctcgaccctgttcaagcgtccctcccttgtgcttagtgtattgtgtgaacacggaacatgatgggggatttacctgaccagccaccccgtagcccctggctgaagaagaaagggcatcttctgtcccactgcaccccttctcctccaagaatagttgcccactttcctaaaatgtggaaagacttctcttttccttccggaacatgttattcaccaccttttggagatttaaccatagctgccaaagctatgcacccagttggccttagaaaaccacaatgtttacagccctgtcttagggccacagcttctcctatcttccaccaccctccttgcttgcagggttgtcttctcacagggctggaatgcaaatttcagaggcttcttttgaagattccccaagtcaagcaggcaagatgcccagatcttctgttatgtttgacatgtaacatcctttttagaggctcagaacacctccttggctgctatctcatgtgttagaatccaatttgtggtgaacctctttggaaggggccccctctttaaaccttgctgctctgtcctggtaacattctcctaggagagcatgtcttctgagaaggtaaaggaagggctgggtgagacacacagctatcctaggagccgtaggaagacagagaaaacttcccttttgttttattcctcactcctctatttttgtcttacttctctatattttgttttactcctcactcctctatattttgttttacttactcctctatttcagaaattgaaaaagatccccaaggatctgttactactgcatttccttcttgctctgtctacagcctcggccaactagtcagggtctggacatgcatctcctaaaggaagaactgtgtagcaccactgatcacaatgtaacatttccatgctgcattaagggcgtctctctgtaatcatgaccgtacctgtctcttcctgggtattcctgaagggagattttttttttttaatgtgtgaagaattgatgtgagccaggaacatgtctgtagtcccagctacttgggcacacgcctgtagtccaggctactcaggcacacacctgtagtacccgctactccagaggctgaggcaggaggatcacttgagcccaggagatgaagactgtagtgtactatggtcatgcctatggctagccactatgctccagcctgggcaacaccatcgttaaaataaataaataaaggaattggggaggacaacctccctggtcccagacttacaggaccagatagatgagatggctatagggggagctgaagtctctgttcatatgaggaaaagaagaccaagccctgggactttggttgaattgctccgtggggctggaaggcagtgacctcctgttccctctgtgtaaacaaagattccagggcatggttgtgcactcctgttgttctcttttagaggtgggaaagaggtgaatactgagatctaagaggaaagaacagtcattcatgttctgagatacgggctctctctattgttctcatatacaaagggatagtcgcttttttggagctgatgtccctgcttggaggttagcccaaaaacatggctcttgaattgttctaagagaaaagtctttgatttcggttcttctgattggtgttacctactgcctaatatgtgttcattttttgacagagaggcagactattgataaagtctgtgtgaacagagagcagttcattaagcccagtgctttcagtaatgtggccttgaccctttctgctacccgccatcccacggagcatcgcagggcttggttatttagagtccatacatgcaagccagggagaaacttgtttgctcaaatgcaggtttgctcaaaaacaggtcctgaaggctggcttagggttacagggatgctgggtaagaacacttcttggggctctcgctggagaaacccctgtttctctgactccctttgtgatcctcacaataatgtcttctgtgccactgtaggacacaaggctctggccagtagagaagacagagaggtgacactgggcagcaagctgagagctctttctaaatagagtgaacgaattcagtggtctagtttctccattctctgatgagaaaccgaggccaggctaaaaagtgaattagatgtggtggattgtgctaatggcctccaaataaaggggttatccctgtggaagtgatttcttcccatttgatcccttttcaactctgaatggccaggcccagagcagaagaagggttgggtctggaaggaaggctctaaaggttgaaagcttctccctgatcagaaggaagtgcatctttatagaattgtgtgttgggaactggggtgggagaggcactttttggaattctgggggaatcatgtctgtgtatatacgtattgagtggggaaggatgggggttggcaggggttgagggaggtgggaacaaacagtgggtatgggaacaggcagtcacctcgagtcacctgggtccgtcgtcgtccttctgtacggtgttgggtttatgtacacagtataacacttcctgtgtgagttcatgtacctgtctgtgagtgctttggtgtatggagcctcagtacactccaagggcattaaagtcaagaactagaaaaaaaaaaaaaaaaaaaa

SEQ ID NO: 348 - DNA, 725 bp, Macaca Fascicularis
  misc_feature (1)...(725): n = A,T,C or G
caggcaagagatgataanctcagagccacagacgtcaggctcatgcgccagttgcttgtaatcaatgagagcatcgagtccatcaagtggatgattgaagagaaagccacnnnnnnnnnnnnnnnnnnnnnnctcagtggtagcctgtgcagtttgttggagagtcagagcacctccttacgtggcagctacaacagcctacacgatggcagtgannnnnnnnnnnnnnnntccgtgggaagttatctggacacattggcagatgatgtcccaggccatcagaccccttcagacttggaccaattcagtgacagctccctaatagaggacccnnnnnnnnnncacaagcgtcctaaattggattcagactactactgcnnnnnnnnnnnnnnnnnnnnnnnnnnnnnnnnnnnnnnnnnnntaacttgtatttatccttcttctctgctgctatatttttggtgtgatttttattttaataagatgacctttttaaaagaagctgattttgaaactgcttaatggtatttctgttgctcctaatacttctcatctgaactgatttattttcctctgttatatctctattttttatttattacaatgattttctcccttcttttacagtagcacaaacaaagtagggggaaaagtataagcaataattatgtttttgcttttgttttcagagcaacgggtcagggattacaagaaaaactttgcta

SEQ ID NO: 349 - DNA, 664 bp, Macaca Fascicularis
  misc_feature (1)...(664): n = A,T,C or G
aagaatgctttatcagtgacgtttgtttggtttttgtttttttaaattgttttgggctagaaatgagtttctctagttttatttgttctccctgagttgagttatgcaatgaatggcatttttgtggtaaaatgctgatcctaaaatctattcactcactgttcatttaagtagggaatatctgtatacgttaatgactgggtaaaacaggaaatacgttttgaatatacagcctaaaggcaggcagttacagggttttttggtttctctgattttatagggtacaagttcccagtggtaggatgccctgctgtgcgactacactgtgtcctgagcagtgtcacctctcatcagtttggccagccctacaaccaccatgcctagccctgtgttgcttgagaggatacctgtgctggaatggacataaggaaaagtccttactttccccccaatttacctctctcaatcttagttcttccagaacacacttccctttcccaatgcaaataaactaaaagtgagatttgatacatagaattttgtgaccaactaaccttacacataatttgagggattcctggattcttccagtaatactgaaaagcacacttaantaaagcatagtgttttttgtttgtttgttatggaaatatggtatacgttc

SEQ ID NO: 350 - DNA, 734 bp, Macaca Fascicularis
  misc_feature (1)...(734): n = A,T,C or G
ggacagagnnnnnnnnnnnnnnnnnnnnnnnggtcacatctggttggtggaaaactaggtgaagtgcttctttaatatgcactggcttgtcttcccacccaagatgtgacaatgtttgagaaaaggtgtgtcatactcagtgacttcaatttgcaaatgaggggcctaaagaaagctctgcagctctgaacctctcactggccagagctcagcctattggtcccacccatgatgctaagacaaacagaaactggaagctgaagtcagtgtctttggtgcttagaaaccctgtggatttccctctgaaccgagatttttagtagtaaaataaacaactcatggacatctgtcagatgagaagttttggtcctgttagagaggaaaaagaccgtaaggaaactattagatccatttgggctaaagtttggcttttccttccttgagtcatagaacgtatccatctcccaggaaatgtccttctctggcatctgcttgcccttctgagtctgccttttttgcactgaacataagcactttatactaatgggtcacaaatcttgcagcccttaatttgggataagaccagattttcctgacattttcctctaactcattgaactatcaaattataggtaaccactgactagactgataagagatgaggctaaaagcctttgaataccacgctgtagtctccaacagaaaaaccaccaaaannnnnnnnnnnnnnnngg

SEQ ID NO: 351 - DNA, 1958 bp, Macaca Fascicularis
attatgtcaccaggagggaagaaagggagtattttgtgaagcagtcccattcaaagccacccccagaggccgggaggagaccacaaagctgagaacacagccgggacctgcccactgacacactgaagactcaacacgattcaggatcctctaaactatgtaaaacaaaacagaggagagaaaatgttaacatgattatctctgggaggaaaaaagagatggaccctccgcctcacagttttgaaaacaccagcagcagttatcctgctgctccttgctagagacactaaggaagttcacatctatgaagatgagggcaagaatagtccagatcctaagaagagtcatatggccttctttctgttccttcaatgacaggttccttgttgcttcaagacctactcaaagagggctgccaccaatttggtcactggaagaaaaggcgggtctcagggaatatggatggctgtcctccctttccccttcagatgtcagccgcatctactcctgctttcggaaaaccccagggcaaacggacctgccaggcagccaaccaaccaccagcccccgtgaaaggctggaacccagctgcccaattcggttgctcctgtccaaagccagacaggtggcaacccagattgaatctgttgttgtgggaatgatttgattcacaaacaaggttattaaattttatatggagacacaggcgaaagtcacaagatcctggagagaaagacctgattcacataaatttatcttaatagctgtgaattcgggcgcacaaagcagaaaaaaaaattaatggaaaggcatttcacctcctccgtctgcctgctctcctccactccccagcacataatatgcccacacacacacatagatcaacaactgccacgactccatccagcccttgcaggaggagcccaacacattgatctgagcctgttttgacatataaactccaatttggccccaagtcactgcgagtggacactgccaccagcggctctgacactaggttatttgttgttgctgttcgctgtccctgtttgcacattaatccagtgacaattaggtgtcagcgagcgttgtttctgcttagctgatagccttgggctctgcgcttgaagccctaatcaggagtgtaaactctgctatatttcaatttggagaagcgctcttccgctaagaggcccctggcactgcgataaataaaacgcctatttactctattgccacacttagacatctaatgcacttactaccagccccctaatcatagcctacagttaaaaccgcctataaatcactccgttctcatcctgcacattagtgaagccattttccccaaaccccacaatgagcactgtttccttttcttgttagtcaaaagctagatgatttttattaggttaaagaccagttcacagatggtaaatcgcgtggagagaaatgagctggagagttacaccgagtcagcgcgggacacggctcccaggccgggccgggccgggagtgggaggcggttcccgatcctaggcggcgggactcccaagcgccgagggacccaagtctctgcttcacccacacgcacacccggcgtcggggcgctgtggcctcgccccacacgcccagcgcaggccgcagcctggcctggggatccggcaccagggcagggtgagctcggccggacatcctccacaggacagcccgcaccccgtaatcgcgtcaaaggcgccccatccccctgtctctcgccgcgcaagtttcccaccgacgcccgctcggaaggcgagagccccggcgcggcccggagctgcgcggtccccggggaccgcgcgcaacaaaagcccggcccgcaacccctgctcctcgccttcctttttcaattctcccctgatctcaggtggaattaggaggattaaagcagcgagtaaatgaaaaaaaaaaaaaaaaaa

SEQ ID NO: 352 - DNA, 377 bp, Macaca Fascicularis
  misc_feature (1)...(377): n = A,T,C or G
tagcataccctacaaacagaggcagccaaagcaaaattggattaatgggagcacatcaagttaaaaagcttctgcagagcaacctcttgggtctctaggtctgcttttactggattcacctgcatgtacctggtctgggggtatacggttgatccctggccagcctgtcagagaactatggctccatggcccctagaccccaggctcccggtcagcctgtgacacagggcgacagcgacnnnnnnnnnnnnnnntgtggaaaccaagtggggactnnnnnnnnnnnnnnngtgatgactttgaagaggctgaggaccggtacttcagggtgtgtttcaagaagctgcccctggagggaggtggtagggaggtggtgg

SEQ ID NO: 353 - DNA, 722 bp, Macaca Fascicularis
  misc_feature (1)...(722): n = A,T,C or G
agacttagcatgtnnnnnaaagagtcnnnnnnnnnnnnnnnnnnngnnaaaggggctatatgtgtttgaatagaccacactgaaggagcacaatgcnnnnnnnnnnnnnnnnnncttcccagggtggagacagtggaaaagaactgaggacaagaaagggttgggtaggtcaaggggtcgggggactggtagtcccccagtcttnnnnnnnnnnnnnnnnnnnnnnnnnnnnnnnnnnnnnnnnnnnnnnncttgctgtttgtccgttcatgtcacaaactaccactactacctacctgcagtggggttgcagagataggggagactcaagtcttgctccctaggagctaccagggcccaannnnnnnnnnnnnnnnnnnnnnnnntctagtctacaccccctttctggcggcctctccacnnnnnnnnnnnnnnnntatttttnnnnnnnnnnnnnnnnnnnnncccctccttaagcccatccctcgcccccagcctgaggtgatctttcctnnnnnnnnngagcagttactgtctgttcaatnnnnnnnnnnnnnnnnnnnnnnnnnnnnnnnnnnnnnnnnnnnnacaccgatttaaaattnnnnnnnnnnnnggcatggtggctcagtttgtaatcccaacacttagggagtcgggagaatcacttgagctnnnnnnnnnnagaccagtctgggcaacagcgagaccccatctcttta

SEQ ID NO: 354 - DNA, 752 bp, Macaca Fascicularis
  misc_feature (1)...(752): n = A,T,C or G
agcgcgtgcagacacaacnnntccgaagcggnnntnnnntnntnnctgggatcagtgtccggctggccggcctggcgttggctgaccaaatgctcgtagaggttgacccccacagggaaatcacacaggacgcagacctgccctgaaaacatggatggacgagggattttggccacaggtgtgggtttcccattggaagagggcttgtttggagaagggaggctggctgggggagaaacccggatcccgctgcatctccacgcctgtgggtgcatgtcgcgcctccacgcgcacacgcgtgcgcgtgcccatctgctgcacacagctcactcgtatgtcctgcaccggtacacgcatctgtaatacagtttctacgtctatttaaggctataggagccgaatgtgccccgttgtcaatggttccacgtttctccctggctcctctgtgctaaggcagagtgtggcccagggcttaagaagttattccgtactgtttttaagaacacttttatagagttagtggaaggcaagtgaagagccaatcactgatccccaagtgtgtcttgagcatctctgagcgtctggtctggggggaccacgtcgatcagacccacccttggaaagctctggggtggacccagttgggatgctcaccccgtcactgagggttttggttggcggcatcgtttttgaatgtagcacaannnnnnnnnnnnnnntataagagtgttttaaaaattaacttccaggaa

SEQ ID NO: 355 - DNA, 672 bp, Macaca Fascicularis
  misc_feature (1)...(672): n = A,T,C or G
aacggttgaggtctaggtttttgctgggatttacatnnnnnnnnnnnnnnnnnnnnnnnnnnncaggaaaacggtccttgaccccatagactagggtaagaataaaggcaataaatttggtctgactcagaatataggagatccatatatttctctggaaaccacagtacgcactaaaatgtgaaactgaaggttttgttaaaaagaaaaagataatgagcttcatgctttaattacataatgatttccattacactatttctgtgaaatgcagcaggttcttaaacgttatttcagtggcatggnnnnnnnnnnnnnnnnnnaaagccatgtgtgtggccttcttattagaactgaaagagagaggctggtgcccaaggctgctacctgctccacctttgccagctctggacatctgaggacgtccctgcagatctggaatggggccatcaactgaccatttgcttctcagaatttcagtttgagacatgagacgtataatcagttacttttctctccacagagaaccccttttgtgaggggagaggagctatggaatgtggttcagnnnnnnnncatacaactgcatccttttggagtcctttgccaacaaaaacagaccaacagaccagatcgtgtccatgttcaatgtcatgtcttgatggactcgca

SEQ ID NO: 356 - DNA, 752 bp, Macaca Fascicularis
  misc_feature (1)...(752): n = A,T,C or G
gcagagcaagnnnacacaagaaccccctaactttcctataccccaaccctctcttcccctttctgtccccgaatacctggcggcaagagacctcttggctattgtccttgctcccagaatcaagcataaatgccagacaaggcgattgagaagccaatcaatgcaccctttggcaagcccccatccacacctggcactcccctctaccaatccctggcacagggttcctggagagcaggtgctgtacattttccagctttacaatggggctgttgacagccataattaggaaggcatgaattatgcggctgtagtgcagagccctacaattaaggcgggaatgaggggctggaggcagcaaatggaatctgccctatgagtgtggctgttgaatcctgtctcctgggtctgactttccgtaatatgattggggtacagtagaggtgattaatggggctggcatcgctctttggcctgaggttctctattctgggaaaggtacacagggtggagtagggagaagccgccccaggaggcggtgtaggggtggaaagaagaggcagagaggtcgtcgtcgtcgcccagcagcaagggctgcaaaacagttgaactcctggttgctttggacatgtatgatttgtacaagccaggttcaaccgttgcctcaagaaatcagatgggaccaatttagtgtccttccacctgtaagcgaagcccccatttgaggacatatatcgtattgtgttctgggt

SEQ ID NO: 357 - DNA, 1814 bp, Macaca Fascicularis
ataactgctatttaaaataccaaattcaaatacattgacccttaaggaacttaatgctttccagttcaaaaataataagccctaaataatttcatcaaattattttgcatttaaagcggtcatgtaagacctcaggagaaatacttgcttaatgtcatatatttaaatacagggcatttacatccaaactaatttacatatgcttatgaaatataaaagagaacagcaagaaaatctgacggtaatacaagatttgacccaaagaaacgcaaccttattttcaacaagtaggctctaccatgtatcgaggaatttaaaaatagccatttgcagacatattaaattatctgtcatctaataataataataacgacaaattcgtcattagtgatgactagtgagtgtctttcaagaaaacatagcttgactttcaaatgttctacaacatgccacgaattttttcttttcagagataaggtcttttgaaaagtgtctgttcatgtcctttgcccacttttttatggagttctttggttttttttttccttgtaaatttgtttaagttctttatagaccctggatattagacccttgttggatgcatagtttgcagaaattttctcccattctgtagtttgtctgtttattctattgatagtttcttttgctgtgaagaatctctttagttttttgttagatcccatttgtcaatttttgcttgtgttgtaaatgcttttggcatctttgtcatgaaatctttgcctatgcctatgtcctggaatggtatatatgcggtcagcaatcgtataaaaaaagctttaacatcactgatcattagagaaatgcaaatcaaaaccacaacgagataccatcttacaccagtcagaatggctattactaagatgtccaaaaatagcagatgcaggcaaggttgtgaagaaaaatgaacgcttatacactgttggtggaagtgtaaattagttcaatcattgtggaagacagagtggcaattcctcaaagacctaaagacagaaataccatttgactcagcaaccccaatactgtgtatatacccaaaggaatataaatcgtcctgttataaagacacatgcacacttatattcacaatagcaaagacatggaattgacttaaatgcccatcaatgatatactggataaagaaaatatggtgcatataactacagaatactatacagccataaaaaagaatgagattgtgttatttgcagggagatggatggagctggaggccattgttcttagcaaactaaggcatgagcagaaaactaaaccctgcatgttctcacttataagtaggagctaaattatgagaatacatgaacacatagaggggaacaacacacaacggggcttttcagaaggtagagggtgggaggagggagaagatcaggaaaaataactaatggatactagacttaaaatccagggatgaaataatctgtaaaacaaacccccatgatacaaatttacctgtgtaacaaacctacatttgtaccccgaacttaaaatagaaatttaaaaaaaaaagagagatggagttttactgtgcactatgttgctcaggctggtctctaactcctgggcttaagcaatcctcctccccttagcctccggagcagctggaactacaggcttgtgacaccatgcctcactgtatttttaagttagaatatccctataataaaattttgtggagtgagattgggaagtatgttaatttgaggaaagaaactttataaaagtgacatgtttggaaaaaaaaaaaaaaaaaa

SEQ ID NO: 358 - DNA, 760 bp, Macaca Fascicularis
  misc_feature (1)...(760): n = A,T,C or G
tccagatgtgtgaggtcatgtgtattacagtgggcaggtatttgctttgnnttgcactgnnnnntaaannnnnnnnnngaatannncatgaaacattttnnnnnnnnnnnnnnnnnnnnnnnnnnnnnnnnnnnnnnnnnnnnnnnnnnnnnnnnnnnnnnnnnnnnnnnnnnnnnnnnnnnnnnnnnnnnnnnnnnnnnnagcaatgnnnnnnnnnnnnnnnnnnnnnnnnnnnnnnnnnnnnnnnnnnnnnnnnnnnnnnnnnnnnnnnnnnnnnnnnnnnnnnnnnnnnnnnnnnnnnnnnnnnnnnnnacctgtgttcaagtagagaaaaatacagtagagtctgataggacatattcttgtaccacagacaannnnnnnnnnnnnnnnnatttactatcaactgctgctaatacattattataaaacttacctagctcctgaattcttcctatcttatagcttaaaaaaattaggnnnnnnnnnnnatcagttaccttgcagaaagagctttgtatgacagacattgtcttgttttatatctgtaaaatattagctgtatgaatatgatttannnnnnnnnnnnnnnnnnnnnnnnnnnnnnnaacagtgttagacaaggtgcaaagcaaaactgattgctcaagttgatagaaaacaaaattctgaatatcttcaaattaaattcggtaaaaacacattatttttttcatatgtgatgtattcatgcagaacaacaatctttgtattttgtttt

SEQ ID NO: 359 - DNA, 722 bp, Macaca Fascicularis
  misc_feature (1)...(722): n = A,T,C or G
gcaccgggaaccagacaggagaccagagggaaggatcgtgactgactgggcagaatccgnnnnnnnnnnnnnnnnnnnnnnnnnnnnggcatnnncaaagatgcatcagcccaggtctagagagagtgcactgtccttccaggttcagctaaggcagaggagatcgggaggcataagacgtaagtnnnnnnnnnnnnnnnnaatgcaggcaccttccagcagccctgggattccannnnnnnnnnnnnnnnnnntctgcactgccccagcgagcaggaagcacagcgtcctggaaagggctggtggacagtttannnnnnnnnnnnnnnnnnnctggctggccactgccagctgcaggcccaggtggctgcaccccactgtgcctcccattgttcaccctgctgctatggtcnnnnnnnnnnnnnnnnnnnnnnnnnnnnnnnnnnnnnnnnnnnnnnnnnggaagtggggcctggaggggggtgtctgggtcatgcagtggctcccttgtggctgggtgccctccctgtggtcatgagttcataggatatnnnnnnnnnnnnnnnnnnnnnnnccccctgtcnnnnnnnnnnnnnnnnnnnnnnnnnntgacgcactggcccccatttgccttatgnnnnnnnnnnnnncttcctgaggtctcccaagaaacagatgctggcaccacacttcttgnnnnnnnnncagaaccatgaacccaa

SEQ ID NO: 360 - DNA, 1683 bp, Macaca Fascicularis
ggtcagcctcaaagcatagttatgctaatttctaaagaacctcaattttattaaagtattttgtagtcataagtaatgaagttagatagtatagagatgtatttaggcatagatttttattttttatcagatttttaaaacaatgttctctgtataacatactgataaatggactaagatgagtatttacatttgattgtatacataattacagttatatccttaaaggaaagtacattcagagaacatctaaggagaattattagaggttataaatgctaagctctaatttaagataagcattctaaatagaaccattttattatttcctgaaaagtgcttagaaatcagaaacatgtagtttctttatggctgtttgattttacgttttcagcattacagtaacttcagagtaaagtctttttaccaaatacttgatgttaccagtttccattggttttattttccattcttgggaggtatatagcaattgtctcatgatatagatatacctggtcagctagagcatgcttacattttttccaggtttcagctttgccattcatggcttattttttaaattgtgattatagaatttgtgtctaatctaaggaattcactactgatctgtttgggagttttctttccagaatacatagggtctgaatttatctcttagaaaagctattttagctttttaaataaatttatttattcattcagcaaatagggtgtatgccaaagtccaggtactgttctaaacattgaggctatggcagtaaagaaaagtgttcctgcccctgtggagaagatcattcatgtaagatgcttatgttagtaatgccattcttgctctttgctgcatattttttaccagctttttattctcagaaagtaaatgagtggttttggactagaaaagcctacgttgctaaatgtcaggcactatcagagagcagctgttgtattactgcccacttaagttactactgactaaataatttataaaacagccgactttgtctattcaagtacagttttccaaatatattaacttttaagcctagattttactgttattttatggaattatttaccagaaagaaatttagatacattttgttttttatatttactttgctactttgatacttgcacatcttcttggattttttgtgatttaagcagttataggatgattctttccgaatttgttcaaaaaaaaaccattaagtacatttaatcttctaggcatataaataaaaattggggtttatacaagaatgaataaaatacagttccattgtagtagggaaaacagacacgctgtatgtatcataagaaacctgtgtctacatcttaaaagcaacatggaaggtagcaggtatccttatgtcatcagaaggctttgttgtggaagtcacgtttgacttttattaaaggtgaatggcctatgactaggggaaggtacagaggcccttaagaagtacgagggtgtggtatatcgtaaacaaagcaagtaagtggaggtgtatagatgcatgcagagaagtatttttaaaactttttttaaaaagataaggttgaagagttagttcaagacccaatactaacgctgtttggatcttgtctcattggcatagaaaactgtaaagatctaaaaaaaaaaaaaaaaaaaaaaaa

SEQ ID NO: 361 - DNA, 189 bp, Macaca Fascicularis
aaagcgcgagagaaaagtgtggtgtgggagagagaggcgggatattttcacacatcccctttgtgagttcaagagagtctggcgtctctttttgcaaaggcatatgaaaatgtgtgcgtgcccgtgagagtaaaatgaggagggggagggacagcccaccccgtgtctaccacgacccccgttctcacg

SEQ ID NO: 362 - DNA, 2231 bp, Macaca Fascicularis
  misc_feature (1)...(2231): n = A,T,C or G
atcgaagtagaaatggaatctgctttcacactcctcagaggcggctgttttgtccctaaaaaaccaaagcttattagaagcagcaaataagaaagtgaaacctttgaacttgggaatagtattaaagttatcatctaggccttgaaatgttggagtcacagatcttgctccaggaaataaaatagaccagctgctgagtgtattctggtcctctgcctaagactatagctaaagcatcttttatatattgacccagggaatatatcctcacagcctcccttgacaacaaaacatagcgtgtttaaaattttatattctttggggacaaaatttctctctctgatcaaaatttcttcttcatggttcatagtccctttcatttgtcagtgtagcatcctctgaatgtctgctgtggttctgtgaacactgggctagaacattgtagaactgaattctaacccctgctctgttactaatttgttttgtaaaaataatattgttactttcatgaatacctcaatatttccatctggtttggccaaataacttctaggttttgttttaaatctcacattctctgattctttctaaaacataaagtttcccaagttccaaatttatctcagtcttcttttctttatgttaactacagatgcctcttataagaggaataagggatattttgtaacaatttgatcatctttgtaaatcttctattactttgagtagctataaattgtggggacaacactcaatcttgatgtctcaaaaactcagggctgtgaaataagccaggaaaagaaagttaaatacctcatgttctcactcatatgtggaggctaaaaacccttgatctcatggaagtaaaaagtagaacagaggatattagaggctgggaagtgtaggagaacaagagggatagggagagatttgttaaaagatacaaaattttggccagatagcagaaataagttccagtgttcctatattcatcattgtaggatgactatagtaaatatatagtttcaagtagctagagggagaatatcgaatgttccaaacacaaagaattgataaatgattgagatgatgggtatactaattacactgatctgattactacatgttatatgtatccaaacatgacaaggtggcccataaataggtacaattattatgtgttaattaaaaaatacaaaggtcgggcatagtggctcatgcctgtagtcccggcactttgggaggccgaggcaggcggatcacaaggtcaggagattgagaccatcctggctatggtgaaaccccgtctctactattaaaaaaaaaaaagaagaaaaaaagaaaaaaaaagaaatacaannnnnnnnnnnnnnnnnnnnnnnnnnnnnnnnnnnnnnnnnnnnnnnnnnnnnnnnnnnnnnnnnnnnnnnnnnnnnnnnnnnnnnnnnnnnnnnnnnnnnnnnnnnnnnnnnnnnnnnnnnnnnnnnnnnnnnnnnnnnnnnnnnnnnnnnnnnnnnnnnnnnnnnnnnnnnnnnnnnnnnnnnnnngaaaaaaccaaaaccaaaacccactcaggactgagtaaccaaatggcaactaagacctgaattcatggcccctctggaactgaaatgttgccatccggtgctctgggactgattgccttctttgagctctttcagtgttagagtcagtgaagtctcaggcacccatagctggctttgtgcccttggtcaagataattaacttctggttctctggcttctgaatgaaaacgagaatatgattatcatatattttgagagaacacatgtgatagtctttgcaacttatctgagtgtggctactcttatctacttacctggtagacaaacagtttgtatttgtctggcgatctacactaaattcagattttgataggcaaaaatggccagagaggttctcttaactcaggactttatggaaacaacaaagaagttacacgaaagtcaaacacactatcaagaatgaaaaccctcctgaagtctttaattctgcttactggacaggggattcagaaatcaactcctagtttccctgcactttaaccctgtgatcaggagaatcatctctgttttggtgtggcctgcaattaattatttttctttgagactccatctcaaaaaaaaaagaaaaaaaatacaaaaaggaaaaaaaaagaaaaaaaaaaaaaaaaaaaaaaaaaaaaaaaa

SEQ ID NO: 363 - DNA, 716 bp, Macaca Fascicularis
  misc_feature (1)...(716): n = A,T,C or G
gcagagagaaagagacnnnnnnnnnnnnnnnnnnnnnnnggaagtcacaccagcaagaaattaatggacaaaacgaaaaggggaggcctttttagttaannnnnnnnnnnnnnnaacaattatgtttnnnnnnnnnnnnnnnnnnnnnnnttatattttatttctgaagagtaaggaatagtattttgacttaaaaatgattctgattacagagttcactgtttattgaagaactagcatcttaaatcagccttccgcaattcacgtaaagtttctgggtcttctgggaggctacgtgagtacattacctaacagaatattaaattagacttcctgtaagattgctttaagaaactgttactgtcctattttctaatctctttattaaaacagtgtatttggaaaatgttatgtgctgtgatttgatatagacaacagattagtagttacatggtaattatgtgatataaaatactcatatattatcaaaattctgttttgtaaatgtaagaaagcatagttattttacaaattgtctttactatcttttgaagaagctcttaaacacattgttaaatggtattagttaaccaggccagtgaaaatgaaaccacattttgggtgccattaactaggggaaaaaaatgtaaaaaatgtaaaatggataccaattgcactaggcaactgtacattttgtatttatatacaatttctat

SEQ ID NO: 364 - DNA, 775 bp, Macaca Fascicularis
  misc_feature (1)...(775): n = A,T,C or G
acaggatgatcaaacttggtctgggtatgatgaaagatgatcctactgctgatgataccagtgcagctgtannnnnagaaatgccgcccctcgaaggagatgacgacacatcacgcatggaagaagtagactaacctccggctgagggatgacttacctgttcaatactctacaattcttctgataatatattttccaggatgtttttctttatttttgttaatattaaaaagtctgtatggcatgacaacaactactttaaggggaagataagatttctgtctatttctaagtgatgctgtggtaccttaggcactaaagcagagctagtaatgcttttttagtttcacattggtttattttaacagactggggtaacgtgtgttgtaagatgtatgtaacatgatgttaactttgtggtctacagtgtttagctatcaagccggatttctaagtagaccaaatcttgttattgaagtgttctcgagctatatatacctggatgtttagaaaagtatttgttacatcttgtaggatctactttttgaacttttcatcccctgtagttgccaattttgcatgtactagtcctctagaaataggttaaactgaagcaacttgatagaaggaactctccacagggcttgttttccaaagaaaagtattgtttggaggagcaaagttataagcctacctaagcatatcataaagctgttcaaaaataactcaagtcttgtggatggaaatgtagtgctggagtcacattctgctaaag

SEQ ID NO: 365 - DNA, 705 bp, Macaca Fascicularis
  misc_feature (1)...(705): n = A,T,C or G
aagcgctgcagaagcatgaggtgagggcctgcagcgctctgtaccgtttaggatgtgggaccagccgggagnnnatgannnnnnnnnnnnnnnnnnnnnncagggtgagtgttctcagacccggggcggctggtggttctccagggccgggtaccccttttgtgtgtgcggcctctgactnnnnnnncctgtggaaatgggggcagatggtggccatcaccactgggtcccagggcagaagcttagataccagccttgagcagtccgaccttccaccgcggcctgaatcccaagcttcagccaacccaggggacctcagcagcgacagtgnnnnnnnnnnnnnnnnncctagcctttgcatgcccaggggtccagagccaggatctggccnnnnnnngccacccgccatggaagaaaagctgaccctgcccacctgctgcagacccgggccccgggctaaggttgctttctgtgatggctgcctggtgacattggacaccaggaggggtatggcactgccctcccctcctggagcccctggcactgacctcctggactnnnnnnnnctcctggtcactggccaaacacccaccttcaccccagccaccccaggccctggctggtgccccatgatacctgcagcccacctctgtgtctttgctccacccacccctgcgtggcgctggtcaggcgcaaacctgcgcc

SEQ ID NO: 366 - DNA, 737 bp, Macaca Fascicularis
  misc_feature (1)...(737): n = A,T,C or G
agcgcagccccacgcgtggcccttcatggcgtcnctgcagcggcgtggagggcacttctgcggcgccaccctgattgcgcccaacttcgtcatgtcggccgcgcactgcgtggcgaacgtaaacttccgctccgtgcgcgtggtcctgggagcccataacctgcagcggcaggagcgcacccggcaggtgttcgccgtgcagcgcgtcttcgaaaacggctacgaccccatcaacttgctcaacgacatcgtggttctccagctcaatgggtcggccaccatcaacaacaatgtgcgggtggcccagctgccggcccagggccgccgcgtgggtaacggggnnnnnnnnnnnnnnntgggctggggccatctgggcggggaccgtgggatcgccagtgtcctgcaggagctcaacgtgacggtggtgacgtccctctgccgccgtggcaacgtctgcactctcgtgaggcgtcggcgggccggcgtctgctttggggactctggcagccccttggtctgcaacgggctaatccacggaattgcctcgttcgtccggggaggctgcgcctcggggctctaccccgatgcctttgccccggtggcactgtttgtaaactggatcaactccatcatccaacgctccgaggaccacccgtgttccctggacccggccagcaggacccactgagaaggaccccctgggtcacctcagctgcccacagccgcgttctccagca

SEQ ID NO: 367 - DNA, 582 bp, Macaca Fascicularis
tagaaagagagacagaactcaggatctcacttgtttgctcaaatcacagaattgtggagttggaaggagacccagggtcacatgatgcccagccactgagcttacagatggggaaactgaggcctggagaggttggatgagttgccccaagccacctggtctgtggaaacagccgggcccatcatcctgtccttcggagtgtctctgtggagctttgcatcctgcctgagctcttcggtgacttgtgagtgtgagtggacgcgtgtgaaggtgtgtgcatgacatcaacaggtctctcttaatcagccactggaaggagtgaagccgtgagtctatagcatggaagcatctagaaaacatgaggctgcctcaaggaatccaggtgcacgaggccacatgtgatcccctttttgtgagatgttcaggacggccaaatcggtagcgatagagggtggatccgtggatcccaggaactctggggagggcgacgggactgggaatgggtatggggcttctttttcgggtaatgaaatttctttggagtaagtggtgatggttttataactctgtgaatatactaaa

SEQ ID NO: 368 - DNA, 722 bp, Macaca Fascicularis
  misc_feature (1)...(722): n = A,T,C or G
taggcatagcctcccatttccaactttgttcctgctcctaggaccctgggcccttagtactgctcaacttggggtgccatgggacacacagggtgactgtcctgtgcctgagttggccgtctgtcactttttctgggtgagcactctccttgtggatcnnnnnnnnnnnnnnnnnnngagtggccaggccttgtatccagcagagccttgtgagctcctgaaggcaagccaccaggacacttctctctcctgacctcctaactggtctgacacatggtgatggtcacatggtgcttaacaattccaagaacttgaagaactccaaggctgggtcgtcactggaagaaggaaaacaatnnnnnnnnnnnnnnnnnnnnnnnntgggactgctgaggatccttcttggaggaggtggttctgccccctcgggagcattttggaaatttatgggccattttttcattgtcaaaaggattcgagggaannnnnnnnnnnnnnnntcannnnnnnnnnnnnnnnnnnnnnnnnnnnnnnnnnnnnnnnnnnnnnnnnnnnnnnnnnnnnnnnnnnncttttgaatgactagctttatgtatatgaaaaccctatttatctgagcctagaacgatctttgcacatgtaaacgtgaaatagtgtttgtagcattctgaaaacactcagtttgctaggaattcattcccttgtaaattaaaatgactttg

SEQ ID NO: 369 - DNA, 761 bp, Macaca Fascicularis
  misc_feature (1)...(761): n = A,T,C or G
gaatggggggtanntnnncaagaaaaaataaagaaaaccaaaannnnngagtgctgtcaccagaagagaaaggannnnnnnnnnnnnnnnnnnnnnnnaacaaatgccccccataacctatctaatttcttgtttgtgtttgttgttcatttcaggatagtgttgagtttagaaannnnnnnnnnnnnnnnnnnnnnnnnnnnnnnggacagcagtttgacagagacttgaannnnnnnnnnnnnnntttgaagacaatagtcaagaagctgattcagtcacttgctaatcttccttcagatgcccacgtggtagcctgtgcttccttgagacagatcttacagaatctcccagacatatgagtgttannnnnnnnnnnnnnnnnnnnnnngccagcactgttaagagaaccagatactttccttcctaattgggtcagcagacaatggatgtttttatatccaaaggggaaagacttaatggcatgtgaaacagtctgaccagtggcatctgtagccttcaggattatagcatgttagcgaaacttttttaaagcagtagttcacatttttaagtatattgacctatttgctgactttctgattgaaatacattctactttgtgaaactgatttgattatgtatatatttattcatattgttagtttttattgaatgataccttaatttgtattcatattaatgtaggtctaaagggtttaatgtggttatttatataattaaagttccttggctcttaa

SEQ ID NO: 370 - DNA, 1417 bp, Macaca Fascicularis
cacactgtctctaaagcccgccgttcaaccactcgcctacgctctcagagaggtcggtggaacctgcgggatttctggaaggggagctggaaagagcttcagaagggtgaagactgtcataggagcatggcaaatccagaggcaagaacttgagtcagagaagaatgccctcttcacctgggggccagtgaccaaggaagggctgaagaggccatgcctgtagtgacccgggtattgcccagggaacacaggctctgggatgatgcttgtctccttcctgtcaggaaggaaggaggcagagggtctgagcccagatactgcccaccccataggcaatggagccacctgagctctgagacagccagccccctccccacttgccttgcctgccttgcctttatcttcttccctccctccctctttctttccttctcctgatattctctgagctaccactgtgtctagactgttggaagaactggcaacttggagtacagttcctgcctcagaggagctcacagtctggtcggggagacagccagccagccagtttaggatggaggcacactagggcatcatgggagcccaggagatggtgcagggggtcagaaaagtttcctctgaggatcagcaaaagcctggcagcaagtggcagtgagatgcagcctggagctgcctccgtgcccccagcaggctggctcggctcccctgcaggcttttttggtgcagtgcacgcagacagcaatgactctgtgctacctactggcaccttccactcctaattaagaaataatgaggcaggctgccttccagacagcagagctctaacactctctgcttgggccagccaggagacctgggaagacagagattcctgcctggggacagtccctcccctcccaggcccaacaagggggatttcctggaaccctgatccctctcatcccagaaaggaggggagggcaagtatgaaaaaagaagcctcacctttgcccagcagatgccctccagtcccttcccaccatgacagccctggaggtcaggtgagcgctggcaccgaaatcatggaactggcaagggctggtgatggggttcggatcctggctcctctacacgctcgctgtgggacctcagtccggccccttagctttgtggagcttaggtttctcatctggaaagtatgtccctcgcagaaggatgggatgaggaatataaagtggctagcaaatagaagtcctggtacatggaagacactcaggaatgccacatctttcctctgagactttgctttctgttagcatcccagtggtgtcaactagagttgaagggactcattttcccaaaagagagattctcagggtaatggttttcaagcttttatagctacagcccaaggcaaaaaaaaaaaaaaaaaaaa

SEQ ID NO: 371 - DNA, 2111 bp, Macaca Fascicularis
aagacgcacagatgagagcgctcagcagactggtgggtctgtctttcggtccttcctaatttccccctcctctggggaaaggtcaaggatacctgaaccaaagtgtctggcggggtgtaggtggcgggggggtgcatctgtgcacaatcaagggcttggccctcccgagagcgcccaggggcaggggcctcctaggttctggcggccgacaggggcgaccggcgcaggaggtcgcgcaggattgcggctgaggtcccaccagcgagagacagagaccctcagacatttagtccagagactgcagcaaggaaggggtacgaggggccagggccggaatttcgggggagggagcgcagcgaccagagtcgtttgctggcacctgtaggggcgaatgcaggggctgggccgagatgaccttggaccagagctcccttccggcctgcagagatgagcttggggtttagcttagtgaggagtgagcagcttttcagccgcagtgctgcggcagaggcggatggaggatggaggatgaactggagccgtccttacgacctcggacgcagattcagggcaggatcctgctcctgaccatctgtgctgctggcattggtgggacttttcagtttggctataacctgtctatcatcaatgccccgacctcggaggcctctttggagcactgcttgcaggtcccttggccatcacgctgggaaggaagaagtccctcctggtgaataacatctttgtggtgttggcagcgattctgtttggattcagccgcaaagcaggctcctttgagatgatcatgctgggaagactgcttgtgggagtcagtgcaggcgtgagcatgaatatccagcccatgtacctgggggagagcgcccctaaggagctccgaggagctgtggccatgagctcagccatctttaccgctctggggatcgtgatgggacaggtggtcggactcagcactacggcgactgcggggctcaggggacttggcaagggagctggaggagctggaggaggagcgcgctgcctgccagggctgccgtgcccggcgcccatgggagctgttccagcatcgggccctgaggagacaggtgacaagcctcgtggtgctgggcagtgccatggagctctgcgggaatgacttgatgtacgcctacgcctcctccgtgttccagaaagcaggagtgccagaagcgaaagtccagtatgccaccatcgggactgggagctgcgagctgctcatggcgattgttagtctggcgtggatgagggctggagggtccaggccaggctaacttccacctcacccctgccccgtccatggcagagctcgttcccctggacactctacctggccgtggcctgcatctttgcctccatcctcagctttggcattggccctgccggggtgacggggatcctggccacagagctgtttgaccagatggccaggcccgctgcctgcatggtctgcggggcgctcatgtggatcatgctcttcttggtcagcctgggatttcccttcatcatggaggccttgtcccactttctctatgtccctttccttggtgtctgtgtctgtggggccatctacactggcctgttccttcctgagaccaaaggcaagaccctccaagagatctctgaagaattacacagactcaacttcccgaggcgggcccagggccccacgtggaggagcccggaggttatccagtcgacagaactctaatcccaaaggggtgaccaggggccaaagccagctgctgtcctgtcctctgcttcctgccagggccctggtcctcactccctcctgcattcctttgtttaaggagtgtttattgagcacccgttgtgtgcagacatggctccaggtgcttagcaatcagtggtgagagtggtgttccaggctaaaggtaattaactgacagaaaatcagtaacaacataattacaggctggttgtggcagctcatgactgtaatcccagcactttgggaggccagggtgggaggatcagttgaggccagagtttgaaaccagcctgggtaacatagtgagaccctctatctctacaaaaaaaaaaaaaaaaaggccaca

SEQ ID NO: 372 - DNA, 768 bp, Macaca Fascicularis
  misc_feature (1)...(768): n = A,T,C or G
ccatagcagaataggnnnntgnnttncaagtcatccattttatctctcgcttttacaattctgcctacagttgtcacaaatcacctgcagatgattcctgtgtactatacgttcctggtgctattgtgaacaggcttgttgttttcagtgctttgcgtctggtgtgtaggacggcaacacacaaacagtttgtaaacgtgctaggatgtcttccattcattatcgtgtgtgtgcgacgtgtgcgttttagagaggcattcacatttgcactacttagtccagttatttagtgttttttatatgatatgttttaagcttcattagtattacatacctcattgctcttattagacaaatgatgttagtgttttcctccgttttgttttagaaactgtctctgggaaaggagatgggagacaggaatgagaaacgtctgtgtgctgtatgccctctttaatctttctaaatacctatcttatacatgtgtaagtattcagaaatcagtaaatatttaataatagaaaagtatgtatttctatgctgtatattacaaaaccagctctaatttatatgtaattcttgatatctgaaatttttatcaaacaatcagtggtgggttcaacgatacctatcaatattatgattttatggcttcatagaattaaaaaatatggatctttcataatttatgtaatcaacctcctctgatgaatgtttagcttttttccaactttcagtgcaataatgagattcaaaggagcaaactcc

SEQ ID NO: 373 - DNA, 716 bp, Macaca Fascicularis
  misc_feature (1)...(716): n = A,T,C or G
agctcagtgatccccatcnntgngggataaggtttcactcttggtattttctaactagtaccaaggaaagtcctgannnnnnnnnnnnnnnnctgctcggcagacagggcctccgcccaataagcaaactggagattcctcagcctctcgtggacacccacatctcgttcnnnnnnnnnnnnnnnnnnnnnnnnnnnnnnnnnnnnnnnnnnctttctgctgcagtgcagcccgctccctcctgcccgggccacaaggaaggtgggaaacatcttctgcatttcaaagtcctcactttgacttatttggccttcatcttggcatggaaagtatggcaggcagaatggaaatggtacccccagacagaacacatgttcttgcgtgtgtaagggaagaaaggacaagctctctatcacatgagactaggggccagaacccacctgcctttccccacaacttttcctgctcaaacccactcctcttgacacactggaatctgtattatatatatttttaagaaaatacaatgatggttgtctggttttgttgtttttacaggtgttgtggaataaaaactgtaagaaaattaagtatttaaaatgttccaataaagtggggttttttgttattctaatatattattgtgtacctattgtaaatacgaaacactcctattttgcaagctgaggacacaatttgtactgttgttatatata

SEQ ID NO: 374 - DNA, 698 bp, Macaca Fascicularis
  misc_feature (1)...(698): n = A,T,C or G
aattgcagaatattttgtaaagcnnncntttggaaagcaaacttttgtgcctgcctatatgtaaagtattttataagggacttgaacagagacctcactctttttcacttgtcttatgtcttgagagaaaaggctattggcagccacattcctaagactggggaatggtgtgtccttttaaatttgaagataactttaggtaattacggaaactcctcaaagaggtaaaagtaatttttttccagacatttttctcattctgtgtctttcacacactagtttccatagttcaataattctgttttttaccatcgggctgtgaatgttcacaatatcagtcccgttgaattcctatgaggtaatcacaatgtgtatatagttcattttctaggtttgataaaagaatgtatggctttttattctgtggaagtaaaatgctgaacgtttacaacttttccttgtaaataaaaaattgtaagttttttttttttttttacagaaaagttagcttgtgtaattctgttagtttcagatttctctnnnnnnnnnnnnnnnnnnnagaaagattgacaatgcaaatgtgtcaaagacatactgttgggtgcaatactaacaattttaaaatgcaaatttctttggataaattatttctatattttgtaaatctgagatttaatgtatattttgtaaaaaaatga

SEQ ID NO: 375 - DNA, 706 bp, Macaca Fascicularis
  misc_feature (1)...(706): n = A,T,C or G
gatttattatctcttttcattctgtctgagacctttctggttcctggtannnnnnnnnnnnnnnntatttaaacttatgcagtttgactattatgatgagattgtggatcttttctaaatcttgtgtttaactggttttttatttttttacactgctctggaggcagaagggaggagggagggagtacatcatctttactgacagatggaggtagaagtctagtttcccccatttaaccttctacaatacccaagggggatcttttcattactgctgggcagaggtggaatttctagctgtcctctaggcttccactgaaaagtccctgagtaggaggagtaggatgtttcatgactgctcctcgcatgacctccactgacactttgtggaaaggaaaggaaactcacattgttatcactgagtgatggggaaagaccttactcttggctggacgaagtggctcatgcttgtaatcccaacactttgggaggccgaggctcaagattgcttgagcccaggagtttgagagaccagcctgggcaacatggaaaaaccccatctctacaaaaaatacaaaaattaacctggtgtggtggtgtgcatctgtagtcccagctacttgggaggctgaggtagaaggatgacttgagccctggaggtggaggttgcagtgagccgtgattccaccactgcactccagcagcc

SEQ ID NO: 376 - DNA, 532 bp, Macaca Fascicularis
gtcatagcccaatttctggagtttctgtacttgctagctattcttccttacccctcttcacaccagcctccactcccccgccccctctacgtaaactgccctaagcttaggaagattgtgccgccacatttctgaaggaaaaaaatactcccttcaatagcctaaaaatactgtcaatcaaacttgaaatcagctttgtaaattgtaagacatgtcacagctctagtagttctgaaacaaattttttatcaagattaaaagacgagcaaagataaatactgaatactttggtataactcaattggtgatgacacctcagttgagccttctctatgcagctggagttttgcttttctgctcaaatgccctctaatgttatgccaaggtatcattcaagtataaagacaacagctaaagtgtccttaaaggcaacagaccaatacctgcactgttctgtttcgcttcgtccacacagtttttattcttcttcacccatttaacatttcggccatggtggactgtgagttcttta

SEQ ID NO: 377 - DNA, 748 bp, Macaca Fascicularis
  misc_feature (1)...(748): n = A,T,C or G
agtggcaggaatggggagttattgttaacaggtacagagttgggatgattatgtttggaaatagtggtaatggttgtacaatattgtgaatgtaattcctgccactgaattgtacacttaaaagtggttaaaatggcgaattttatgttacatatattttaccacaacttcagaaggttattgtaatttaccaaaaaccattgaattgtacactttaaatgtgtaaattgtgtattatatgaattttatcaaaacaaagctatttaaaaaaacaaaaaagataatactaaaactgcaagtagaggctgggcacannnnnnnnnnnnnnnnnnnnnnnnnnnnnnnnnnnnnnnnnnnnnnnnnnnnnnnnnnnnnnnnnnnnnnnnnnnnnnnnnnnnnnnnnnnnnnnnnnnnnnnnnnnnnnnnnnnnnnnnnnnnnnnnnnnnnnnnnnnnnnnnnnnnnnnnnnnnnnnnnnnnnnnnnnnnnnnnnnnnnnnnnnnnnnnnnnnnnnnnnnnnnnnnnnnnnnnnnnnnnnnnnnnnnnnnnnnnnnnnnnnnnnnnnnnnnnnnnnnnnnnatatctcaaaaaaaaaagcaagtacaagcaaacaataagaagatggcagagctgacacttgtactaccaggagcccttcgccagccacgttacaaaattaaaacagcgactcacatgctcaatttcactgatctcgctttaaatactactataagatttctctagtagaaa

SEQ ID NO: 378 - DNA, 746 bp, Macaca Fascicularis
  misc_feature (1)...(746): n = A,T,C or G
cacacagcttcctatgcactgccatcttctcatcagttaggcaatactttgtagaacgattagcttcacctcttagctgccagaggatcccttcttaaagatgaactctgtgaagattcgggagtcctgaaacatggggnnnnnnnnnnnnnnnnnnnnnnnnnnnatgatgaacactggccttctggaggggaaatggcaggctgggctggtgtgggaggaagggctttggcattcatggaatgggcctgctgctctcagaccttcaaaggacggaaccaacaaaggaccaaataagaaagcagatactgtgccttgtagagggccatgaatgtcagttattattttttctccttatataaattattttgtggttattattacaatgtgcatggctgttgcataaaagacatgactnnnnnnnnnnnnnnnnnnnnnnnnnnnnnnnnnnnnnnnnnnnnnnnnnnnccccatgagcgtttctctcccttgtaatattaaccctgtgtttctgggatcacatcacggaattttctttgcttttccactttccaggaaatcttttggactgggctgccttcttcatgtgtgatgaaagatgatctgtatttcagaacaaagtgctgggttgtcataatttnnnnnnctcccagggcgtctcttatgcaacttgataacgatgctgttcattagcagcctttgttaactgataaccaagagtggtaacgtgatactcataagcaatt

SEQ ID NO: 379 - DNA, 1022 bp, Macaca Fascicularis
  misc_feature (1)...(1022): n = A,T,C or G
taagaaacatagtgtggtagccaaattaaaaaaaaaatttgaatnnnnctgtaggtcagttttagaattgctgtgaaaagtgaaggttgcnnnnnnnnnnnnnnnattatagttgttttcataactgatggcatggtgagtccatttgagtcaaactgaagaatttccttatcaagtgactatacatttgtttttgtgtgctcaaaagaaattctcaaacacagattgatattaaccagccaggtaaattgaatgacaatgtggcattaagtatttggctgttgtatttgtcattaaatactatggtcttgcaatatgattgatggtaaaagagtgatgtcatattgatatagagtagcttgtttttttagtagacgtgggaccatctcttttagaagtacagctcagtccaggacagctgtggatgcagtgtctggagttagaccctctgagcacgctggctgccacagtagcatctgcatcggtgaccaaggacactgcactttgaagaggtcgccacagggtcgtttagtgtcttcactgcttttgttaaaaattgtaaaattttgtaaacagaaaagttgtgtttttgaatatcaattttttagacacacctacaatgataaataagtgcctttaaaggcccctctttccttgaaatacatctgtggtttagcaaggaaagtacaaaacagtttatgtagttggtgtaatttttgtgtcttcatgtagaaaaatgaatgtcataataaaatataaaacttatgtaaagaaaataaagtcattgtccaccttaatagctaaggttcacaaggtaacttattcagcatttattttttttgaaagtcaaaattgaatttatttcttnnnnnnnnnnnnnnnnnnnnnnnnnnnnnnttcagaatgggctgaagtaagttgattgagggatttgagttgaatgacattttcaagttcatttaaatatgataaaaattcgttggtaaataacatctgtctttcctggaaaaaaaaaaagttgt

SEQ ID NO: 380 - DNA, 705 bp, Macaca Fascicularis
  misc_feature (1)...(705): n = A,T,C or G
tttttcgagcctgctgccgnnctggcgaatgacccttnnnnnnnnnnnnnnnnctacttcatttagctgagcaggctttctttcatgcactttactcatagcacatttcttnnnnnnnnnnnnnnnnnnnnnnngtgacttatnnnnnnnnnnnnnnnnnnnnnnnnngaaatcttaatttannnnnnnnnnnnnnngttgtttctcttgcaaattatacttttgttttagaaacggattaggtcttttcaaaagggtgagaacagtcttatcagttttcttttaaatgaaatgctttaaagaatnnnnnnnnnnnnnnnnnnnnnnnnnnnnnnnnnnnattatttnnnnnnnnnnnnnnnnnaaaggtgattnnnnnnnnnnnnnnnnnnnnnnnnnnnnnnnnnnnnnnnnnnnnnnnnnnnnnnnnnnnnnnnnnnnnnnnnnnnnnnnnnnnnnnnnnnntggaaactaatctgttttctgtaatatttcctttatttcaacaattctcagaannnnnnnnnaaacaaacccacatttaagatttttaggattatagaaaaaattggcttctgnnnnnnnnnnnngtgnnnnnnnnnnnnnnnnnnnnnnnnnnnnntccannnnnnnnnnnttgttctcaccactgtccctatatagtcaaattgggannnnnntttaaactaccacaatcattgaaga

SEQ ID NO: 381 - DNA, 627 bp, Macaca Fascicularis
  misc_feature (1)...(627): n = A,T,C or G
ttaaatttcagctttggnnctggctgctttttagaataatgcaagataaaaatcacacctgagggctaaaaacggagagggaatgggagacttgatatttaagcagctttgaatggtttttcttttctttatttttaaagaaatgcacttgcctatgatactgtctctccagtgaaacgattactcctccattactctattgatacaatattgtgcatgctagtgttgtatttctatacagtagcttgaaattgattaacttatactgtaggtgttatgtattcctatgacaaaaaaattaagtcttcaaattttttaaaggtttttttttttctttttttttaaattaatcaccaaccccgccccccaatccgttttcctcacatggcaatgacaataggcgcatgtaagaggcacaaaagcagcaaagcatgnnntaccacattttgtggtagnnnncagttaagatnngaaataaactccagcgtgaggaggatgccannnaaggaaagtcatcatgggtaaactgtacaaagttacagagcacagagaatcgaagatcatcnngganntaccatcttcactgtcacnnnnatcnnnnnacacatactcaganngtaaaagtaa

SEQ ID NO: 382 - DNA, 729 bp, Macaca Fascicularis
  misc_feature (1)...(729): n = A,T,C or G
aaaggagnnnatggtcctcantnnanntnnnaagaaggtcgctagattgtttctatcctgaggtattgcatcatttttaatactcctgttctagagtcttctcttcttagaagagtacaaacactccatggaacattagagttctgaggcactaccctacctagcttgtcctctatcatgactcatttttatctatggcaggtaggctgaagcattttgnnnnnnnnnnnnnnncccagagtaacagcttttccttttcacatttactttccttactgccttactcagtgggtaagttaaagggttgaaggagagttgaatggtccacaagactaccctctaggaggtttcacaaataccaaacagtactgtgagagcagcacatccactggggctaggcttgagacctaaaggcaagtaagaaatgcatatgctatttcacttcttctcccaacccttaataataaggcaaaggaagagcctagtgaaggccaatgctaggtttacaaacttacccagaagcctccgcaaagcttcacaggctcctcagatgaaaataacaataatcaatggggactacggccaaacactggtttgccattctgtaacaacgctgcaaggaagtccatgtcagaaagccaacagaaggtgatttccacaactttgaataggttgttataagtnnnnnnnnnnnnnnnncctttcagaaataacagtcaaatcaacaga

SEQ ID NO: 383 - DNA, 746 bp, Macaca Fascicularis
  misc_feature (1)...(746): n = A,T,C or G
tggtgaacgtgggagatgtgacncccagttaagggactgggagggaggtgaagaattttgcaggtgggagagttggatttgaatgtggacttgtgaatgacttgaccttgccacctgtggtcaaggtcacggtttgctgtgggcttcctgggagaccttactcactcggagtcttctttctcttgctccaggaagagccctgtcggtgctttaccaccacttggagtctcccgaggacacaaacaggcagagagggacgtgtagggagttctttcctgttttctgtgctttcctcgccggcttccaggactcccggtaggccactcacggccatgccaggaactgtctcagaaacagtcataaacaatctcttgagtctctctcctgtcctcccagctgagctttcttattccaccctttctggtgtctataggaatgcatgagagaccctggacgtttttccgctcnnnnnnnnnnnnnnnnnnnnncatgggcctcggccttggcggttcctcactcgcactatttatttcctcctcccgtgccagcccttnnnnnnnnnnnnnnnnnnnnnnnnaaatgtgactctcctagaggagaagccgctggctgtacccttgtgaaacttgacggcgcttttgtaaggtgccacccccagactttaaggtagctaaaccaatttttaaaagattcaatggcttgttcatcctccagatgtagctgttgatgtacacttcgcaacggag

SEQ ID NO: 384 - DNA, 2453 bp, Macaca Fascicularis
tatccagaagccataaagacactgaaaatggtcatcaaattgccagctctgaagaaggaagaaggcaggaagttcctcgggccctctctgcagaccagccagcgggcatccatcttattggaactggtggaggccctccggctgaatggggagctacatgaggccaccaaggtcatgcaggacaccatcaatgagtttggcggcacaccagaagagaaccgcatcaccattgccaacgtggacttggtcctgagcaagggtaatgtggacgtggcactgaacgtgctaaggaacatctcgcccaagcagtcctgctacatggaagccagagagaagatggccaacgtctacctgcagaccctcagagacaggcgcctctacatcagatgttaccgtgagctctgtgaacatctgcctggcccccacaccagcctgctactgggcgatgctttaatgagcattctggagcccgagaaggccctggaggtctatgatgaggcctatagacagaacccacacgatgcctccctggccagcagaattgggcaagcttatgtgaaggcccaccagtatactgaggcaattgagtattatgaggctgcccagaagattaatggacaggactttctgtgctgcgatctggccgaactgctcctaaagttaaggaagatcaataaagcagaaaaagttttgaagcaggcactggaacatgacattgtccaagacatcccatccatgatgaatgatgttaagtgcttgcttttgctggcaaaggtttacgagagccataaaaaagaagctgtgatagaaactttgaacaaggccttggacctccagtctcggatactgaagcgagttccactggagcaaccagaaatgatcccctcccagaagcaactggcagcctctatctgcatccagtttgcagagcactacctggcagagaaagagtatgacaaggcggtacggtcttataaggatgtcttctcctacttgcccactgacaataaggtgatgctggagctggcgcagctctacctgctccaggggcacctggacctgtgtgagcagcactgtgccatcctcctgcagactgagcagaaccatgagactgcttctgtgttgatggctgacctgatgtttagaaaacagaaacatgaagcggccatcaatctttaccaccaagtcttggagaaagtgccagacaattttttggtattgaataaattaatcgatctgctaagaagaagtggtaaacttgaagacattcctgccttttttgaattggccaagaaggtgtccagccgggtgcctttggaaccagggttcaactactgcagaggtatctactgctggcacatagggcagcccaacgaagccttaaagttcctgaacaaggcacgcaaggacagcacttggggccagagcgccatctaccacatggtgcagatctgtctgaatccagacaatgaggttgtgggcggagaggcttttgagaaccagggggccgagagcaactacacagagaagaaggagttggaacagcagggcgtgagcaccgccgagaaactgctgcgtgagttttacccgaattcagcctccagccagacccagctgcggctgctgcagggcctctgcaggctggccaccaaggagaaggctaacatggaggctgcactgggcagcttcatccagatagcgcaggctgagaaggacagtgtccctgccttgctggccttggcacaagcctatgtgttcctgaagcagatccccaaggcacgtatgcagttgaagcgcctggccaaggccccctgggtgctgggtgaggctgaggacttggagaagagctggctcctgctggccgacatttactgccagggcagcaagtttgacctcgccttagaactgctgcggcgctgtgtgcagtacaacaagtcctgctacaaggcctatgagtacatgggcttcatcatggagaaggagcagtcctacaaggatgcagtcaccaactacaaactggcctggaagtacagtcatcacgccaaccctgccattggcttcagacttgctttcaactacctgaaggacaagaaatttgtggaggccatcgaaatctgcctcgatgtcctcagggagcaccccaactaccccaagatcagggaggaaattttggaaaaggcccgaaggtccctgaggccctagctggggtcaaggggcctgcggtagaagccatcaacctactgaagttgtgtggaaggatggaaagtgggtcaggtggagaagggattcagaaaatgacaccttcttccccattactagagtgtatgtggtttattttgaatcatgtttcatctgacctaagggtcatcccaaagctttatgtttttaaggcacaagaaatgttgctctgggaagaaagacatcaactggcttaaaaaaaaaaaaaaaaaaaa

SEQ ID NO: 385 - DNA, 682 bp, Macaca Fascicularis
attcaccatagccttacagcttttctcagaaggtaacttgttataagagaaatggcatttgcatgttccagagtcagaacctgtacagtatatacagcataaacaccttgaatttgattttagttcaccacattcaaggatccaggatgccaaaaatatgtgtgaacatttgaaacatttttatttgctgctttttccctttgatctagttgaaagaatgtattgtaaattggcatacaatactgcctttaatagaaaacctaaatgctggggcacatttcacatatcgactacctgagaaattgctttgtgtcccactgttattaaagcaaaaagtataatgttcttcacttgaactaatcaaatacaatagattataaattgtgtattgtaaataaaagttcactctgtgagtgcacattttggtaaattatttatttatgttagcatttaaaagttttaaaaaaatgcatttgaccaggataaatgaggtatgttgatcatggctttgctttatatcttgatattaaagctggtttatcatcctggtattttaaaagctgctttgggtttttttgttttttggttttttttttttctttttttcttccttaatgtaaactaacctcctgcatgacagaggttaaaattttgtctgcacttgagttcactcgagtttaca

SEQ ID NO: 386 - DNA, 3272 bp, Macaca Fascicularis
aaggtccgggcgggcgcctggagccgccggagtttccgcacccgggagggcgatgcggccggggctcaggctccttgcagattcctaaccagcataatgctggagccgggggccaccagcctgcagttttcagaatggccgtgttggacactgatttggatcacatttttccatcttctgttcttcctccattctgggctaagttagtggtgggattggttgccattgtgtgttttgcacgcagctatgatggagactttgtctttgatgactcagaagctattgttaacaataaggacctccaagcagaaacgccccttggggacctgtggcaccatgatttctggggcagtagactgagcagtacaccagtaagggccggaggctgcacctcgcccccagggcatccctgctggccgcgctgctgtttgctgtccatcctgtgcacaccgaatgtgttgctggcgttgtcggccgtgcagacctcctgtgtgccctgttcttcttgttgtctttccttggctactgtaaagcatttagagaaagtaacaaggagggaacgtattcttccactttctgggtgctgctgagtatcttcctaggagcagtggccatgctgtgcaaagagcaagggatcaccgtgctgggtttgaatgcagtatttgacatcttggtgataggcaaattcaatgttctggaaattgtccagaaggtactgcataaggacaagtcattagagagtctcagcatgctcaggaacgggggcctcctcttcagaatgaccctgctcacctccggaggggctgggatgctctatgtgcgctggaggatcatgggcacgggcccgccggccttcaccgaggtggacaacccggcgtcctttgctgacagcatgctggtgagggccataaactacaattactactattcattgaatgcctggctgctgctgtgtccctggtggctgtgttttgattggtcaatgggctgcatccccctcattaagtccgtcagtgactggagggtaattgcacttgcagcactctggttctgcctaattggcctaatatgccaagccctgtgctctgaagacggccacaagagaaggatccttactctgggcctgggatttctcgttatcccatttctccccgcgagtaacctgttcttccgagtgggcttcgtggtcgcggagcgagtcctctacctccccagtgttgggtactgtgtgctgctgacttttggatttggagccctgagcaaacataccaagaaaaagaaactgattgctgctgtcgtgctggggatcttacttatcaacatgctgagatgcgtggtgcgcagcggccagtggcggagtgaggaacagcttttcagaagcgctctgtctgtgtgtcccctcaatgccaaggttcactacaacattggcaaaaacctggctgataaaggcaaccagacagctgccatcagatactaccgggaagccgtaagattaaatcctaagtatgttcatgccatgaataatcttggaaatatcttaaaagaaaggaatgagctacaggaagctgaggagttgctgtctttggctgttcgaatacagccagactttgctgctgcgtggatgaatctaggcatagtgcagaacagcctgaaacggtttgaagccgcagaacaaagttaccggatggcaattaaacacagaaggaaatacccagattgttactacaacctcgggcgtctgtatgcagatctcaatcgccacgtggatgccttgaacgcgtggagaaatgccaccgtgctgaaaccagagcacagcctagcctggaacaacatgattatactcctcgacaatacaggtaatttagcccaagctgaagcagttggaagagaggccctggaattaatacctaatgatcactctctcatgttctcgttggcaaacgtgctggggaaatcccagaaatacaaggaatctgaagctttattcctcaaggcaattaaagcaaatccaaatgctgcaagttaccatggtaatttggctgtgctttatcatcgctggggacatctagacttggctaagaaacactatgaaatctccttgcagcttgaccccacggcatcaggaactaaggagaactatggtctgctaagaagaaagctagaactaatgcaaaagaaggacgtctgatcctttttccttcatgttttcagtttgagtgtgtgtgtgcatgaggcatatcattaatagtatgtggttacatttaaccatttaaaagtcttagacatgttattttattgattttttctatgaaaacaaagacatgcaaaaagattatagcaccagcaatatactcttgaatgcttgatacgatttttcattgaaattgtattttttcagacaactcaaatgtaattctaaaattccaaaattgtcttttttaattaaacagaaaaagagaaaaaattatcttgagcaacttttagtagaattgaactttcatttgggatctgagccttgtcgtgtatggactagcactattaaacttcaattatgaccaagaaaggatagactgacccctacaatttgtataaatattgaacgtgtctatatattagcatttttatttaatgacaaagcaaattaggattcttgctttttatctctttttttaaaacaatatactgtgaactttgtaaggaaatatttatttgtatttttatgttttgaatagggcaaatggaatgaggaatggaaattgtaacatgtagtatatctagatctatatgcttttccccataggaagaaattgacttctgcagtagtttttggatgctctgacttgtgcaatttcaatacataggaggttatgtaatgtaatattttacataaacaattactatcagttgaaagttcaggccatgctttaggcaaaagcaggcagcctcacatctttatttttgttacatccaaggtgaagagggcaacacatctgtgtaagttgctttttagtgtttttaactgaaaagccgttttccattttgcttaatgaaactgcagacattatccagaaaatgcaaaattttctctcaaatggagccacattcggggaatttgtggtatttttaagaatggagttgttcctgctgttatttgatccaaacaatgttttgttttgttcttctctgtatgctgttgacctaatgatttatgcaatctctgtaatttcttatgcagtaaaattattacacaaactaaaaaaaaaaaaaaaaaa

SEQ ID NO: 387 - DNA, 684 bp, Macaca Fascicularis
  misc_feature (1)...(684): n = A,T,C or G
tttnnnntttaacaaatcccnnnnnnnaacggagctataaggtggccaaatctgagaacaataaaattcattttagttataataaatttaatatttgtaaatgtaacatagtttcagtgtgatttctagagctaattcaaaatagtattattttatgtgattgcatttttggnnnnnnnnnnnnnnnnnnnnnnnnnnnnnnnnnnnnnnaaatatcagtctttaatgggagaattttcaatttgccaattttttccttgaatgggtttgggtttaagtatgctacaatacacagttcaggcaaaatataaagatttaattatcttcaatacttaagtgtgcttgctttctagtgccttggttttctttcttgatgctggaaaaataaaccggtgttgagtgnnnnnnnnnnnnnnnnnnnnnnnnnnnnnnaaattttaaatttaagtctgcctccnnnnnnnnnnnnnnnaataacaaaaaannnnnnnnnnnnnnnnnnntttgttacgttagacaactgtcagcatttcattcctacaagttggttttcagtgatctcttccatccccccagtaaggctggaagaagttcctggatgcctggaagaggctcttagcaaacttcttagtgcaagcaatggttagattaatttgtggggcagctctttaagacattcagagg

SEQ ID NO: 388 - DNA, 735 bp, Macaca Fascicularis
  misc_feature (1)...(735): n = A,T,C or G
ttgaattaatttattattaccttttcactagtaattattaccttttaactagtaataatcttactagttatcccttttaattagatgttaatgagagtacataatgtttataccattaagnnnnnnnnnnnnnnnnnnnnnnnnnnnnnnnnnnntgcttatggaaaaatagacttatatcatggtctgaagaaaaacacatattaatataggcacaaatnnnnnnnnnnnnnnnncaggaggaaaagtaggctgtgaatatgaataatccccaaagaagaaactgccatggtagggagagtgccaagctgggatgtgccagcagttgatggcaaagatggcagggtgnnnnnnnnnnnnnnnnnnnnnnnnnnnttgannnnnnnnnnnnnnnnnnnnnnnnnnnnnnnnnnnaaatagaaacaggatttgctttcttctgttggagttgagtagaacaaggatagatgggccagatgatcagtttcccttccctcctgcacacttactcacctgcattgtgcttgtgnnnnnnnnnnnctgggctactgagatgactcagtcatggggagggggtgccacgtagacatttaataaagttctgcgcagtaaggaacatgcaataataacacctctacaaaannnnnnnnnnnnnnnnnnataattgtccttaaaatgtgtctctatgtatttgatttcttaatgcatattcaaattgtaaatcatcaaagagcg

SEQ ID NO: 389 - DNA, 701 bp, Macaca Fascicularis
  misc_feature (1)...(701): n = A,T,C or G
gactgggagnnnnncaacctagcatcacaaataagaaacaacagatacgaaactattcatcgattgtgacctaccctgactttgatgcaaaatctttgaacaaatgacctannnnnnnnnnnnnnnncaacgcctgcttcactcaacccgcatgtggggactatagccatagccttggaacccattccatttaatgannnnnnnnnnnnnnnnnnnnnnnnnnngaatgaatataaaannnnnnnnnnnnnnnnnnnnnnnnnnnggatcaaccaacattctcttccattccatgactgtcaggatagactcaaagaagaacaggcaggaaacatcatttgtgtgggacaccctctaaggatcctatctgaaaacaaggaagtttcggcagccccagccatctgcaatgggaggttgcatggaatcttgtcctgggcagaaggaagcgtcaccctaggaagtgaaggattcttcatagatgttcatcactatgcaagatggatcttgaaaattatggatacccactgaggcgcctctgttcccatatcccctcagtaccacctcttcataatttctacactggatctacaactctcttcatctttgttattttggaacaaaatccaaagaggaaacatctgatttaaaaaaaaaaatgagtggctaagaacccatgccatgactcctgatgcctttgtcat

SEQ ID NO: 390 - DNA, 237 bp, Macaca Fascicularis
  misc_feature (1)...(237): n = A,T,C or G
cccgttatgtactccatggaactattntcgagagaaccaaaaacaaaaatggaaaaataatcaccaccccccatcctgacacacacgcagtccaaagcaaaagtcagtgtgtattgaatttaacaagtaatgcagtttgggatgctcttgctatattttggtggcattttagctagttatatgaatatttattaatcgtacttcttcttgtaaagttaactacttacttttttgttg

SEQ ID NO: 391 - DNA, 719 bp, Macaca Fascicularis
  misc_feature (1)...(719): n = A,T,C or G
cagtaattggttgccttgatttatcttttannnnnnnnnntgccagctctaaaactcccagttgcttgattttagtccttaatcttttatgttctgagcaggaagggtaaaagacaggaacgtgctttactgtattaactagtccatgggctgagaccggggcatctcttttcttcatactgcaatgttgctggatacatgatcagacaccagagggttgggcgttcttgcaataccttaacagtgctgaaatctgcagcatggtactaaggaagttaaagtttgaatgtaaccactttatttaaagggtttttttctttaatttaaatgaaatgaggttgaagtgaacatgattttgttgaccatgttcgtgaattatagatgcaacatgcattggtagaatcgtgtgatggtcttttgtgatccttaatttttacatatccacaagtctctgtatgtatctgcatagacaaagaaaaaacaaatctcctgctttgcttttactgaagggtttccaggactgagtgtctgctcctgagctctgttttaagtatgtgtatccttagcttgtattttgtattaaaaaaaataagaaaaagaaccctttattgttgagtcacgttggcatagtcccctttatttttttctctttttgggacatatgaagcaagttattctttttctgtatcttttttcttttgtaaactttttttttgttt

SEQ ID NO: 392 - DNA, 712 bp, Macaca Fascicularis
gctgtgtgtcacaacaggcttgggcacttcacgacgtcactggttgtttttctgacgctcccaaaacaacgtaacttggttttcatgtgtttttccatggtgtgtgtgagatggatgctacgggtcttacggactcacacccctgttcccaacgtctgcactatggatcaggcagtgattttgataggatgtgaaacggactctcctcaggtgggtccagcagggccctgccccccagaacgcagtccgtgccgcactgtgctgtgctagggagtttgccctcagctctccttggtgtagggttcccacaacgtaagagttctagttccctgaggtctttaaaaacaaaaacagaatgttgtatgtgaagattctcagaggggaggggaccagcaaatctgagagagaaccgtcctggagcctcccttcgaggagccctctgacgtgaggacttgagtgatgctgtggtgtgaggcgttctcagctcactgactggaaggtccaggcaaatttcatcatacagtgatctcaggctctcacaggatcctgagggaaatgtgttagagggtctggaaaattcagtgcttttgagttactcatttttattaaaaatttcctcacaaaagagagcactcaagttgtggctgttctggggaaaggggtcaccttgtctgacaaagtgtaactttaaaaagcacgttgatttttttac

SEQ ID NO: 393 - DNA, 733 bp, Macaca Fascicularis
  misc_feature (1)...(733): n = A,T,C or G
acattttatatttacatcaactgtatcannnnntacatacttgataaagatgttatgcctcagtaattctgaagccgaaggcttaaaatctcagcccagtgactctagcgaatcacgtgttagttaaagggaaagcggggcctcacgtgctgcgtaagtttcattctcaggcatcctttctcagggacctacttttactggagatcattctgctaaataaggtaacatctagcctcaatggcagccatgttatttaaccccccacattttcagaaatatgtttaaaattatgttaagctaaataaagaaaaaggataaaaacttaagaattctgtctataatgattgctctatattgcaaataataacctaggtatgcataaataaatgaagtaaattatcgttccaagaaatctgtattgagaactgagaaatgattttgcacaataaccctagtattgcaaatattgtaaatatttttacaaatatagcgatataaaagaaagggaagagctacagttgccccgcctagggctaaaagtgttatctgtcctccagattatgtaatccacggcgtaggcttcaggtgttaagaaatggcaactcttgatattttagtgtcaggtaaaagcagatagatagaaatgcaagaactagagtatcagtgtaaaacacacgatcatataaatacataggcataaaaataaatgtatatgtttatccataaatcccaa

SEQ ID NO: 394 - DNA, 1345 bp, Macaca Fascicularis
  misc_feature (1)...(1345): n = A,T,C or G
gcaaaaacagtaaannctgntgtaaatggcaccacatcttgttaacctccccgccaaataactctctgaaagtcatgcacatacctgtgggatttcacactccaccagcttaaaatgctatgtctctgtccatcagaaatagtcattattctatttttaaggcagcaacaagaaaagaaaaaacacttttcctgagggatttctaactgtatctaatcctcccatttgggcagtagaggtgtttgcttttttgttttctttttttaagaaaaatcttgaagcctttgacactgacagatgtgtctgcaaggatatggctgcagtattactaatttccatgtgtatctagaagtatttttaaatggcataccaaaatccagaagtttaaagacgcctataaaagtaaacatttatttaaggtactctgaatatgccttcttttttaattagaaatatcttcaaaacttgggtgtttgttaataactaataactggagtaagctacaggatctaaagcagccctttttacaatctagttaggagaaaataattgcaaatacccacttagaggcaaagaacaatttttattaccaaaaagctttctgcacattgttgtggcaacattgtatctgtttagaaaatgggcttttccaaaagcaaatgaaggtaggttcctcaggtgaccaaaactgaaaatcagtatttccatgtttcactaatcaaggcataaaataaaattaaagcaaaatattttacattaaaatcttggttatgtattttttttaaaagggaaatcgttaaaagggtggaaattaccagtgatttctatttttattaaaccattcactacaacaaacaagtataaaaattccaattccacttttatacctatttgttgtggtgaatggttcaataaattggagatttatgtccagaagtcactctattctgtcgtgtattagaggaccacattttgacatttttcatatcaatcatattcccgtatcttgaaatttctgccttatattcaaaaagttcagtttgaattctttgccaggtgtgaggatttccgcaccttatagtcggcacaaaacacgctgcaactttaatcaagtcagcannnnnnnnnnnnnnnnnntagataagtccctgtgtagcaagttttcagaataagaaataaaatctaattcttagggtattatctgacttgaactctgttggtttaccatgttagtaaactgtgctttctattacctatacataaaacctgagcagcaactgtgtgctgaagcaactgtgtgtgaagtcttcacnnnngnnntnnaagccaangaanngtctatttg

SEQ ID NO: 395 - DNA, 547 bp, Macaca Fascicularis
aaaaccgactcggcgcttgtgggtagccgaggagaccgtgggggatacaggcaccgggttgcaatgaaaaaaaagtgcgcaagggccgcccggagaccagcttgggcctcgcactgtgccctaggcggcacagggcgttccatcctattccctccccgcctcccacacagaggggcgcccaggaggcagttacagtcgtcgcggaatcctgcgtgtgacaccccgcccctgcccagcggattagggggtgtcctctggtaaaaggatttttgggcttcttccagcctggggccctcatccctgctttggcaggcctttctacaccaatctgcatctagggggggtccgcgtgagtagcagcgccctgagatctgaggccaagaaccttctccacttgagaagccttcctgctggaggctgactgggccaggcctggagccacgtaccaaccctttttacccagggaatggatcccaggggcccagataacgcccccaacttcttggggttcacactcatcttgagacatctgggaactgcctccgcc

SEQ ID NO: 396 - DNA, 1736 bp, Macaca Fascicularis
aattatctattttgtatcatctggcatgaactgctctataaacttcaaattaaaatatgatcacatttcttcacttttataatgtttacttaagcaattcctgcttcatttataggaaacccattttcctcctctctggtttttctcactaaattatactagaaccctgggggcaacacagtctaagaaggtgggtaggctctatccagcttcacccaagtgaagagactgaaatctcattagtcaactactgccattgtttcctgctgccataggggtgatgcgaaagattcatgattcaccagattccagagtcccctgcttcagtgatgcttcacttgagccaactgggttcgttgagattcatctcactatctcagttccaagcagtgcaccatgagactgaggtatcaaaactgtatcaagactggtgtttaattcctgtcattcccttatacagctaccttctaggatattagttgactaattacaactggtctggcacttgtcaactggtggttccagaactgccatcgctcttcctccccaggtagcatttccttttaaattttcaaatcataagggttctaattgccctttcccaggatattggaactaatacaccacccttccaatggagattactgcagtcatttccaagggccctacattcaccaatctgagggagattcccagttatgcttggacatgaggctaccttaattattgttgagtaaagtaaaaactataatgtgagaaacaagagaaacaagtagcctaagaatcactaccagggtgtatatcattcctgtaagtaatgttaattagccagatcccttgttaaaacaccaatatataattaggtgtcattgtcccatttaataattggaaatgccaaccccagagcaggagttgtatactatccagactcttcttttcaaataccctcattgcattttggtcatgtgctgattatcagaattttttaaaaagaaaacttaatattaaggaaatctaatgagttctctcttttatactatatacacctgacttttaaaagacaaggaaacaaatctgtaaattcccagagttgataaataaaatacaggttttgaactggtttcatataatgagaagaaattcccaggaagggtctagcaatgtattttcactagaaatataaatcaatccacatgtataatttaaaatcttctagtagctacattaagaaaaggaagcatgaaaataattttaataatttattttgacccaatatatttgaaatattatttttacatataatcaacataaacagtattaattagatcttttatattctatttgcaccaagtgttcacaatgtcgtcagtattttatatttatagcacatctaaattcaggcaggccatatttcaagtgatcaagatccatgtggataatgagtgatattggacagtgcaaatataaactgtaggatcttgtggaacaggaatgacatctcatgatagtattatattattttaatcgttggaaaccattttaatcattggaaaacgcgtcccacaaagcaccctgagaaaaaaaaatagttttatggttaagtaaatttgagaaatgttgcacattatcttctgaaaagagatttataatagatgacccgtatatcaaaatcactgggaagtcttgcaataaagaagtctaaaaaaaaaaaaaaaaaaaaaaaaaaaaaggccaca

SEQ ID NO: 397 - DNA, 729 bp, Macaca Fascicularis
  misc_feature (1)...(729): n = A,T,C or G
gataaaattgattggaagatcacgacctcgcaaaaacttttcaagagcaacaannnnnnnnnnnnnnnnnnnnnnnnnnnnnnacagatcctccgcagattatctnnnnnnnnnnnnnnagctcaggaggccgcgccaaacagtgacctgtggcctgggccatctcttggtcatgtgtttcacttttccttgttgccctnnnnnnnnnnnnnnntggttctgtagggtagtgagtcggggttgnnnnnnnnnnnnnnnnnnnnnnnnncgcccgagtgggagtgacccacccccgtgtccnnnnnnnnnnnnnnnnnnnttctactgcagccctttgtagactcacctcgcaagaaggaagatctgcctggagacctgatcccagtccagctttttggtcgtaggtcatctttgtcccattgctcttttgcatcatgtcataaaatttgaggatatcagctgattattttttcttccaagaatgaaaatcaagcagaattgattcctacaaggaaaaaaaagcacacgaatgccaaacctttcctttggtggactggacactaaccagatgagagtaaatttcttatccgtggacgtatgtaagctactgctgctgtgtgctctccacagccatatttattgtattaaacaatcagcacgaaaccttcaaaacttgcccagtgctcctagttaaatgttcagaggggagaaatagatatatttaaataa

SEQ ID NO: 398 - DNA, 734 bp, Macaca Fascicularis
agcatttgtaaagttacagcaaaagatgtacctgttaatacacagaatgtgtacagattatttatgttatgacaataaaacactcaaaataaatggtctttagcatctcaaattccaactgaaatcattttagtgttaacttttcttcccaaagcaatgtctcatttcttggctgtgcaggtgatgccatgttatatccaataactagaaaaatcactgtgctgaactttgatttatgtttagcttccaagtatttttctaatgttttgcatttcaagtggtatcactgttaaatgccatttgttttcagattgtggccttttattattggctgctagatcctggtgtatctatgttcttttttaagcaccaaaaagaagatagggaagaaaagaaggaaaattttctgatgtaagtatgttgttcaaattatgagtattatttttaaaaaaggaaaaaggaacgtgacccaggagtctaagttaaatctaatattgttaatactgaacttgcaggtgcaggttggtatacattccaccctctagaagtattttcttacagtagataagctgctcacattttattttgaatgggcatctcctgaggaaatgtagcatgacattggtactaactgcatgtgtaaatacatcatactggcaaaccataaaatataaattatgtatcatcattcatgtagtatctataatttgtaacagtgggggaaaaaggtgaca

SEQ ID NO: 399 - DNA, 766 bp, Macaca Fascicularis
  misc_feature (1)...(766): n = A,T,C or G
gctggacagaggtgcagcttcaagatttgtaaaaaatgnnnnctgggaaccaaacccaagaaatgcatcaaannnnnnnnnnnnnnnnnnaagtaaaagttaactttttggttttgatgtacacatattcaaaaagtacatctttttttttccccctccacaaaataattctgtggcaggacaaggtttaaatgtatttcttattgaattaatatgtaaatttacagtaaatatgtaaagctaaatactttcctttccaaagattgttatctttattgatttgcactgaggattttaacattgtgatatattatatatttataatttaccatctcttttgatgagactcttatttctttatataggtcaatcttgcaagtaccattttataagcagctgtgaaatttaagtgaaatgttctttgtaaacatttgtactattttaaatgaataatgaccttannnnnnnnnnnntnnnnnnnnnnnnnnnnnnnnnnnnnnnnnnnnnnnnnnnnnnnnnnaagaaagcatgaaatgacttaaatgttcatttttttctgtagttattttatcatgttttcatgattttaggannnnnnnnnnnnnnnntattcaaagtgtgaaactaaaactttatggttgtactttaattcttggcatgttgcctctatgtcccatttaaaataaaatacattctcattaactttagatgggaaataaggttgtatgttgatggatgagttttggcatgatgaccnnnnnntctc

SEQ ID NO: 400 - DNA, 614 bp, Macaca Fascicularis
accccccccccgacttcccctcccccttgggacgcgctctaaataattgcaataaaacaaacctttctctgcaaaccatttcctccccgccccctcccctcagcagcagccgtcccgagtgggagtccctgggacttcccagtggccgagctggggcccccagcctgtttgtggggacctcaggtaaggccagggaggcctgatgtggccgtaggagctgcccctccccaacccgccctggtgtggggggtccctaggccaggccctgctccccacccagctaccctgtgcgcctgtgccctgatgggggtctgaagtgcagggcctaggttctccgaggggcccgaggatggaggccccatgtccccgaggagggtggcctctggacaggcccctcattccgcatggcagctcccaggcctggggaacataggtgtgtgagagcagcacccaggaaggactcctggcctctggctcagccctgcctggcaggctcccccgtggacaccctgttgactttgctcttccctcctgggccccgcacccctgagccgaccactgattgaccggcaccgctgttgcctcgttaagccatagcgcatgcgcgctctcag

SEQ ID NO: 401 - DNA, 703 bp, Macaca Fascicularis
  misc_feature (1)...(703): n = A,T,C or G
gatagctgcacaacacnnngggttcttgagcagagactgggaggactttactgtggttctgccttcacgccccctagacagctaatgtagtactcgacctgctcatacttctccctcccatattcattcattcattcatccatcctacatatatttactgaatgccaactacgttcccagcctcttccaggcactggcaatgcagtggtgaacagggtgacaagattcatgccatcaggggcaccttgtcacggccgtctgtgcactgattcacaccccctgaaaaatggtcactctgccatcttggtggttggtggggcaggttatttggaaagaaaggatgtgatagggatggctgaagggggaagcctaggctgcctcaatggaggagtcaccggggcatcttcacccccaattctggccatacttaagcaatgggagggagagggaggaggggaaggtatgggcaattttggccttgaatctttcatgaccccagagnncaagattagaagccagccctgccgttttcagcctcctgaagtatcagcaaggtgaggccagacatcctgaggaagggcaacagggagacatacaggatgtagaatgcttgcagactggtcaatgggggatgagggtggggaggttgccagatgtgagacctgagtagcatttgtacacatggccctgtattgtcctgaag

SEQ ID NO: 402 - DNA, 323 bp, Macaca Fascicularis
tgtgggactgagtggcaagatttgttaactctttccctttgtgacttcaagaaccctgacttctgtttctgcaaaggcatctgaatgtgtctgtgttcctgtaggcataatgtgaggaggtggggagaccagcccaaccccatgtccaccatgaccctcttccccacgctgacctgcattccttccccaatcacctttcctgttccagaaatggggctgggatgtctccatctctgtctcaactttatggtgcactgagctataacttcttacttccctattaaaattacaatctgagtataaatttactttttcaaatgatt

SEQ ID NO: 403 - DNA, 738 bp, Macaca Fascicularis
  misc_feature (1)...(738): n = A,T,C or G
ggcacctccagttcacaagaggcacctaccagacaccagnnnnnnctgcctgctttccggagtttgagtgcgaagaggccgaggtgagggaggcagctgagctgtgccctgatgcatctcccagaggcactctgggtggacgctgggcccctcggccttgccaggctggggcctcccttcacagagccaatgcctgtgggccccacagccagactagcacctttccgnnnnnnnnnnnnnngannnnnnnnnnnnnnnnnnnnnnnnnnnnnnnnnnnnnnnnnnnnnngcctcctggtgtnnnnnnnnnnnnnnnctcaccaatctcatgagaagtctttgctgtagggacttatttattgtaaatgaatcaggnnnnnnnnnnnnnnnnnnnnnnnnnnnnnnnnnnnnnnnnnnnnnnnnnnnnnnnnnnnnnnnnnnnnnnnnnnnnnnnnnnnnnnnnnnnnnnnnnnnnnnnnnnnnntggtttcgtnnnnnnnnnnnnnnnnnnnnnnnnnnnnnnnnnnnnnnnnnnnnnnnnnnnnnnnnnnnnnnnnnnnnnnnnnnnnnnnnnnnnnnnnnnnnnnnnnnnnnnnnnnnnnnnnnnnnnnnnnnnnnnnnnnnnnnnntatgccctgcttgtgggttttttaacctgacagttttgtcaaacctcatactagaaggtggggtttctgtttgctaaaaacannnatgatatttcgtcattaaactagt

SEQ ID NO: 404 - DNA, 1626 bp, Macaca Fascicularis
agcagtaacagcaggacggtagccgggtgaggcctcgggctcctcagggcgcgctctgcaccgcgggctccggcttgcacatgtaacctcgtaggctcggacggccagacaccggggtgtgtacccggcagagcgcacggtgagcgctcagaaatatgcatccttcaccgtgccgctgaccagctcccttctggtatcagccccctcgcccgccagtgacacagggacccccaggcgcaggttccacagcagggcctcgttccccgcctctggcgggagcccccgcgccacctggccgagggaacctcctttgcttggtgggtgtgggtgcttgaaccctccccccttttgcacaggaattaggcagacgtcttctcccaggtaacaagcctcggacttcagttccacctaaacccgggcgccgtggccagcctagctttgtccgaccctggcttcagcagcagaggaagcaaatgagttcacgaagacgcagttggaagagaaatactcagcacctggcagaacccccactttgtgatggaaaataatgtgaagtttcctaaaaatatagaagtggagcttccatatgacccagcaattcacctcggggggcacatccaagagaattgaaagcagcgactccgagatatttgtgcaacgtgtgcacagctgtgtgattcacagcagccaacagcagaaaccaccaagtgtctaggaattggcctgctcatggcagctccacggccacatgtgctcccctgagtaatgaagtcccctgagtaggagtctgtgttcaccatcagtgcctgaggacaagggccaagttgtctgcgcccctgactgtgtccgcacctggagcctgcggggtctgaggccctgggccagggagtcctcgccgggcctgtgtgaccgtgaccagcatcctcaggcctccagcacagcccaggactaggagccccgccactcccccacctctgggggagctgatccccacaccctgccaaggcttctgaagcacaggggctttcagaatctgcccatttaaacccgttccgcaaaacacccctcccttgtccatttagtaaggccaaactgcactaaaggaaaactggacccttgtacccacctcctgcttcagttttagaattttctgcaggaacagtagagccccggagtgatatccacgagccactcaacccggacgcctatgcttctctcctgcggcttgctggcaacctcctactcacgtttaagcttatcttttcgaaatactatcaatatctttcttccaagccatggcacaatccgtgcccaataaattaaaccattcatttactaagttccctctattgtaacttttaagttttagtaaatttttaatttgaagtaaagttttaattttatactagattagttgtttacatacctgtttatctcagaaaggaatttcatttaatttatattttatccctagtgtttggtatccccaatgttttagtaatcgcaatgttactaaaagaatgatgatgtggttaatctggacataaaaaattaaaatttgtattcaatgtaaaaaaaaaaaaaaaaaaaaaaaaaaaaaaaaaaaaaaaaaaaaaaaaaaaaaaa

SEQ ID NO: 405 - DNA, 2362 bp, Macaca Fascicularis
atggtcttgatcaagttttcaccctgtgagagtcacacgcgggaggaatgggatggagcgctcagccgttcacagagcccagccctgcctccctctgcttggtgtgcttactcttggcaagatgcagcttcctgttcagagaaaaaggacttaaaaaggatcgtaaaatgggctcccaaggctccttgaatagcaaatagcttttaaaagacaacactttaatggcctatgagtatccaagtcaaaaacaaaagtattgaatatccctttaaatgtgtatgagtttaaaaagcaagatgggaatagatttggcaaagtttcttctggattttatagaattcaaaatgctcaaaaaatttttacctatacgcccacacacaactgcaaaacttttataaacgacgtggggagataacaaaaatgatactgtgcaaatccaaacagtatgcagcttctgcactgctgtgcctgatggaaatatttctctcttttatgagcgtctctctgtgcgtggagaaggaggaaagatgggcgtatgaggcagggaggggagaaaggaggaagagaagcctattccgggcttcatggccgttctcagtactcactcgtgtgccctctaaatggaaccatttgctgtacattttgaattgctaacatttggtagactaggggacaatggatttttgcgtaaactatgaattttatgacaatgaattagcatgttcattgaacagaaagtaaacaaagcttagtacaaaatcggttcagtagataacctaactcttctgctgcttaatgaagtgttggtgatgaaaccaaaacaaatagctttatgctttgtaaagcacagggaaacgtactttcgtgtttaattactgtgtggttatgacaaggctggtacctgcctgaaccataagtgacaaagtttgcagcagccgctcctgcttcagcagactgggtgttgaactaaccagttacagcactggcattagaacagagagggaaaatggacatgcaaatatagtcagttctgacgaacctccaacatctgtgaagcacctactgcgtgtgtgccaggcactggggatatggcacaatgagatgggggcatttgcattgtccagaactctagggagggtagggaggatgaggcgtgactgtcttagttgttttgtgatgatgaatttcgtgtcaccttgactggaccaggtgtcttcctttttctgctgcgatattggaagaaaatgtccatgatcctcatggttcgagggaagtgcaacaatctaaccaggatgtgtctcagtgactggcctctatttccttttctggataaaggtacatacccaggaacatcgaaacatatgtccctgcaaaaacatgtacaggaatgatcacagcagcaacactcacaatagtcaaaaagtggagacaatccaaatgtccatgcactgacaaaacgataaacaacgtgtggcatacccatatccacatgacggagtgtcatcagctgtaaggaggaatgacgttctggtaggctgtgtgaaagaagccagacgcaaaggccacatgggtcactccacgcatatgaagtttccgcgacaggcagagctatggacacagtacatggattcctggttgcctagggctgggggcgggggcgactaggggcaagtggggagtgactgctatggggagagggcatttctcagaggtgagaaaggtctctgaatattgcttgtgatggtggttgcacaactttgagaatatactaaaattcattgaattatatgcacgaaatgggtgaactttctccatgaattgtatacactaaatgggtgaactttctccatgaattgtatacactaaatgggtgaactttctcattaaattatatgcactaaacggctgaactttctcattgaattatatacactaaatgggtgaactttctcaatgaactgtatacactaaatgggtgaactttctcactgaattgtatacactaaacgggtgaactttctcattgaattatatgcactaaatgggtgaactttctcaatgaactgtatacactaaatgggtgaactttctcactgaattgtatacactaaacaggtgaactttgtcattgaattatatacagtaaatgggtgaactttctcattgaattatatacactaaacgggtgaactttctcactgaattgtatacactaaatgggtgaactttctcactgaattgtatacactaaatgggtgaactttctcactgaattgtatacactaaatgggtgaactttatggcacatggattgtatctcaataaagctattgaaaactttaaaaaaaaaaaaaaaaaaaaa

SEQ ID NO: 406 - DNA, 1954 bp, Macaca Fascicularis
gctcaacacacagggcccggagctcccctcagtctccttgactccaccaagaagtgtcagggaccaagggccgtcatggagccaccattgtcctcaggaccagccccttcctcatggctgaagatgcgcgttctgggaacgaggccgcccccgtaccgctgggctgtctgggatggatgggatggaggccgcccccgtaccgctgggctgtccgggatggatgggatggaggccgcccccgtaccgctgggctgtccgggatggatgggatggaggccgcccccgtaccgctgggctgtccgggatggacgggatggaggccgcccccgtaccgccgggctgtctgggatggaggccgcccccgtaccgctgcgctgtgtgggatggaggccgcccccgtaccgctgggctgcgcgggcgcagggttcagggatgactccatctcgacagaacagccttggcaggcgcgactcagagcatccccgatggcaaacccagccctgggaataaaattacgcagaaaaactcacaagtaaaatcccctaaactcatcaagactggtgcgatcactcaagccagacacagtgtcccaggccacagagcaacactcggccgctgtatggcaggtgggggaaggtgggggcgtcggctgaggaatgtgcagacagatcatttgttcatccgtcagacatttatccatctgccataaacaaggctcctgactcaggagggcggcaaagatgaatggaggcaggttctttccctcagggtagaggagctcccccaacacagctgggctggcagataggacaccagagacgtcagcgcctcggctgcccacagcggggccaactcccctgcagtccgctcctggccgtggtacgccggaacgaggacgcccctggcagccctccgcctcctccatgagctcaggagtgaagactgttgtattggagtaacagacatgaagatcctgagcccacacctgtgcatggggtcttactcggcagcaggttctagcagatgtgatagagttagaatggtgtcatatcagattagggtgagtgccactcccttacagggagaaggaaatctggactcagggcagacacacagagcagcaggccccatacagacagtgacagagaccggagccatgcggccacagcagctgcaacaggcaggaggaccctccactgcagcctcccgagggagcacggcccagcagacaccgtgaccgcaggtgtcgggacccagaaccacgagaacaggtttctgtggtttgaagccaccgggtgtgtggcattttgttccagcggctcccggagactcacacagcctggacactgtgcctgacccgagtgagtcctggggacattgactggaacccgggggctgctgagcctgcatcccagggctgggctgagggtgggaccaggcagcaccgctccaacatctccgcactgccggggccccgcgtgtgggctgcgcggaagcagcagagggccctcctcacaccgtcaggcctttgggcatcaccgcacctgagctcccggctggggactcggccctgctgagcatcccaggccatctctcttctaacccaccacactgcccagtccaccgtaatgcctgctccactgtgctgccggctccaccacaccacccggtccaccacgtcacccagcctaccacgtcgcctggtctgccgcgccacctggtccaccacgtgacccggtccatcacgctgcccggtccaccacgtcgcctggtccgccgcgccacccggtccactacgacgcccgctccactgcgccaccagctccaccactcactccacccgtctcctgctccacctgctctggctggggccttccctgtcccctccatgtccctgtgttaagctgggctccgattaaaactgtgcttgactctgcataaaaaaaaaaaaaaa

SEQ ID NO: 407 - DNA, 2311 bp, Macaca Fascicularis
acagagggacaggctatagcacaggctgtagacacacccaaggctccaggccagtagaccatacatatccgtggacaacaagaacagaaaaataaaaccctaggagggctaaaggaggtggagagagggacaccagctgtgttgttaccaggatggcacaagaagagattggaaggcaagtaggaaggaatgaccctcagactttgctcttgggtgatggggtggtttgtacctatgcgtatttcattctgccttgtaccttgtgatttgctgagctgtggttgagatgaactggttctttctcccttgttaaaaggtccatattcaataatagtcctaggaagatggaaaggtgctctaggcctagagaggtagacaggtgttaggaagacaaagggacttgtccttccagaaagactatgcaaggcacccagttagagttggatagatttccatatctttgaaatccaccccaagaagggagatgggatcagcaatgatccctggtagagggggaggcccctaggaggagaatccccagcaactgtggtgatacagactagccctcacataactagaccttgggcccccaatctgaaagaatttcaagtagctttggccttcctaatgactgggcagatcttcagatctggaagatttgactgtgggtgatgtggaagggaggctgggtggctctgggagataggacctgcccagaggtaggagtaaagtccatgctgggctgagctgctcagggctggggaagttctgatttcagcatctctggaagtgtatggccacttcagaagaagcaaggtgttttccacagcagagaagaaagcagggagacactcagccaaagtggtagcatggcccagggcttgatagaggtggagcgaaagttccttccagggcctggcacagaggagcggctgcaggagttggggggcaccctggagcaccgggtcaccttccgagacacctactatgacacccctgagctgagccttatgcaggctgaccactggctgcgacgacgagaggatagtggatgggagctcaaatgtcctggagcagcaggtgtcttaggacaccacacggagtataaggaactcacagcggaacctacaattgtggcccagctctgtaaggtgctgggggctgacggcctgggggctggagatgtggctgctgtcctggacccattggggctgcaggaagtagctagttttgtgactaagcggagtgcctggaaactggtactcttgggaactgatgaagaggagccacagctcaaggtggacttgggtacagccgactttggctatgctgtgggtgaggtagaggccctggtgcatgaggaggctgaagtaccagctgccctagagaagatccacaggctcagcagcatgcttggtgtgcctgcacaggagacagcaccagccaagctgatcgtgtacctacagcgtttccggcctcaaaactatcagcgcctgctagaagtgaacagctccaagcagaggccacaggcgactgaagatcctgataactgcctgggctaggggtgtcacttcctagaatgggaagggaactctgggtctaatggaatccactcctggcccactgtgcctctcccctcagcgtcccttctgacagtgactcctctctctctagttccgcctgtttctcccccctactctaagctactcttccttgagccctccctggctgctgcttcttccctcatccgtcagatgcaacctgtgggccgcccctctcccctggccgctaagcagcctccattgatttccgctcgtgtttataggatttccacttagccgtgatcagtagttaagcacaggaaaatcccttgccacccccctcccttggtcgatgccattgattctgccagcagctcctaaaccgccttacagctgagttagacgatgaggggaggcagcagggatttccctgccttggggtgtgggaaatagaagcaagttgaggaaatggttgggaatcccagttagaactctagaaattctaatctgattttgccactgtgcccagctctggcccagagggtagagtgccgcctgtagaagtttggggcaaatttgttccctgacctgaagcgggttagaaagaaccagcagccgccccatccccgcccctgtgttgagacaggttctcaaggttcaggggaagatgcatacctcttatgtaagaatgcttttcccttgctgttattcatacacattttccacttcaaatatacccaaatatggctttcaaaaaaaaaaaaaaaaaa

SEQ ID NO: 408 - DNA, 734 bp, Macaca Fascicularis
  misc_feature (1)...(734): n = A,T,C or G
catagtaaatagnnnnnnnnnnnnnnnnnnngtgcatangnntncttgattacatctgaagtctcctctctttgaagagcaaagacattgtttcggtttctgagagcagttagaggaaacttaggtacaatgcatgcatcacagactgcatttgactgagtggagtcttcaaatattttttaatggataaatgagcctgcataaagtcaagctgcaatgtaacatagatatctttttctaaaaacttcaagtgtttgattaaaatagagaaaataatttttaaaataatagataaaaattttaaaaacagccagaaaaaatataatttatactggttagggtttaagctnnnnnnnnnnnnnnnnnnnnnnnaaagacagaatcatctatatattcattcattacatgctactatagtttgttggagtctgttaatgccttctagtannnnnnnnnnnnnnnnnnnnnnnattataaacctctattttcaggggtttcaatgtgcccttaaaattgtgctggggctgcagcaagtaaataatattaggactcagattcagtctttggaactagcttttttccatttaatttaaattataaaattgcatagggataaatgtacagttttgctaaggtttagcacctttgatcttttctaaatcaggaaaaaaatctatgcatattgaggttcatagatgaaatattctttggcatactttgtagacttgaccact

SEQ ID NO: 409 - DNA, 752 bp, Macaca Fascicularis
  misc_feature (1)...(752): n = A,T,C or G
agcccnnnnnnnnnnnnnatatccattgtggacatctggttgcagcaaatgtggctacatgcnnnnnnnnnnnnnnnnnnnnnnnnnctgggctagccagttttgagataagagtcagcctccccatttttgtttgttatgaaaacagcagctcctgcacctcgggtgctccctgacacctgtgcaaagaaaaagaggaagacctagaagaaaaggcagagacaggcaaggcagcatctcacagcttnnnnnnnnnnnnnnnttaccgacttttttttttcttaccaaaagagcactgaannnnnnnnnnnnnnnnnnnnnnnnnnnnnnnnnnnnnnnnnntcatccagcctcatcactcagcttcttcctagtacaaaactgccattggttgcgcgtcctgagctgggggacgtcagctttaaccctagcctgtgtcagggcctcccccttcagccccccgccccttagggtgatcgtgggttccttcccttccnnnnnnnnnnnnncttcccttctctgaattcccttcaaagccaaagtttcttgagcactttttcttgtgtgcagtcttgtgtgtttggctgttggtgttttaaaacttgctttctattccccctcgcctctctccatgtggttgcgcagctgagcactggttgggatgcattcaaataacgttagcaaggtcctgctttcctcagcccccgctctgttttatttattgtttaatatttccaatgatccaaatcaaa

SEQ ID NO: 410 - DNA, 2874 bp, Macaca Fascicularis
gcgtgcggcggctgttgcgagagagatgagccgcggcgatgagcccagaaaagcagccccaggaagaggatgaagttgattccgttctcctttcagcgtccaagatcctaaattcctcggagggggtgaaggaaagtggctgcagtggcacagaatatggctgcatagcagaatcagaaaaccaaatccaaccacaatcagcattgaaagtccttcagcatcaattggaatcatttcaggctttgcgaatgcagactttgcagaatgttagcatggtacagtcggaaatcagtgaaatattgaacaaaagtattattgaagtagaaaacccacaatttggctcagaaaaaaatctggcgtttggtgcacgcattgaaaaggatttgcctacagagaatcaagaaggaaacctttctatggagaaaagtcgtcattttaaggattccaagacacttcattcagtggaagaaaaattaagtggtgatagtgtgaacagtctctctcaaaatataaatgttccatcccagatgcatttcgaggacactttaactctgagaacttcaacagacaatttatcttcaaacataattatacacccttcagaaaattctgacatcttgaagaattataataacttttatcattttctacctactgcacctcaaaatgtgatgtctcaagctgatacggtaattctggataaatccaaaattactgtgccttttctcaagcatggattttgtgaaaatttggatgacatttgccattctatcgaacaaatgaaagaagagcttcaaaagtcacacgatagggaagtggcacttgcaaatgaacttcagactttaaaaactgatccaaatgttcaaagtaatgataaatatgacctgtcccctattcaccaggaaaaaatgaactttattaaggaagaaaacatggacggtaacttaaatgaagatataaaatcaaagagaatttcagaattagaggcattagtaaacaaattactccccttcagggaaacagtgtcaaaattccacgtgaatttttgtagaaaatgtaaaaaattatccaagagtgaaatacacaggggaaagagaaatgagaaaaacaataaagaaattcccatcactggcaaaaatattacagatttaaaattccattccagagttccaagatacacactgtcattccttgaccaaacaaaacatgaaatgaaagacaaagaaagacaaccatttctagtaaaacaaggatcaataatatttgaaaatgagaaaacttccaaagttaattccgttactgaacagtgtgttgcaaaaattcagtacttacagaattacctgaaagaatctgtgcagatacagaaaaaagtaacagaactggagaatgaaaatctgaaccttaagtccaaaatgaagcctcttatctttaccacacaatctctcatacagaaagttgaaacatatgaaaagcaacttaagaatctggttgaagaaaagagtactattcagtctaagttaagtaaaacagaagaagacagcaaagagtgtcttaaagaattaaaaaaaataattggtaaatataatgttctccaaggccaaaataaaactctagaggaaaaaaacatacaactttctttagagaagcaacaaatgatggaagcattcgatcaactaaaaagtaaggaacacaaaactcaaagtgatatggccattgtcaataatgaaaataatctaatgagtatagaaatggaagcaatgaaaaccaatattctactgatacaagatgaaaaagaaatgttagagaaaaaaacacaccagcttctaaaagaaaaaagctcacttgaaaatgaactaaaagaaaaccagctagaggtaatgcagctaaaagagaaagaaagattggcaaaaaccgaacaagagacacttcttcaaataatagaaacagttaaagatgaaaaactcaatcttgaaacaacattacaagaatctgctgctgccagacaaattatggaaagagaaattgagaatattcaaacctaccaatctactgcagaagagaattttctgcaagaaataaaaaacgcaaaatcagaagcaagtatttataagaatagcttgtcggaaattggcgaggaatgcgaaatgttatcaaaaatggtcatggaaaccaaaacagataatcagattctaaaagaagaactaaagaaacatagtcaagaaaatgtaaaatttgaaaacagcatcagtagacttactgaagacaaaatacttttagaaaattatgtaagaagcatagaaaatgaaagggataccttggaatttgagatgcggaatcttcaacgagaatatttaaatttaagtgataaaatttgtagtcagcataatgacccttcaaaatcaacttatatttcaagaagagagaaattccattttgacaactatattcatgaagatatctctagtcctcggagtaggcctttggcttcggatttgaaaggttatctcaaagttaaagacagaactctcaagcatcattaggattcctcacgactgctaagaaactcccttggagaaatagccaatgttaatgtgtactgctaactgaacgatgagtatctaactagtctcaaatgactcataatgaggcactatagatttgctttaaaaattatgcatagaatggtttgatgcagataacttaagctttttcagctgggaatttcagaagatgggggagaacttctacaagggagggcaggtacctgtacgttgaaggagctgagatgtctaaagtcacccaaatttgtcatttaaaaaagtatatataaataaaagatactattttgaagaagtataaaaaaaaaaaaaaaaa

SEQ ID NO: 411 - DNA, 1222 bp, Macaca Fascicularis
gaattctgagggcagagcgggccacttctcaggcctctgatttcatactgtggtgttagttacttctgagaggacgacttgctgccagagctctattttttatgttagaggctcctgctgcctgcagactgctgtctgggaagggcacaacattgggagggagagggaggtgtgagtccctccgtggtcctgctgctttgtacttctctgtctcatttccttttcagcgccactctgggaaatcagtattttagccccattttatcctcagaaaattgaggttctgagatgttatctttgtggcctgggtcatattaagtgccaaaggcatcatttaagcctaagatgtcctggcttcaaggtctcagcatgtggaagacaggccccctcatcctgccatccctgctgcggcttcactgtgggcccaggggacatctcagcccgagaagggtcagccgccccctcctggaccactgacgccccgacagaactcctctgtgccctctcctcaccagaccttgttcctcccagttgctcccacagccagggggcagtgagggctgctcttcccccaaccccactgaggaacccaggaaggtgaacgagagaatcaatcctggtggaggctggggagggcccgagccatgagaccagctcctcccccaggggatgttatcagtgggtccagagggcaaaatagggaacctggtggagggagggacaaaggccttggctctgagtgacttgccttccccaccgacccctgccctgcactcaggaggaggcagtggtggggcacacaggggtgggggccgggtggggggctgctgggtgagcagtgctcacctgcccggattgaaaccacagatggatgtgctgggaggagctgtgagggctcagccctgtctccaggcctgccggagccactgctgcctggtcttccgtgcctttactccaggcaccccccagcccaacccacccgcttgttcttaaatctgaagaagttcctcacccctctactccaggctgtgttcagggcttggggctggcggaggcaggggcctaaaattccagtgtgaagggccgagatgggcccgaggcccctggcctatgtccaagccgttccccctctcaccagtctctccctggggagccagtcagctaggaaggaatgggggtaccccaggcccacccctagttcctgagctcatctgggctgcag

SEQ ID NO: 412 - DNA, 739 bp, Macaca Fascicularis
  misc_feature (1)...(739): n = A,T,C or G
aggaaatgagtgagaacatttgtgcaggtgagatttcattgtactgaagcccattgttaatgaaagaacaaaaagatatannnnnnnnnnnnnnnnnnnnnnnnnnnnnnnnnnnnnnnnnnnnnnnnnnnnnnnnnnnnnnnnnnnnnnnnnnnnnnnnnnnnnnnnnnnntaattgtaagaaccataaacatgcttattatgattaacatgtaaattaattcaatatgtaaatcattagacattgccttctccctttttcatctgtaattatgatgtgccgcccttgaatttaaatcattgacctagggcttttcctctgaagaacgtataagttattggtaacttaagctactgtgcataagcaatttttttggtagactactaagattattgataaactgatctttaaaaaagtatagatctatatattgtgagatatgcatcctagaacactaatgtgtattttctgctgcttcactgcaaatagcatttaggatttttcaaagattttaatatactctgctctgtgttctttagcaccccgaatgctttgtccgcatctttctgcaggactcctctagtcactctctagggttaagtcaacctttttctattcagtcctccaataggagtaagtcctttgcctccctcctgccctccctcatccttgcctttgaccacctcactgtcattgttttatgatgtattctccagtcatgaaatgaataaaaccata

SEQ ID NO: 413 - DNA, 730 bp, Macaca Fascicularis
  misc_feature (1)...(730): n = A,T,C or G
tccccaaatcataagaccaaagaccaccaaacgnnnnnnnnnntctgctcattattctttgacccagaaagacnnnnnnnnnnnnnnnnnnnnnnnnnnnnnnnnnntgaaaagaaatcctttaaattacctatggaannnnnnnncttagataatcttaatgactgttttggcatttataaatagaaattattatggactttgatctaccatactgagattcggataggnnnnnnnnnnnnnnntgtgataagtaggttttgattgagtgaaagcatgagcttgttcagagtgaggggcacactgaaaaagaaacagccatgcctcaaaatcaaatcatnnnnnnnnnnnnnnnntcctgaacaccgactacctcttcacttgctaaagcagctaaactgtgaagctctaagtgggttgggtttgttgtttaaccttagtgagatcctttgttttaactgcagcaatattcaggccagatatttggaagcaaatgatatttcctcttgccgtgtccacaaatctgaatatgaggggcatgaaattannnnnnncatctagttcataattacaattttggaattccctgttttagttgctggggcctgagttttctgacttttaannnnnnnnnnnnnnnnnnnnnnnnnttttgaagcatcctaagtactgtagagtagaaaactgatttctttgttaattgtacactgaggaatgccttttaaaaatc

SEQ ID NO: 414 - DNA, 605 bp, Macaca Fascicularis
ggctccgcggcggaggggcggcgccccgacccgggcccagcaccgtgggcaccgcccggctggcgcgtatggaggcggcaggacgcctgcggcgcggatgctgtgtgctgcggacccacctggggttcatggagtgggccacggggcccagccctgagcactgctgtacccaggctcgccgtgcctgctgctgaggagtccccgcgctgctggctctcaccattgccctcgcctgccgatggcctctgctgcccagcctggggccagctctaccgcctgagccccctgccccccttcaggactcaccgtaccccgatggggtaacgtgacagaggccccgcacgtcagaggccgctgtccccacggccgctgcccgtgacccctggcccaaggctgctggagttggttcagttcaagttcattcttcctttggcccttgggggcttggggcccacctctgagtgaagggggctgtctgcccagccaccgatgtggagagggcgcccccagcgtggggtccagctctggacactgcttggcggccggattctctttgggcttttaagttttctttgctgagctttttttggttgttctttttattt

SEQ ID NO: 415 - DNA, 1583 bp, Macaca Fascicularis
aacaagcaaaaaaaaaacaacaacaacaacaacaaaaaacaattgtttttgtacttttgaaggttttaactccttatgcctttgcagtttttctcaatttatcaacaattttagagctgaggtttgcaattttattacacagttactgaagggggcacatgctgactaccacatacgatttaccagaaaaccttaactatgacaactgaaatgcttaaaaacataaattccaggaaaacatgaaaaaagttttaaacattgcagaataaaactgtacttaccccatccacaggatttacagtttctcctctcctttctaacagtgtgggtatgtgaaggctttgttcttgtcaatgttagtggatgaaaatatttaagtgaatttagaagacaaatgtggaaagacactttttaaacttgttaactacaaaatcatgtggtcttacagtgaaaacatcgtgggtaatcattttgtccaactttcatatgaaggacaggaatgctgtctacttcctttcgggttttcattcaggttttctttatactcatgtactgacagttttattcaactcttcaaggcagattttggaaagttatttttaaagaaaacaaaaaaagcacctagtgatctacgtgtttgcccactttgccccacagcaaaaacacattcgttccttccactgagatctttgcagataattatcatgcttctctttggaatttttctatgctaaatgtgctcagattgttcagatgttccatatatggggtgtgtgtgtgggtgtgtgtgtttacaatgtacaaatatacaatttctaggtaacctggtatgccccttttggcttttgaatttaatggaccactaaaatcaaatcaaatgaaagatttgtcgagttgcattaaagacatcactaccattcaactaatctcatctttactgaataagtacaaatataaattttacttaaaagtaggaagaaaatgttctcagaataaaagagttcctctctgacaacttatttgtatcacacctagcaaacctaagcagaatatagtccttatttttctcttttattccccatggattagaaaacatctctttattttcagctgcccaacatttggaagcattcttctgtgtgacctctgttttttcagttcctctttttagcatgtgggataagaattgagctcagcaccctccagtgcagtctctgctgtttgtgtgtgttatcactctcttcccatctgcagctttttgcacctaaaagctacactttatacagatccttgttcaacttcatcttttcagttttggcccagtattgcattccattgagaactttaaaaataatgacgtatacctgcaaagtttactatcaatgtctttagcctgtcaaaaaaaaaatgaggaaaattgcataaaatcccatgcagaaagtattctgttaatctaaaatatttcatttctttttgccttgacatgaataaaaaccaaatgagttttatgtactttaagaaagttctcccaggttgaggttttgcaaacattgctttgtattttgtcatcatccttgaagatt

SEQ ID NO: 416 - DNA, 691 bp, Macaca Fascicularis
  misc_feature (1)...(691): n = A,T,C or G
gctgcagctgctggccctggaaccacactttgagaacgactgctttagaccaaaccctaaaggaagatgcagccaccctcctnnnnnnnnnnnnnnnnncagggttnnnnnnnnnnnnnnnnnnnnnnnntgagcgccacctgcagcagccgagattcccgactcgctccaccactgggggctgggagtgaagcatgtcaccatggtcagctcatggccagccaggaaagcgtttctgctgtgcatctgtgcagtgcttgctcttccctggaggactcttggatggcctgtaatcttggccaggagaccaggtgcctgggtcccttcctggaaggggacaagttacacaccccagccccattttcccaccaacttctacatgccttgagagaacctgctacattctggctgctcccttcccctatttcagcagtgcccagccctgcttataaacctgaggcttgctccccatgccctgccctgtgcaagtgccagccattattccagacagcccaatgttggtgaagccggatggactcctggaaccagctggctcatggatgtggnnnnnnncagtattctagaaacagatgtcttaacctagtgtgtatagagaaattgttctcgttgtaaacatacccctgttcttacctgaactcggtggaagcccaagcttcgtatgctacggggc

SEQ ID NO: 417 - DNA, 787 bp, Macaca Fascicularis
  misc_feature (1)...(787): n = A,T,C or G
agnnnnnnnnnnnnnncgttccagctgccaggggaacgcaggncnnncgctggtagatagtcctgtttcccaaatgaaatcaggattttagatttttatgttttatttctaaatgttggcaactcattttacaaaagcactannnnnnnnnnnnnnnnnnnnnnnncaggtggtaatgctaccaatacagatatctgtcccatcagactctctgcagtgatggaagtgtactctatctggtctgtcctgtaggtcgtggctgttgagcacttgatgtgtagcttagtgtaagtaaggcactgaaattttaatttaaatctaaacttannnnnnnnnaccnnnnnnnnnnnnnnnctttggacagtgcaggtctccagcagtctcagccttttgaaactcattgaaagccatgatcctcttccagaaannnnnnnnnnnnnnnnnnnnnnnnnnnnnnnnnnnnnnnnnncggaggattcatggatcttttgaagccccacctatgagccccaggttaagaatccctagaaggctgggcgcggtgnnnnnnnnnnnnnnnnnnnnnnnnnnnnnnnnnnnnnnnnnnnnnnnnnnnnnnnnnnnnnnnnnnnnnnnnnnnnnnnnnnnnnnnnnnnnnnnnnnnnnnnnnnnnnnnnnnnnnnnnnnnnnnnnnnnnnnnnnnnnnnnnnnnnnnnnnnnnnnnnnnnnnnnnnnnnnnnnnnnnnnnnnnnnnnnnnnnnnnnnnnnnnnnnnnnnnnnnnnnnnnnntatgccgtgcactccaacc

SEQ ID NO: 418 - DNA, 360 bp, Macaca Fascicularis
atgtctccctcagtggccttagccgtgctggcgctactctctctttctggcctggaggctatccagcgtactccaaagattcaggtttactcacgccatccaccagagaatggaaagccaaatttcctgaattgctatgtgtctggatttcatccatctgatattgaagttgacttactgaagaatggagagaaaatgggaaaagtggagcattcagacttgtctttcagcaaagactggtctttctatctcttgtactacactgaattcacccccaatgaaaaagatgagtatgcctgccgtgtgaaccatgtgactttgtcagggcccaggacagttaagtgggatcgagacatgtaa

SEQ ID NO: 419 - DNA, 1496 bp, Macaca Fascicularis
tattgggatttatttctagggaacaatacaagaactacacacctctctctcagctcatgcagttccctgctcttccattgcaacgttgaaacgctttattgtaccctcctatagagaagagtcctaatgaacaagaattgcatttctggttcacaaaatcatggcaccttgcacagtacctagatttaaattgttaggtaatgactggtatggaatggctaactgaaggaatgagaaatgtacagtaatttgaggtgattttgaaattggacctgtcagcaactgcgtgacctataaacaagtttttcatcttcacagtcttatttgatataatgccaaggttggattaagtactctacaaagcctcttccaattcttttatacaataaaataacttcccttgttcatttcattcctattttaatcttaactttgctgatttgggttaagttactaaagtctctacaaccaggatattagtaatataatccttatctcttgggatccttgcaagagctaattaataaataatgtagagaaacttagacaaaagacaaaaagaaatgagaaattacttattatattttcataattgcattttaaatgagaatagttgagaatctatgtttcatttatgaacagaattttaactattagtgcttgtaaaaagaaaaattaggtccaattttacattctcattttctgaagaattaatttttcttttttattattttttcaacttttacaatcaaacccttttactcagtggcggatctgttatcttacatctgtgggcccagcatccttattttgtgacaacggaagcactatgtttaacccttccaatctctcaaaggctaacatagtgcctggcaaggagtaggtgtatcaaaattgcctgctgcttgaggggggaaaaaatgcaaaaatagtatcaatcaaaaacaactcatagcaactgtgtggcctaaaccaataatggtccttcaatgatttaggcatcaggtcttcaaagattttgttttagcactcataagtattttgtattaatggttcaaatgatgaatgccctaaaactaaattctagttgataaaatcagcttaagcttggaagtgtttgaaggttgtgttggtctcttcccctctcgactggtgtgattgcaacagctattgagactgccaggcagtctgtcttttgggactcaggagatagggaagccagttggttttaaagtagagagcttccagcaacccagggtcacgtagttctgctacctgtgtgtagtgaaagggtgtcctgggctggtgctctgtgggtctccacatttctgggtgacagactactcactcttgcaaatgtgactgtgtgccatctatagactggaagaatcaggtctcttcatctgcctgatgtgcggcagaattagctatggtgttccacagaggtacagctctgtaagttaaaaaaaaaaaaaaaaaaaaaaaaaaaaaaaaaa

SEQ ID NO: 420 - DNA, 752 bp, Macaca Fascicularis
  misc_feature (1)...(752): n = A,T,C or G
ggcnnnnngctccctggaaggctttaggagaccannnaggacaggatgaccgtgctgccanctgntctggagctgggtctcagtgcagagggacagtgactgtggatcgttgcagtctctggtgggaggtgaggatagaaatgataaagagctaagaggagcttctgggagccttggaggaggtcagtcttgcagtgannnnnnnnnnnagcaggagatggagcagggccgtgagaggaggagattctgaggaggatgcaggggaaatcttgtctgttaatgaaataggagtggggtggggtttggggtggggtggtcattgccgtttgagctgctgattctcatgagtcgccttcaaaactctcatgtagggttgacaatgtggggggtgggggatctagcttattcttttattttcaagtccattcttggggctggtggggaggcaggagaatacccctccctcagcccttagtgtgtgctgagcttgctttgtgatgttggcaggggaggggggacctgggtggnnnnnnnnnnnnnnnnnnnnnnnnnnnnnnnnnnnnnnnnnnnnnnnnnnnnnnnnnnnnnnnnnnnnnnnnntgaatgtccaaatctgtgtttcaccctgccctcccagactgtgtggccagttgaaagtgtctggtttgnnnnnnnnnnnnnnnnnnnnnnnnnnnnagggcctgagaccctgccacatctcctatgctctgcatccacgcctctttgacata

SEQ ID NO: 421 - DNA, 717 bp, Macaca Fascicularis
atggtgtgatctgagctcactgcaacctccgcctcccaggttcaatcaattctccctcctcagcctccccagtagctgggaccacagacacccaccaccacgcctggccaatttttgcacttcccggtcgagatgaggtttcaccatgttggccaggctggtctccaactcctgacctcaggtgacccatctgccttggcctcccaaagtgctaggattacaggcttgagccactgtgcctggccaaaacctgcatctttagaaggtcatttttgtgtgttagttttcctttgcctgttggtttggaaattctccatgttcctaaaggtagcttccacatttctgttccacgaactgattagaaaaagcaagatggtttcccactttagttgcctccctttggttcctcacctctcagacaacaaacagcatgttgtagtctttcttgtgatgtttttccttctttcacctaacttcccttgaaaaaaaaaatcgaaatatttatttagcacttttttcaaagggtaattcctgattaatataggcagaaaaactcaagatttatcttcttccattcccaaaaaggtaagaagatgtgaatatttatattgggccctctccctcctcatacacttttacctaaagcttaaagaaaaaaaagtcaacttcaaaaacagttgaaggtatatactacatcaactttttcttttgtttctg

SEQ ID NO: 422 - DNA, 727 bp, Macaca Fascicularis
  misc_feature (1)...(727): n = A,T,C or G
tgactgcacagacttcagtcaacatccacagacttttattanngaaagagtttttnnnnnnnnnnnnnnnagaaaatctgtggtgaaaggaacatcttaccatctggccattcatactgaagagaaacttcataagcatcctgtctttgagaaaacctgtcatnnnnnnnnnnnnnnnnnctgaacaatcatgttagaaattgaagcagcctggagtcttattctccatctgagaattcacccatgagagagacccagtggttactatgcacttaggaaaaccttcagccacatctttcttcttagtttacagtgacatattatctcagggatatttaaacaaaggagaaggagatatagggaagaggaataaaacacagcttcttttagacttgtcttacaagcctatggcaatttgtcatcccttttttattttatttgggagaggnnnnnnnnnnnnnnnnnnnnnnnnnnnnnnnntttatttttcctctttgtacattcactgctgcccagtgtctgaacagttaagacgaatgagggtttgaaaacatttggtgaaagcttccttagtcctgcaacattatccactcttgaggtgtaggagcatacatctttataaaaaatatggaggcttgagttatgaaacacttttataaggagataaggatgtatgtatgtttggacacattgtccacttcagatgcttgtttaaaaaatctttcac

SEQ ID NO: 423 - DNA, 730 bp, Macaca Fascicularis
  misc_feature (1)...(730): n = A,T,C or G
agctgactgtnnnnnnntccannnnnnnnnnnnnnnnnnnnnctgggnnnnncgtnnctggggtagggtgaagacacctgccctagagagggtcctggggtcaggagatgatgaggccggtnnnnnnnnnnnnnnnnnnnnnnnnnnnnnnnnnnnnnnnnnnnnnnnnnnnnnnnnnnnnnnnnnnnnnnnnnnnnnnnnnnnnnnnnnnnnnnnnnnnnnnnggccccctagtcctagtggcatgtggagggcacagccaggagcccttgtagcaccggctcccccgaccagcatcacgcccagtggggacagtccgggtgggttgggggagccttctgcgtgctgcctggccctgaccctggcccacctgcgccatctgcccacagagtgcatgctgaggctggtagactgtgccacggggactgcgcaggactttgnnnnnnnnnnnnnnnnnnnnnacctgtgcaggtttacaccgtctgccaggctgctcttcacggccgcnnnnnnnnnnnnnnnngtgtgggaggtctccggccgctgagatgcagcagggactatggtgctgcgtgtcacggctggtacctggacataagcttggcagagaagccaggtggtcaatggcctcatgctgggacaggccaggattcatgtaaannnnnnnnnnnnnnnnnnnnnnnaatttggcgatnnnaaaatcttaatctgttgcccttttgcctaagca

SEQ ID NO: 424 - DNA, 759 bp, Macaca Fascicularis
  misc_feature (1)...(759): n = A,T,C or G
ctcgagnnnnnnnnnntgaggatgtgtgacaagctcacagagcnnnnnnnnnnnnnnnnnnnnnnnnnnnnnngcctttttctttctacactgaagattttcttctttatttaatgtggtttattttgggctcagaaataattgctgtgttgaaaataatcctttgtcagaaaagaaggtagctaccacatcattttgaaaggaccatgagcaactataagcaaagccataagaagtggtttgattgatatattaggggtagctcttgattttgttaacattaagataaggtgactttttccccctgcttttagggttaaaatgaaagagatttctatatttttatcactatagatcatagttattatacaatgtagtgagtcctgcatgggtactcaatgtgtaatgaaacctgaaataataagataataagaaaagcaataattttctaaagctgtgatatggatgatacagagnnnnnnnnnnnnnnatagtaaagctcttcattttgtgaattatagaatgctactttttataaagccatatttttttaggaaaactaagtgacataaaactgatgaacgagtaaaataagttttactggatttttatagaactctggacgttgaggattcattatgctgtggttaactttaaatactttttaattccaaatatctgaattaatgagccttgtctttacaaatatgtgccattgtgcaacatcaatggattttctaaaaataatgtaaacgtctt

SEQ ID NO: 425 - DNA, 2734 bp, Macaca Fascicularis
  misc_feature (1)...(2734): n = A,T,C or G
attttaaccagtgcctcatcttctctgccagtccctctgcacatttgtatcctaataacgactctaccctcactgctagtatgagcacaacagttattcccagtgacttccttggtcaactcttatctggtgccagagtagtaggtgctgagataaattcagttaacccctcaccatatggcagcattaatattttttagttacctcaaaccagaaacctctcctgccccataccagattagtgaccacatcccattgattctatgtccttaacaaatctcagattcatcccttcttccctcacttcatcttctctgtaatagattcttacagcaactgtaacaacctctttacgcatggattctttccttctttcatccattttctatactgttgctagaatggtctttctaaagtagaatatatggtactgtgcttttacctaaagctttttggttgacatcaggataaaactcagacccctttgaatggcatgtaagggcttttagcttttgtcccaagtgttcttgtccagttccttctcctctctggaaccttgtgctacactgatgacattctctacatgctccaggcagctttagggctccatggatttgtacgtattgttctctttctcttttcccagaatagtctgcttctctgtctacctgtttgttgtactgtcactacctgtcatttcagattgactgtgcttccgtggaatggttaaataacactggataactctataacggattgtgctatcgtctttacaaatcttgttttaggagaaaatatgatgacttagagatatgtttatagcacattgtcaagtgaaaagtgttgtataatatatgtgtgattgacttttctctttcttttcttttccttttcttttctctttctctctctttctctgtctcctttttttcccctcttcctacttccctccctttcttcctttctcccttcccttcccttcccttctcttttctccccattgatctttcaataaaaataaaagcctagaactctgtatagctaaatgttaacagtgtttatctctgggtattgggattattgatctttagaattatcttcattttgtatgttctaaagtttctataacgaatgcacattactttttaacaagaagtagtaaatgctatttttaacaaaaaatagtgacttgtggcaagtactatgtcttacttatctttgtctttttagaacattgccttcctcatggaagatgtattagttagggtagactaactgctgtaacaaatgatacccttaatacataataagtaaaatgcaatagtttatttctacctattgaatgaacagaacacaagatgttctggtcctaattttcccctgaataaaatctgcactaccacctgaggcatagccaaacctcacctccagaccaaattggttgaaataggcagggttccaatttgtgatggccatttatttttaatggcctttctattccctgaaatgtagacaaatttgccctttgctgcctcattgcagtggaagagccccatgccggtgtgcagagctgatgatgaaaggcatctatgtgtattgtagataaatagtgtattaactatgtgtaattccttatgttcaacttagcattttatgggtgagttttgcaataaatcttcaacatttaatgctcactacgtcttgtttcatttgatatcactgaaaaatgcagagggtcaggctacattcactctgtctctcccaggcatgttagtttgccttctagagctctgtgtttcacaaatcattttgatgtagagactgtggagaaatattctcaggctttatcaccgctgacttaattgagtttcatgatgcacattttttttcatagtaggataaattaaaaatggctgataaagctgcctgtaaaagcagaattgttaggttagacctgcctggtgtattaaatgtattgataaataatttggccaccatttttaatcacttttattaactctcaagtagttttatttccagtaacttgcaaagtaactgtcattatgggctcagtcatatttctcttcaaaatactattgaaaagtccatgaaaatgattaaagtgccaatatcacccgcctacttcctgttatcaagaattgttggtgattttatggtgagctgggtacatggttgtgctttctttgtgcaacccaggaggaaacacagccagttcatcccaggtgaatggagataatgaatgggtttgaagccgtgtaaaaggagtagtcttttgtgcatctgtctcatgtatgttattgctatgctctctttaaagcattttattaaatgttgagaagacaagatacttgcgaattatgtgtaaagtataaagaatcatgatacatgcaatgtgcctttcagtgtcatttttgccatcagccatttggctttgtgaggatcttgagttcaaggtcactgaagaacagcttaacacattgtcttgctcacaggtcaataaggaatgtatctcttcattaaaatagatgagaagtttgtcattactctactgctttggctagatatgnnnnnnnnnnnnnnnnnnnnnnnnnnnnnnnnnnnnnnnnnnnnnnnnnnnnnnnnnnnnnnnnnnnnnnnnnnnnnnnnnnnnnnnnnnnnnnnnnnnnnnnnnnnnnnnnnnnnnnnnnnaaaaaaaaaaaaaaaaaaaaaaaaa

SEQ ID NO: 426 - DNA, 633 bp, Macaca Fascicularis
caccatctcactgggggccctgccgctcctggtcagggcttacagtgccttctccagggacccaactcaaaaggaccccagcccgagctgctaggctgccaacagttgggccccttccttaactcaggacagtcatccaaagaaatagggtgaggaagttttccagtgacttcacactgtatccctccatagtctgtctggttccttcagagggtgtctctgcctcacaaactagtagcatttagaaataggctgtgctgtcagctgtaaaaggtcaggaggccgcagacaccactcgtttcttcactgcatttagcaatgcctgaagttagtgcttaggccgggcatctcaaaaagatacttgggtcattcacattttaaaattcaaaacggttcatttctaagtggcagcgatgaatcagaaatttggatgatgtgtttcttttccacggaggagaaatgggttgggtagggaactggacaggcttggacctcgtttcatttctaatttcaaaacactagcaaattgggcaacaaggaattacacatcttccatgccaccacccaggcataaccagttggtttgtttccttctgaggaaggtttcaaatgtgtctagtgtttagcattgag

SEQ ID NO: 427 - DNA, 696 bp, Macaca Fascicularis
  misc_feature (1)...(696): n = A,T,C or G
agccagacacagccncccgggatcgacgcccagacttnnnnnnnnnnnnnnnnnncctggttccagnnnnnnnnacgggccgtcccagacggctccaacgctannncnnnnnnnnnnnnnnnnnnnnnnnnnnnnnnnnnnnnnnnnnngagagcaannnnnnnnnnnnnnnnnnnnnnnnnnnnnnnnnnaacgaggtcaccatgggggtggcagcctccagtccagccctggagctcccagacctattgcttctggccggccctgacaaggagaatggacacctgcaactcttcgggctgttccccttgaagttcgtccagctctttgtccacgatgaaagccggtgtcagctcgaggtcaagttgaacaccagccgaaccttctacttgcgactgcgcgccccactcgagacccgagaccgggagttcggccagtgggtgcggctgctctaccgcctgcgcttcctctccgcctctgccgtgcccttcacgcaggagcaccaagtgctggaggatgaagatgaggagggcgatgacgatgaggtggaggcccagagggagtggaaggagccccaaggcatggaagccagacttgaccccaagacctttgaactctggggactatgagtcttccagcatccttcaaggtcaccgaatgaccagagatcaaagtaccttgcctcagggccaggca

SEQ ID NO: 428 - DNA, 753 bp, Macaca Fascicularis
  misc_feature (1)...(753): n = A,T,C or G
acaactgaaaaaggagcattcagtggtgaaactgagcgctactgtannnnnttatnnnnnnnnnnnnnnnnnnnnnnnnnnnatttggcttcttcaatattgtgaataattatttcttaattgtgaaaatgggtatcagttcttcttaatcactcttccaaaagcgaacacaaannnnnnnnnnnnnnnnnnnnnnnnnnnnnnnnnnnnnnnnnnnntnnnnnnnnnnnnnnnnnnnnnntaggcatttttgttctagaatggcttcttaagaatctgtgagcaagttgcagaattagagtgtttataggtcaggggccaagaatgctcatttagctgttaattatggcaggatgtgacttttgaaagctctgaacatatacctatatgcaacagtatacacacttatttactatttagctcaatnnnnnnnnnnnnnnntctttgagcttttgagaatgtttcccaatgtattgtgcttctaaatgtaatgcactcactttaatgcttttgttctcaatctctggaagctattccaaacatggcatttctcaaggaaaatttcttgaatgtgcaaaattattctcgaatgtgtagaagtgacaggccacctnnnnnnnnnnnnnnnnnnngccacccaaaatacacaataagcactcaaggcagaatggggggtcttcaggtggtcatttggccatgctgtaaagatggccctgcttctcccagttcaccatgatgtgaagaaggacaccg

SEQ ID NO: 429 - DNA, 755 bp, Macaca Fascicularis
  misc_feature (1)...(755): n = A,T,C or G
gatctagaaccaaggcatgaagaactcacagacaacggagggtggagggtggagggtgggagagaccagagctatctgtgcacaggtatccacctgtccttcctccctgccaacagtgtcctaccagcaaggggtcctgtctgccaccatcctcnnnnnnnnnnnnnnngggaaggccaccctgtatnnnnnnnnnnnnnnnnnnnnnnnnnnnnnnnccatggtaagcaggagggcaggatggggctagcaggctggaggtgacacattgacaccaagcaactcagacccagaagtatagagtctctgctaggattggagctgggcagtagggagggaagaggtttcattcaggtgcctcagaagatagcttgcacctctgtaggatcacagtggaagggtcatgctgggaaggagaagctggagtcacctgaaaatccaatggatgttgtgatgagccttactatttgtaaggtcaacggaccctactacttcctctcaatcctcacaactcctggctcttaataacccccaagctttctcttctgcaggtcaagaggaaggatnnnnnnnnnnnnnnnnnnnagtggaattaggagcttctaacnnnnnnnnnnnnnnnnnnnnnntcttcttttgnnnnnnnnnnnnnnnnnnnnctctcacctctctacannnnnnnnnnnacccactnnnnnnnnnnnnnnnnncacactcacggctgaaatctccctaacccaggggcaccttagcat

SEQ ID NO: 430 - DNA, 720 bp, Macaca Fascicularis
taaaagtttgaagggctcgattgggatctgaagacaaaattgtaggaaatcttacatttttgccataacattaatgaaagcaaaacattataaaagtaattttaattcaccatatacttatcaatttattgatgcttccagatgacatctacagatacggttttgtggacatctttttctgtttacataaatttatccacttaaaatgtgataatgtggagacaaagcaaggtttgattacataaacttttctctgcattggtcttttcactatcttatttgctgaatttcttaattttcttcaacctccccaccctccattttttggatattaaacagggaaagcttgctacattataaaggctgttggcaccatttattttacacgaaggctaaaggttaacttttggaaatgatgagctacttttatatatgtgtttactcgtgctttgtgatatttctggatcattccagtcataaagacttattacatgtactatttcttgctacctgtgaaaaggtatattttaaagaatgtataaccaacagtccatttactttttattagtatgtagaggatttgtatctaattcatgaatgtagttttacaatagtttctcattataaatggagcaaagtacattatctttattccaaaatgtacattatgtaagaattgtaaatatacttgattaagtactttgtatgccaaaaaataca

SEQ ID NO: 431 - DNA, 744 bp, Macaca Fascicularis
  misc_feature (1)...(744): n = A,T,C or G
ggcagagtttttnntaagctttgctgttttgcagcagcctggatggatggatattgaaggaaatttaggatgatagaacaattgcaaagctaatagcttatnnnnnnnnnnnnnnnnnnntgggaaatatctgagactggagttcctttatgcactttgtttcagatttcagcttcctcttttttggtggtttggcttgtacgcctggaccattatgtcttgggaatatgaagaatttgggaacataattacacacagaaagccaagattccaattatttagagaaatctgcaagctcattttatattttttaagaaagctaatgaaggaaacatgtatttttaaacttataaagcagactacnnnnnnnnnnnnnnnnnnnnnnnnnnnnnnnnnnnnnnnnnnccttctaaatgcaagtaatatatgtttatcagaaattagaatatactgaaaaaaagtaaagcagaaatttatttcacaattctgttacccagaggtaagggttaagaagttaatgtataccttctagacttttttccctgtggatatttgcaatatgtgtttacaaaaataatacattttgtttgtaacctgtttatgttacaaagctataaatatgtattactatagatagggaaatacagtacagtctgtggcagaggcttggtattactgttatacagtgtatttaatcagtttccactctagtgcttttagatttttttttctagttttttgcca

SEQ ID NO: 432 - DNA, 723 bp, Macaca Fascicularis
  misc_feature (1)...(723): n = A,T,C or G
gcagcggggccactgagaacactacccgatttctcgaggggcgcaggnnngctccgttcccctttgtcagccaatgaccaagaaggaagaagatgactgccgtctcattcctgaacttcctcattcaggactcccgtggannnnnnnnnnnnncccttatccgaggccccggcccaggccggcccctttgctttgtttggagaggctggctgagttttggcccctagtgcccagagacccccttgttggagaggcttcctgttcatgcctcacaagaagaagaaccacagggctctgggagtggaaggagcacgcactcnnnnnnnnnnnnnnnnnnnnnnnnnnnnnnnnnccttcctccttgcctgtagtcttgacagcatccgtatgtacgtgtcctggcattcccccccccccccccgatgactaatgcccactgggtctgacattccaagtaaccagtatgtaactggtagtttgatcccagtagccatagcgactccaggtgggagagagggagccagccccctgtcctggaagataccttagagtgtgtgaccacgctccagaaccttgcttctctctcctgcagagggtgggtttctggggtgctaagtacctaccagaacagcgtggaggggcaggtacactaactggcccagggatgttctctcctccattttcaaagatgaaaggaggttttaaagannnntttttgattcc

SEQ ID NO: 433 - DNA, 530 bp, Macaca Fascicularis
aatggagaataaccagtacacagcacccagcttttccatatcataggagacaggtaaatatctgtttaactacatacaaaacttcgaccttgaagctgctgaaaagtgcagattacttttaattgtgctacattttcctgggcagggctggagtttggatggctgtgtactctgctgatggaaatttatggctgtgtccatacactgtactttatttgcaacgatgatctgaaagtcttcagtttcctgcacaatcctggactggtcatgtctcagcctgtgacccagctgttgttgcgctggagctctttcatcctgtttgccaacttatatatcctgtgtcctgtatccatgcttttttcttctcgcactttattggagcacacaaatagattccttagaaagtcttcgtaagaagataattttgtgagactgttcatgtcagaatatgtcgttactataaccctagactaatagtgtggccgagagtaaaattgtagcataagcaacatttgtttttcgaaataggg

SEQ ID NO: 434 - DNA, 2210 bp, Macaca Fascicularis
tcacctactgtccctttctctgtgctgacagccacggtctttgcccacaaagtgtcctttcctccccagattcactccggcatggtggtcgacattgtcctaaagaagtcaaacaaggcagataagaagggagaggtaaaacaatatgggcaggttgagaatggatagaaaagaatgaacaagtcatgatgtagacatctggggataggagaccatagttccaggctttctggaacagcccgtatttcaaatattctcctatatggtcctagtacatataccctcatactgatggggtatgtcccaatagttgaccacaaaacaccatctccaaatatattaaagtacatagtcctatccatgaaagcagggaatattaactttaaggttttgtttgtggcaaccacacacacacacacacacacacacacacacacacacacagaactgtaaaagaggcaggtgttctagctgactagtttattccaaaatccaatcccttgacatgaagcaggcactgagggtcaactacttcctttcattttgaagcaacagtttataaacagtaaaaaagtctactggtttcatagaatctgtcaaatttgctaatttgctactggtttcacatgtgtggaatatgttcgagtgtttctaggcaaagacctttatcctcaaatcatgagattagagtaaaacaactgctatagagttgggcatctcatgaccaatgagtatgaaggcacactcaccaaacgcaggcactttaagggcatccttgattaatttgctaattgctatttttttgttgatatatgaatacccgctaggaagccaaggctagcgggcaatgaaaaagatagaacaatggtaaaatgcagccccagtcctctacaaattgacagtatagtttgtgaggtgaggcagttaagtgatgatgcagcatttggatgatcatgtaaaaccagtgccattatacaaaactttaaaaacaatcctaggcaataaaactgcctgtggtctgctatgtccctgactctttaaatgcatgaattaaagaatgatataataatctctgatttattgtgattcatgtagtatgttatatgtaataaattatatcaattaagagttcaaacataggaaatttgtgataatttatatgtggtcttggcttgaagtttagtcttgtctttattgcaaaactagctttatcaaaagaatgtgagcagataaagaaatgttagacacctgcgaagtcaccattaatatgctaaatgcagatctttatgcattcaagcagattcattgagaaatttagtgataagaattgaagaatttatttagaaacatccttagatttttcttacttctttatatatcacttgaagtgctaaactcgcaagcattttaaaatacagactgttcacttactcaagttacttttccctgttattactcgaaatcagagagaacaagaaatgctatcgtattctagtgttttaataagggaagtgcttcaaaagctttattaagtactctatggcagagaagaaaaattcagacaagaggagtctggagaggtgacactagaatcaagggtaaaagtttaagtctattctacctgaaaatccatgtgaaaacttttactccataaatcgcgagtgtcttactccttaaaaaagttcatagtcttcagtaaagcgaagcttgaggaagatgtgccacatttttctggtgtcttcaaatactccccagctctcccaggattctgtataccccagttggagaacaatgttgttataatattaatttaatctccagctgagggttttattaatgttttcataagatgaataagcctcgttattcttgtcactcagtatgtatttaacacctctcaggtgtcacttaaattatacattatatacaacacactctgcctatgctatctagagcaagaaacattccatataagagaaggaagaagtggcaattaatgaattattttgcttccatttcaatagcaaacgttgtttataccacggtaagaaatgtagacattcattgactttgagtctctattatgcaaatcaaatatttgtgaaacacttttgtttacgcttgactgctaatattttatcaggttagaaatgtatatgaatcataaacaatagtaagtgctcaaaatacctaaaaaaaaaaaaaaaaaa

SEQ ID NO: 435 - DNA, 762 bp, Macaca Fascicularis
  misc_feature (1)...(762): n = A,T,C or G
ctgagtgtgtgtactnnnnttcagtcaggtgtttctgtgcccagagagggaaagagaaatgtgttctccaagattgatcccctttgtagattttgtacctgaagaattacctggcagggcaccacccttggctaggtccaggtgtgtgtctctttcttgcctggcatggaccccgaggcaagtgatgtggggcctggcgcacctccccgctttggcagctgtggcctctctgaccagtgcccttgcaggaggctggccggagcagcctgatgacctgcactctttagtcacggacgtcagattatttctataacattccctgacagttcagagtcccttcaaatcgcacttttctggttttgcttttttaattaaaagagatgagtgtaagtataaaaaatgaannnnnnnnnnnnnnnnnaaatgtatttgattgcttaatactgttccacaacattttgggatgtatgttttcctttggagagtaaggccttattactattcttttctgataaagaaaacattttatttcctttgggcttgcgttagctctttcctagcaacccattatcccagctcagtacctttcaaacagaacgctaggagtctggggttttgttgtgacctaaatttgtaagttattaatgtgaaaagcggagcaggaagctcacagatttgtttgcacaaagttcactgtaaatactgtgagaattgaattatnnnnaggtcacatttagtgattcaaaagcacacattaaatga

SEQ ID NO: 436 - DNA, 2733 bp, Macaca Fascicularis
  misc_feature (1)...(2733): n = A,T,C or G
ttgatttttaaaagatgagagtatatgtcattatgatattctaaccaagaaactaacctttttctgtctccatttttactgattcagaacatatattttaattgtagtgaggttttatgcctcatcttgttaactctggtatgtacagaatttttgttctttgtatattagcatatagtgtcatagttggcatattctagttttgtgtattcactaagttttattttaaaatctttgaagaatataaactagttgcagagcctgaagaaataagctttaaaaataattttagggaagaacatttttaaataaaaactgaaaataaatttgggtatttggtgtgctgaaaagtgaaatttttgcctatttaaaactgactctaatcttggacattattaataaaaggcacatattaaataaaagacacagtgacctagattatgttcaacaaaactttaagttatttaaattatgctaacatagcatacgtagcacattttagaaattcattgatcttttatttttctagtgttaattacttcaaattgatttgtgttgctacataaggcaaaaaaacaattcctgtactttgcagaatggaaaaatatttcaactgccacatttacccttttaaatctgagagctttcaagcagagctcccaacccccagtacccatccctcgcctgttaggaactggaccacacagcaggaggtgagcagcaggcaagccagagaagctttatctgtatttacagctgctcccaatggcttgtatggccacctgaaatccgcctcctatcagatcactggcagcattgaattatcataggatcttgaaccctattgtgaactgtgcaagccagggatctaggttgtgcctccttatgagtatctaatacctcatgatctgaagtggaactgaggtggtgatggggagtgactgcaaaaacagattaacattagcagagaggcttgactgcacagagaccttaataaatcaactgcttgcaaactcatatcaaaaccgtatcagtgagtggcaagtgacaagctgcatctagtggcaggctctaagtcagaatctgacatttatttagtctgcatgtggcctgcccattgttttatttaccacttccctccgtgcctctttcctgcactgtgcatttgtctcagtcacagttttggtaagcccacaagctaaccctagccaaaatgagtaaaaaaacaaacgtccttggagaccttctttgaaaaggaagaaagacccaatgatgaggcaccagaagactaatactgccaacaaagagaaagctgcatttaaaacaaaataccaagagtcctacttaaattacaggttcattgcaacagctgattcacattctccaaacctgctttgtctaatatatgatgaccagctatccagaaaagccatgaaacctttaaaagtgcttcactacatggagaccgagcaccatgcattaaaagacaagcctttggcatttttcaaaagaaaaaatcgtgaacgcaaagaacagaagtaattattgaaggccaccacttcatcaaatgtgtctgcagtgagagcatcattcttagtggctaatcacatggctgaagctaagaagccctttactactggtgaagagttgttcctgcctgctgctaaggatgtctgttgtgaactcttaggagaggctgcagttcaaaaggtggcacgtgttcctcttctggctagcaccataactagatgaattcatgaaatagaggatattgaggcacaattgttagagaggattaatgagtcactgtggtacgcaatccgggttaatgagtctaccagtgttgacaacaaagcaacaatgcttgtttttgtgtgatacatttttcaggaggatgtgcatgaggatatgttatgtgcacttttgctttcaaccagcaccacagctgcagaactattcaagtcttataaataattacatatcaggaaaactgaatttggcattttgtatcgatatatgcagggatggagcagctgccatgactggacagctttctggtttcactactcaggtcaaagagcttgcttctgaatgtgagtctgtgtactgtgtcatccacagagatgctgactagttgaaaaacatcacctgaacttaacattttgcaggatgtgattaaaattttcaaccacattaaagtacatgcccttaattcacatctgttcatgtagctctgtgagaagatggacacagagcacatatgtcatctcttatacacacaacagagatggcttcctaaagttagatcactggccagagtttttcagttataatagccactccagagattttttttttttttaagaaaatgtcatcactggcagcacatttcattgacacagaatgggtcgtaaaacctgcttacttggccaggcgtggtgggtcgtacctgtaattacagcacttttgggaggccaaagcaggcagatcacttgaggccaggagtttgnnnnnnnnnnnnnnnnnnnnnnnnnnnnnnnnnnnnnnnnnnnnnnnnnnnnnnnnnnnnnnnnnnnnnnnnnnnnnnnnnnnnnnnnnnnnnnnnnnnnnnnnnnnnnnnnnnnnnnnnnnnnnnnnnnnnnnnnnnnnnnnnnnnnnnnnnnnnnnnnnnnnnnnnnnnnnnnnnnnnnnnnnnnnnnnnnnnnnnnnnttctcaaaaaaaaaaaaaaaaaa

SEQ ID NO: 437 - DNA, 752 bp, Macaca Fascicularis
  misc_feature (1)...(752): n = A,T,C or G
caaatgctagatatgactcttccctatnnnnnatcttcagatgaagaaggctatgagaatatattaataattgaatataataacactgctataggaataagtatgtgtctattccaattgattttttaaaaacttttattttgaaatatttatagattcaaaggaagatgcaagagtacagggaagtgcgatatgccctttatctagttcctctagtggtagcaacttacataactacagtatcatatttaaaccaagaaattgacatctgtataatccacagaccttactcagacttcactaatgttacatacactaatttgtgtgtgtatgtgtgtgcgtgtgtgtatgtgtaggtctatgtaattttaccacatgtgtatnnnnnnnnnnnnnnnnnnnnnntcaagatatggaactgttccatcaccactaagatcccttgtgctattcttttataaacatctccctgtcatcctttttcatccataaaagctggtaaacactaatctgttcttcatccttataattttattatttcaggaatgttatataaatcttatcatacagtatataacacatagagattggcttttgtcactcagcacaattcccttgagatgcatccaaactgttgtgtatatcagtaatacaatatgtttaatttctgtgtagtattccatggtagagatgtgccatagtttaactattcacctgttgaacaacatttatgttctttctagttctgggct

SEQ ID NO: 438 - DNA, 722 bp, Macaca Fascicularis
  misc_feature (1)...(722): n = A,T,C or G
ctagtatnnnnnnnnnnnnnnnnnnnnnnnnnnnnnnnnnnnnnnnnnnnnnnnnnnnnnnnnnnnnnnnnnnnnnnnnnnnnnnnnaagaaaacattgacctatcagttacattacaaaaggcagatttcaagaggattaagtaagtggttggatggcttttagaaaaacaagaattcaagaagaggattcatgctttaagaaacattggttatacattcttcacaaattatacccgggataaaaactgtagcaggcagtgtgttttccttccgtgtctctctgcactacccacagtgtgtcctctgaggctgcaagtctatcctatctgaattcccagcagaagcactaagaagctccaccctatcacctagcagataaaactatggggaaaacttaaactcgtgcatacatttctggatgcatttacttatctttttaaaaaaaggaatcctatgacctgatttggccacaaaaataatcttgctgtacaatacaatctcttggaaattaagagatcctgtggatttgatgactggtgttagaggtgacaatgtaaccgactaacaacagacagcaataacttcgtttcagaaatgttcaagcaatagctttgtagcttcgacatatggtacgttttaaccttgaaagttttgcaatgatgaaagcagtatttgtacaaatgaaaagcagaattctcttttatatggtttatactgttg

SEQ ID NO: 439 - DNA, 1782 bp, Macaca Fascicularis
aaatctttgatattgccatttatgattacaacaaaattttagatgtccaaggaagtcaacagaacaatccagatcaaagtgcatctttgcagcttgagcctcaaaagcataaaaacaggaattcatttctgctctcagtgatacaagaaatgaggcaaaggaaaaaagatgggaccttagaggcaatgccctagagtaaaaagcgtacattggcactcagtaaccacagagatagaaacaactgactcatcctctccagaaataacagtagatgtagaatttattcttcaatatatgtttcgttgaattgaaatgcagtcatcaaatgcgaggaggggtgctagacctgataaatctaggaagaccagtcagcttggtagccacttgttaagctaaaggaccacaaaggtgtgtttagtagttctgatacgggattactatcagtttatacatatgtatagattttcttttaattataaacagccagatagccagcaattaaggtgttttttcatctttgtgaaattcatggacaaattctgactctaaaatgcacagtctacatgaaatctttgatcacaatctgtatatatatatatattgtacatgactgctagtaggtatgaaatgcatttcagaattgaaaactcatgcaacataaccatgtgtttgcataaggaatgttaaaattctttctactgcaatttattaacaggggaaaagattcaagcagtgccatctagaccttttctcttctcatttcttcaaaagcagtgctaagtaaaataataataataaaaatggtttatgaaccaaaagactttacattctagcattaggaacacacacaaaaaaatctgtcagcttacaaaagcacaacacataaagaaagagcagtggaatgcgtaatggggaaatgaatcgtgtttatttaaagcaagacctgcattaaattggcaactaagataatttccatcttctataggtaactgtgttccaatttaatgattaccttcatactcaacaagaaaaatggcaaagcaacatcaacaaaacaggtcttacaacatatctacgtgtatatatgtgtatatatagatccatataaacatacatacatatatatgcattcatatgttggaaaacacaaggaataagctaatatgttttgtttccttcattaaagcagtatatgagtatttttaatttggcaaacaaaaatcgacatactgaaataagtaacacagggtactaagcatttctctatcagcaaatcaatgcctacagtttttatgaaccattgcacagtttaactccacgatagtactgtaccccagaacatcagaagttaagtagttgtcacattgcttatccaattgctctctttttcaaggaaacaaataacattgtccattggtgattcaaaaacaaacatgtcttaagaaagtgaaaaatgataaaaattcctccaaagaggaagaaaaaaaaactaaaccccaccatgttggttagggcaaaatactaagtattcacaactgtagcaatcatgccatttggctaaagtacagagtacatgtaatgtgagcaaccataactttcactgagcgtgtgtaaatattaaaacagatttcttaaatatttttaacttctaatttgtattttatggtaaggcaatgtgctaattctgtttatggcttaagttgatgtgttataatatgtaaataattaaacatgctgtaaatgaatagtcaaaaaaaaaaaaaaaaaaaaaaaaaaaaaaaa

SEQ ID NO: 440 - DNA, 708 bp, Macaca Fascicularis
  misc_feature (1)...(708): n = A,T,C or G
cnnnnnngggcagggtcagggcgctgacggtcagnnnnnngagtnnngggccaacaccccgagacatctcaggacaggtgataagaagctgtctaaggtgaaacagctcccagtgcagaacaggacatggtggaaaacaccctgannnnnnnnnnnnnnnncggcacagaccctcggacgcacagccccggaacaagcgcaccccaacatctcatcatatactgaggtcaggggctccccggctggacaccgggactctgaccccctgctcctcattcacccnnnnnnnnnnnnnnnnnnnnnnnnnnnngtcactctcttcccgccctcctctgaggaacttcaagccaacaaggccacactagtgtgtctgatcagtgacttctacccgggagccgtggaagtggcctggaaggcagatggcagcgctgtcaacgcgggagtggagaccaccaaaccctccaaacagagcaacaacaagtacgcggccagcagctacctgannnnnnnnnccgaccagtggaagtcccacaagagctacagcnnnnnnnnnnnnnnngaagggagcaccgtggagannnnnnnnnnnnnnnnagaatgttcataggttcccaaccctcaccccacccacgggggcnnnnnnnnnnnnnnnnnnnngggaggggtctctcctcccaccccaaggcatccagcccttctccctgcact

SEQ ID NO: 441 - DNA, 742 bp, Macaca Fascicularis
  misc_feature (1)...(742): n = A,T,C or G
catgagtgtgatgnaacacaggtccacacactaaaaaacttgtgctgctaaaaatgtcaacagcatcccctccctataaatactgataccccttatcacctcccaccccaaagtgataccttgaaattctatatggcggtggaggacagaagtaggagnnnnnnnnnnnnnnnnnnnnnnnnnnnnnnnnnnnnnnnnnnnnnnnnnnnnnttacttcatctatcatatttagagttggatggtgggatgctgttaaatcctagtagcccatttagtttttaaagaaggctttgttccacaagtgacaggacaagtcaannnnnnnnnnnctactttgctgaatggatacggcagacctgtgttacatttttaccattctgtgaaaacaaaatcgtagatattagnnnnnnnnnnnnnnnngaataaacctgaccagtcagcaccctgacatcagatcatttacatgtactgcattttattggggatgattcttgggacaatcttgagagccaaggtttttcattacgctttaaaaagtgttataaaaatggcctttttgaaaatgttgcattatttgttaaagataacatcaaattttctttggtcttttctgagtatacccttgtaaaatctttgactcaatctgactgtgtagagggcatttgtcctgattggatcaaaatgtgctttagtaccctcatttttctaaactgtagaaacatagtatttaaatatcagaag

SEQ ID NO: 442 - DNA, 721 bp, Macaca Fascicularis
tcatgacttgcgggtgggagagtggtcttacatgtctgtgtattcatgactttgggagtggggaggatcattggagagagaattgcacagaaagtcctgaagtttaaaacacttttgaccagctttggctcgggagaggggggctgcgtatagaactggaagtgaataactttttcaagcaatagcagtgagtaggtcccattgacagggttccaggacctggaacactttaacagaaggaaatgctgaagcagcttgcacagttgctttacaaacttccaagacgctgattctggcttcaagatggagcattggagttggttttttgttttttgtttttttttttttttccctcaaagaacctgcggttgcgctttgtgtgttttgtttttgtttttggtttctatttgggggccccatgggaaagagcttctgaactctttcctttatgaactcccactgtgttcctataaagtcccttttctttcatagtgttgtaagttacattttcattatgccccatcacatcttctttactgtaaaaatattaagaagctgtttccaagtgggacagctaatgaagctctaattattgcagacatatttttgagatgtaaaaaaaaaatttaaaattaaatgataagtcttagaggcgagtgaggaataaaatggatgtaaacatttacatgggatgcattagaattctgctgtgtgtattgtc

SEQ ID NO: 443 - DNA, 628 bp, Macaca Fascicularis
  misc_feature (1)...(628): n = A,T,C or G
tgcccccgccccggcgnntgaaggttctgtgtctcccaggccgcgccgctccacgatcccctcgcccagctcgcggcccgagcccggcttnnnnnnnnnnnnnnngcagccgccgaggacgcgacgacgggcggcgccgcaacgcccccttccgccttgggcgcccccgagcggctggcggactcagggcgccgcgagttggcgcgaggcccgaacgggaggggccgcagagnnnnnnnnnnnnnnnnnnnnnnagttcctcttcctccgccgcagcttccaaggcggggctcatccccttctgttccgcnnnnnnnnnnnnnnnnnnnnnnnnnnnnncccactttgaacgaccacttcctcaactcttcaggcttaattctgcgaaaggcctggnnnnnnnnnnnnnnnnnnnnnnnctttcttgcttgcgaggagcagatcacttcatnnnnnnnnnnnnnnnnnnagagcatagaaagnnnnnnnnnnnnccagattaatgggaacattcctatttaaatcagcaacctggatttacatcctgctccaccatttgctatctatgggctgtttcacatccttgtgcctggatttcctcacacgttagaaaaaaaagaagtatata

SEQ ID NO: 444 - DNA, 709 bp, Macaca Fascicularis
  misc_feature (1)...(709): n = A,T,C or G
agggctcagttcttagannnnnnnnnnnnnnnnnnnnngtgatcttatttttccctccacaactttccagatgaactagactgtgaccaagaggtctataaaaccaaagcatcatggaacaggatcttgtatcagaccaaagtgtgccggttttttaaaatgtgcannnnnnnnnnnnnnnnnnnnnnnnnnncctctggtggaacgttctagtaggtcaggacagtccctctgcccgcagacaccttgggctttactgagggactcaactgagaaaatgaggaatgttgcagctcatgattcttagaagcagaaagtgaagctcatttaaaatatgattttaaaaaatctatagaacactctaaactacacaggctatgagggaatagcctagttgggccagcttggaaaccgggcacaggcaggaaggagcctgtcaggtttggactgtgtccacagagagcatttctcagnnnnnnnnnnnnnnnnnnnnnnnnnnnnnnnnnnnnnncttccagactcattatttttcttctgtttaacttttctctgaatttccnnnnnnnnnnnnnnnnnnnnnnnnnaataattagtgacagtctctactagttgtaaaatgaagcttgaaggccaagcacagtggctcatgcctgtaatcctagaatttttggaggnnnnannntgggtggatcacaaggagttcgcnacc

SEQ ID NO: 445 - DNA, 744 bp, Macaca Fascicularis
  misc_feature (1)...(744): n = A,T,C or G
gnnnnnnnnnnnnnnnnngnctcttccctgcctcacatccctcataaacggattcatagccctttagccccctgcaccctcctgcaggggactgcactttgagccctctggagccctcccttgctgagccttactctcttcagactctgaatgtgcaatgcggttggctggggtttggggacgggaagggaccaaggacactgaccccaagctgtcctgcccagcgtcttccaggagggcagggtctgcctgtgctggtgaggttggtttagccctgtttactgtgacttcccctcccctgagggacggctgcctttnnnnnnnnnnnngatgccacctnnnnnnnnnnnnnnnnnnnnnnnnnnnnnnnnnngtttcaggaagggcagggccagccagtccagaaccgcatccttcagcaggaactgatgagccatctcttggagggccccctaatacccggtggagtctggctcacaccccggtggggggtgtcnnnnnnnnnnnnnnnnnnnnnnnnnnnnttaaaaccannnnnnnnnnnncccaggctgccgagccggtgtgtggactggggggccttcccacaaaactagcctccggctctaggccccaggcagccgcaggccccaagcnnnnnnnnnnnnnnnnnagcggttggggttttataaactcctttctggtattttttcccctctatgtacaaatgtatatgttacgtctcaatttttgtgcttaaataaa

SEQ ID NO: 446 - DNA, 755 bp, Macaca Fascicularis
  misc_feature (1)...(755): n = A,T,C or G
ttgccacagagatgtgaatattaaactaaactattattttttaaagantnnntctatgcctagagcattctgacctcttcttgtttagagtgataacattttttcccagacagatgacagcaacaagatagctctacttttttatatagaaataannnnnnnnnnnnnnnaaggtcattttctaccagagacaattagaagactggtacttttcctaagttgtgtattactgagtcttggattcatctctgagagcaaatgtatgttcctgaaaaactaattttacacctcatttactgtagataacagaacaacctcaatttttcaaattttccaagttttatttatggggctagaattcccatgcatagagaatatgtgtagggagccagaaactctttctatgaaacgctatacaaatctttccatatgtgggttcagtatcatccttcagttttagcactggcatttgcaaagccagaacaataactgaagaatgtacaataaaaattagaatgctggggtcccactttgtgttcttacatttactgctgacccaggtatctttggcccagtcacttaacctctctgtgcctcagtttcctcatctgcaaaatggggttaaaatgctttttcataaagttttatttgcaattttagaacaagaggtgcttaaagtagcacaatgtgctttgtaattattacaagtgctgtattatttgactttcttgtgttgttgacaaaaagattccctc

SEQ ID NO: 447 - DNA, 743 bp, Macaca Fascicularis
  misc_feature (1)...(743): n = A,T,C or G
tgactagcagggttaaagtggnttttaattactttgtgagcgttattggatacatcttttaaaaaaaaaaaaaactgaaccagaaccatgccacgcttggttgactattttgagcattaaaattgctttactaattatgtagacattatcacaattctgtatctttactgacttaggaaagattcacgtaagctctgaaaactctgattccttggtagattttcctttgagtcacgtgtctgaaatggaatgaaaagatatcctaactcttaagttaatatggaaagagcattgtttttaaaacaatttcgattttaaatacataaaactttcaagatcttcaggactttttaaagcacatttgaaattattttagtaagaattttgttttatcaatatatgttgaattctgttttttaaacataaagcttagatttcagaaagagggagggaaaatagctggtggtcccagagtgtgctgctgttaattgtttaacaaaggggaaaatgtatataaacagataaagttaccataaattccatgaacttaaatctgtgattcattgccttaaaactttctctcttagaatttccataccgcatgccaaaccagtaaaatggcttttaaaaatgtatagtagacaatgtcagtttgtataaaagtaccaagtgaaaatatttattacatgcattggaaaaaaaaattgtttacctattgaatgttacctgtttatgtagagctc

SEQ ID NO: 448 - DNA, 673 bp, Macaca Fascicularis
  misc_feature (1)...(673): n = A,T,C or G
ggagacaggagggaggaggagatgaaagaggagggacaggttcttggtgctgtaccttgaaaacttcctagtaaggaatggtggggtggcgtttgggagcttgtgccccctaaacacatatannggcctcctttaatgactttggggaaaagatggttctgggtctttcccttgacttcttgtttcaattacaaactcctgggctttctggggaggggttcagaaaacatcaaaacactgcagnnnnnnnnnnncgnnnnnnnnnnnnnnnnctgaaagagacagtcatgtgagggggatctgggggaggcannnnnnnnnccagattttctcacagacccttcccaattccatcaccactgccaacaactcctcccccagagatctggctggagcccagaaaaagaagcatgtggtttaaaaaatgtttaaatcaatctataaaaggtaaaaatgaaaaacaaaaacaagcaaacaaacaaaaaacaatggaaaagatgaagctggagagagaggaaccagttgccaaggtagaaagacagctgcccgctcctgccctctggatgacataggggacatcaacaagacggctgccaacctgagaagtcaccaaaccacaaaaataaccttacagccttcagagaaagactaccagctctgtctttctaccctc

SEQ ID NO: 449 - DNA, 255 bp, Macaca Fascicularis
  misc_feature (1)...(255): n = A,T,C or G
gggaggaaaagaaaagacggaaaaatgtgttttcatgggnnnnnnctgggagaaaaggtcatcattgattgtattttagaatgaaagtgtgaaaatatacatttgtaaatgtaaaacttttaaggtatatcattataactgaagaagggtgtgcaccaaaatgcaagattttccacatgattcccagagacaggaaaatcctctagctggctaactggaatgcntgtaggagaanngaagtgaggccaatagaga

SEQ ID NO: 450 - DNA, 672 bp, Macaca Fascicularis
  misc_feature (1)...(672): n = A,T,C or G
gcggcccgcggctgcagggtnnctgcagcttgacactgcagcccgnntacgccaagtacgccacgttcaaggcagccgcgatgaaggccgcagaggccggcccgcgggacttctgccagcgttttcccgccctcgagccgtccccgcggcaaactcaggcgggggccccgcgtcccgccccggaatagcctgcgcccctagacgcctgcccatgggccccaccgggctacgcgccccctgctgcgcggggcccctatgccgcctggacagccggtcgcccggcccggaccgccccgctccgccacccgatggctcaggccttccaggtacctcggcggcccggtcacgcggcccgnnnnnnnnnnnnnnnnnnnnnnnnnnncgagaccttcagcccgcacccccccggcctttaccgcagcgcgggccgcgggtcccggtacctaaggaccaacagcaagaccgaggtcaccgtgtgaagcagggccgcggtcccctcgaggcatgggctggggccctcgtctgcccgttggagccccaggccacagggagaggagcgccggccttaaggtcagctcttctgtttnnnnnnnnnnnnnnngtgtcttggagcccgcaggcggtgggttcgtcttgtacatatgcccttttttgtggttcctgcccctgaga

SEQ ID NO: 451 - DNA, 2051 bp, Macaca Fascicularis
  misc_feature (1)...(2051): n = A,T,C or G
ggtaatctcgtgggcggggcgaagcctaggtaggcgaggcctgcgggtcgctgttgcagtacgaggagcgaggcggcgtcggccaggtgacctccgttcttacggaaggaccagggcaggccagcggggtcgagggggacccgcgggtctgagggaggaccccgggtggggagctgaaggaggatccgcagggctgagggaggatccaggagagttgagagaggtcccggaggtctgagggaggacccaggagtcctgagggaggacgcaagggaactgagggaggatccgcggggctgaaggggcaccagctgggctgagggaggacccaggtggggctgcgggaggatcccggtgggggctgagggagggaggatgcgcggggctgagtgggcaccagctggcctgagggaggatccagggggagctgcggaaggatctgcggggctgaggaaggatctagaaggggtgagagaggtcccaagaggctgagggggtatccgcagaactgagggaggtcccagggggcagtgagggaggatccttgggcgctgaggtgggaatcaagggaggctgagagaggatctctggggatgaggaaagttcaaggtggggctgaagagggacgcagcgggctgaggggacctgagaggctgaaggaggatctgaaaggctgatacagcagggctgaggggggatccgcggggttggcggaggctgaggaatgaccctgtagttcaaaatggagtaatttatgtcacaacgtaaccaaaatggagtggggagggccctaaggaagcagctgtcacgcatttctgaaatgccagtgaggctcgctattaccttgtaagcagagtttattctgggcatttccactggcctgcagtattccagatgagatgtttggaccagggcaggcagatagcatcgcttatctgcccccagcgaaccagggtcactttgtgcagtgagttcatgagaccagggcctttgttttgtgaaagttacgaataaggaatgaaatcacgttgtcaggcccagacagacagggctgggaaggacaggaggctcaggcttagtgtgtgagataagaactatttacaaggactttcgaaaaacctcgcaagaaacccttttgtgtcattcgcgggtctcctactttgataaaatttagacgatctttgtgactacagtaattcagataagatgctcggaagaaacatttgcccagtaatggcagctccaccaatgaactgaggacaactttgagctttggcgttgggcctctggaaccaatgaactctttctaagcagtttctgtgaacctctcccatttcgctgataaaaagttccctctacccttccctcaccaggagtgctggtggcttgctgttgttgacaaaaagagtcaaactgtaaaatatttcaagagatttattctgagccaaatatgagtaaccatggcctgtgacacagccctcaggacagaggtcctgagaacatgttcccaaggtggttagggtgcagcttggttttatacgttttagggaggcatgaggtatcaatcaaatacatttaaaacctatattggtttggttcagaaaggcatgacaactcaacgcgggggtcgaggatggtggcttccagcttataggtggacttaaaaattttgtttgacaattggttgaatttacctaaagaccagggattaacagaaaggaatgtctgggttaagataaaagactgtgggccaggtacagtggctcacgtctgtaatcccagcaccttgggaacctgaggcaggtggatcacgaggtcaggagtttgnnnnnnnnnnnnnnnnnnnnnnnnnnnnnnnnnnnnnnnnnnnnnnnnnnnnnnnnnnnnnnnnnnnnnnnnnnnnnnnnnnnnnnnnnnnnnnnnnnnnnnnnnnnnnnnnnnnnnnnnnnnnnnnnnnnnnnnnnnnnnnnnnnnnnnnnnnnnnnnnnnnnnnnnnnnnnnnnnnnnnnnnnnnnnnnnnnnnnnnncaaaaaaaaaaaaaaaaaaaaaaa

SEQ ID NO: 452 - DNA, 745 bp, Macaca Fascicularis
  misc_feature (1)...(745): n = A,T,C or G
aagctgtttacannngagaaagggagtgacccagacaaagagaagaaagccccggagagccatgctgacaccatcgggagtggcagagccatccccattaaacaggacatgctcttaaagctaagtgggaaatggctgaagaaatggaaaaagaaatatgccaccctctgtgacaatggcatgctcacctattattcaagcttaggtgattatatgaagaatattcacaaaaaagagattgnnnnnnnnnnnngtaccatcgaagtcccaggaaagaggccacccctagccacactggcctgtgcacccatttccagctctaaagacaatggcctattcaaggacatgaacagtctatgtacctcagccaattcagacaccggactgggtgactccatatgctccagccccaatatctccagcaccaccagccccaagctcaacccacccccctcttctcatgccaacaaaaagaaacaacaaaagaagaaatgcaccaacaacttaaaagacaatggcctgtctggcactgctgaaaaacaagcagaaaactttgtcattgtgtccctcactggccaaacgtggcactttgnnnnnnnnnnnnnnnnggagcgggatgcctgggtccaagccatcgagagccagatcgtggccagcctgcagtcatgctagagcagcaaaagcaagttccggctactttagactagcacaatgttatttactaataatcttgatccttagctac

SEQ ID NO: 453 - DNA, 699 bp, Macaca Fascicularis
  misc_feature (1)...(699): n = A,T,C or G
tagagatnnngtttcactatgttggccaggctagtctcgaactcctgacattgtgttctgcctgccttggcctcccaaagttctgnnnnnnnnnnnnnnnnnnnnnnnnnnnnnnnnnnnnnnnnnnnnnnnnnnnnnnnnnnnnnnnnnnnnnnnnnnnnnnnnnnnnnnnnnnnnnnnnnnnnnnnnnnnnnnnnnnnnnnnnnnnnnnnnnnnnnnnnnnnnnnnnnnnnnnnntgcgcctagcctaaagcataaattttaagttcttgcagaataaaatgcattgttagcatgtcaatttaatgctctttttctttatttctcatgttttaaacttacctgctttttctttaagaagcagaaacttgtgaaacagttgcctttaacctctatatgcttagaaacagattcacctgcactaggaccagaaaaacaggtacggaatgagccctggaacgtttctatttcggcagaatnnnnnnnnnnnnnnnnnnnnnnnnnnnnnnaagaagtgatagaagtgacgacacagaatgcattaaaactgtttcctaagctccgacacttnnnnnnnnnnnnnnnnnnnnnnnnnncattacaaaatctaatcaactgcagggggcagcatttgaaaaatagaaatgttctgatgaagaatctgaactaattagaagctgttttatagggttatagaag

SEQ ID NO: 454 - DNA, 714 bp, Macaca Fascicularis
  misc_feature (1)...(714): n = A,T,C or G
catgttttcagtgatttannnctaaaatcactgtcaacaataaatctaatcctagttgtatcccttctttcaatatttttcacttgttgccccaaatgtgaaagcatttcatnnnnnnnnnnnnnntaactcattcaccctgannnnnnnnnnnaaaagcccacttctctagaatataaattgctattatgggagaccacccagannnnnnnnnnnnnnntctgtgcccacactccaagacctgtgtcttttggagaagatnnnnnnnnnnnnnnnnnnnnnnnnnnnnnnnnattatgtctataatttatattcttttgtttacatgatgaaactttttgttgttccttgtttgtatataataaaatatgtatatgtatctttttcttgattcaaatcttaacccttagaaggactctggtattttnnnnnnnnnnnnnnnnnnnnnngaagttgagatgtttcagcttgaagaaccaaagcacttagaaagaatatgtacaaagaataaattttgtgcccacaatgagtttagtgtgtaaagtttagagacatttgactttgatagctaaattaaaccaaaccctattgaagaattagaatatatgctccttcaagaaactatattgatcttgtagaattatcttaataaaataatggctataatttctctgcaaaatcagatgtnnnnnnnnnnnnnnnnnnatatctaat

SEQ ID NO: 455 - DNA, 744 bp, Macaca Fascicularis
  misc_feature (1)...(744): n = A,T,C or G
gaattactttgnnnnntctcatgatcccatatagtattatccacttgtcttctagaggtcagaattccataatatatgtcactcaaaagttacatggttgctttcacttaaggatcattatggagtttaaagatgaatgaaaaactgcttcttcactatgtggtataggccctttcttttttcttaaacccagggatatgattattttgtcatataattttgtttcaggctaaaaggtaaatgtgtttgcttcagaaacttgttaactnnnnnnnnnnnnnnnnaacaggatacctcccttccaaactgaaccatagaagcagagcagcagcagttatgtgatgcaacacttgatggggcagtaaatttactggctagcagttttctccttaaaaattaaaatccttgccatagaccatagcatggcttgaaatgctatgtctgcatgataatttaaaatggaagatttaaactttgcactccaaaagcttatttggatttttttcttgcactgttttgtgtaatgcagaataatgattttatttctacagctttgtagattctaacatttatgtatctttattttcatattgtacagtaattttactttaaattatttaaataggctattttatttatttcaaatgcagttgtattggttctcattattgaactgtctgtgcactgtatgtagcaagcatttttcatctgttgtatacaagtggaaagggtattagacagtgt

SEQ ID NO: 456 - DNA, 665 bp, Macaca Fascicularis
  misc_feature (1)...(665): n = A,T,C or G
acccnnncntgttccccaacannntnagctatcattgttgtatttgcaatctatggattagaggtttaagtatttattattattggttaattattattaattatgtaaatttgcctcccgtctgtctgttgcattgggtttctgaggaggccctgggtgaggaggatgcactggctccccgcttctcgccccccacccctgtgctgtccaggaggcagtggtccggggccactggttgggcccccctcctcccctccccttgtcccttctccaggctgtgtgggggggtggtcctgtctgtctcagtctgtctctgctcccactcttgaggcactggtcaccccaaagtgagctgccagggtggggaagaaggtcctgtgttggccactgcctcctccagtgctgcgggaggcgggctggggccccacctgatggctttctccccactgggccctgagtcctctccaagcctctctcccacccctctcacccggccactgcctggcattgggatcgccccacaatggacccggcccctcctgttatttgctgggaagtccagcggaggagagggtgcaggtcccccgccgagcctccagtctctgtggactgggctgccggcccttccgcacccccttagagcccctcccgctgcggctgcacct

SEQ ID NO: 457 - DNA, 505 bp, Macaca Fascicularis
  misc_feature (1)...(505): n = A,T,C or G
gcnnnnnnnctcagcagctccagaccacgtgccacaacctgctgtccaacatccaaggtgtaccgcagaacatccaagatcaggccaagcacatgggggtgatggcaggcgacatctactcagtgttccgcagtgctgcctcctttaaggaagtgtctgacagcctcctcacttctagcaaggggcagctgcagaaaatgaaggaatctttagatgatgtgatggattatcttgttaacaacacgcccctcaactggctggtacttgatttcaccaccatagacttgacatctgagacggatgagattccagatattatagctttggaagaggagaacggatcaaatcattcacgtgctaatgaccctgtcctctcagggcaaaatgttgaataactaacaacaataaaatacccctttagccgggcgcggtggctcacgcctgtaatcccagcactttgggaggccgaggcgggcggatcacaaggtcaggagatcgagaccac

SEQ ID NO: 458 - DNA, 637 bp, Macaca Fascicularis
  misc_feature (1)...(637): n = A,T,C or G
agagccagctggagacacaggcgnctggccttcgggggcttgctggggaacctgcatgcctaataagccccgcaggtgactctgatgcaggcgccannnnnnnnnnnnnnnnnnnnnnnntcttgggtttttagtcctgctttgtgttgagaagacatcagnnnnnnnnnnnnnnnnnntaactgaccatttttcagaaaccctctcctccctcctccaccccttgagtgatgaccacaccaatcactgtatttttctagctatttttttcatgtaggtttttagttaaaacatctcctgcctaaaatgcattgaatattttaagataacagatatactggctggaggtttgtttaacactatatttaagcttatacaaaatgggcaaaatatagaatatttgtgattggaagcagtcacctggggtttctgtgggtggacagttcctcgccacccagcagcacccaggaactgcggcctttcccagctttacggaagcaggatggtggaactcgtgtcggaggtatactgctgaaggtgcgtggcggtggaccagccggctgctgtccatgtgcagagcaaggctgcacctgctgcccttcgatccttccacacacggccaggacactgccacagt

SEQ ID NO: 459 - DNA, 656 bp, Macaca Fascicularis
acagcactgttgccattaagtgcgctgtgtttttatgttcacaaatgtatatgaagaaactttctcaaacttactctttctaataacccactaaagccagcttaaacactctaaaagtgctttgtaaaccgacaataacttgatgtgtagcattccatattattatttcactacgttgtacttctaaaaatgggaagctgttaataaattataacatttaggtcagcactttgcatccatgagtattgtagatatttatattttgtgagatattaacttgtttaagaaaaatccgattggattactatggaaaaagcaacttgcctgttctgtttctttgcatactttgtgacccgacagttttaacagacattctattatatgagtagtttttttttgatgctattagattaacttgaagtttaataccaaatattatgctaagaggagaaaagctttctgctgacccccgatttcttagaaatatcttacataatccagcttatcccttttctgtatatgtttattcaggtttacctggtgtctcaaaatgaaaccaaattaagcctttttaaaggctgatgtgccatttgtattaaattatctgtcatttcaaagacatgaatttcccaagcctaattcctacttaaggaaga

SEQ ID NO: 460 - DNA, 760 bp, Macaca Fascicularis
  misc_feature (1)...(760): n = A,T,C or G
gccaatagtacattaaagtcactgagtttatgtaaacattaatttcaacatggctgttccattttatttaccaaaaatacttaaaatgctttaagatgatacacatacatacaaattagtgcatgtataatttgttaaatttgaaatgaactattaccttgaaatatagtctttaaaaatttttaatggttaaagaagattaaattgaatgaactgacactgtagtctaatggtaactgatnnnnnnnnnnnnnnnctctgataacctcctttccatttcgaaaatgtgtcttattatacatggaagctagtaactacttgaatgctgttggcaggatgagggtctgggtacctcagtctcttgtcctctttccttcccccaaatctatgattgtgaagttgccaacccccgcccccttctcctgccaagtacatgttgtcagagtcagccctataatgttcatttcccctcttggttgtgagattatggatctctgcagannnnnnnnnnnnnnnnnnnnnnnnnnnnnnnnnnnnnnnnnnnnnnnnnnnnnnnnnnnnnnnnnnnnnnnnnnctaagacacactgggagactgtaagaggaattaatatagaaaagctcttaattatagtaacatttggaagaaatttttcctttgttttgtaaaatggctaaggttgtaggagtgtgtggtattaccttttaaatgaactgtaaaactgccttagaaatttgtttaaaaggctagcaagtgagacc

SEQ ID NO: 461 - DNA, 712 bp, Macaca Fascicularis
  misc_feature (1)...(712): n = A,T,C or G
ccgggccatgtggtctgggctgggagcannnnnnnnnnnnnnnnnnnnnnngnnnnnnnnnnnnnnnnnnnnnnnnnnnnnnnnnnnnnnnnnnncctgcaggagcagtgacctcccactgtgtgtcccggacctgtcgtatgtgtcccnnnnnnnnnnnnnnnnnnnnnctgcttgctgctctcctcgcttggcatagcctcctggtcagtggccagtgccccacaggccttcctgggcctggccctcctctcttgactcccagatccttccctgccgtcttatgtgcaagnnnnnnnnnnnnnnnnnnnnnnnngtgtcttctttgatatctttgttctgtcccctgccccatccccagcactcatgatcttgaagcccccatcacaccccagttcagtcccgtgaaccatgtcctgagggccttgcagggaagtaggaagtagaaannnnnnnnnnnnnnnncgagggtcagagaagacccctgagatgaatcagggccctgccctgcccaccagctcttttctagcaatcatgccctgcccaggctgcaggcttcattagactcctgctgtcctccgcgatgtgactagcacaaggtgtatatatgttttgtacctctgccgatggctgtacatagtgtatgaaacttatttaagcctcatgttgtacatttctgttcctagattggatgtgtgnntctaagaagtgt

SEQ ID NO: 462 - DNA, 2248 bp, Macaca Fascicularis
cataaggacttgagggtgtcttaggacctgggcaatagggaagggtccccatattgtcatgatcctgacatacggcatgggaactgaagacagggttcaaacctgtggctggcgcagtcatctgctttctaagaagctgggtccacttgaaatgcttcacgcaatggcagatttacaggggggagagggcatttcaacagcgcactcacacattccttccaccgctacacggagaccccccgacacctggatgggcatttctgtgtgactgagggctgaggatgtctgagagacctggcacgggcgtgggccacaggtgctggcggaatgaggccaggggcaggcccggtggcgaagggtggcagtcagttggtgagagtttccgaggggcactgagagccccccaggtgcagccgatgcggagggttaaagccaggggatgccctattgggtagatgaggtgaggctgagagacggggtggatgaggcccagggtggtcctgcccgcacagcagcctccctgtccccacctctccagcgcctgaaggctctgtccaccgcctacctacaggaggccgcttgagcccttgggtggggcctgggctggactcctggcctcacagcagtgaactcccacaggcttggctgcgagctggggctggcagggcgaccccttctctgaagcgccagccgcagagcgagccccctgaaccccacacctcccaggaggcagccgggacccggaatggaggcggcggctggctgcacaccagcgggcctgatgacgcctggaggaggcgcagccccgcagagccggctcctgggcttggagcttccgcgggggcggaggatgtcgtccaaggggaggaagaatgggggtggcccgagggagaccaagtggagtccaagggccgtgggtggtggagctgggtttccggagctcccgtgctctcagccgcccttcccagccaggtggcagcatcaggcggagacagaagcagaggcttgggggccgccctgcgccccggaacgctgagatcccgggtgggtggggcagggaccccccgccaccctacacttctcccggaggcccgaccctttcctgcgcgggcgctgcccccgacctcccgccgagccccatcagctcgccaactccgcaggccagcccggcggcgccatctggcggtccccgggcatcgcgcccccagccgggtctggcagcggcagagaccctgggcgtgggaaccggcaagtcctagaaaccacttagggcccgtcagggagggcagttccacgcctgctggagggaaggtcgcctgctgcgcgcttctaatccggcccagcttgcctttcccaatgcgtgcattcatctgctgctcttacatcctgccacgtggagagtgggaagggaattgaggccaaagcccttatttcacctgtttcgggatcctgttgagtaagagtttgctgggggcgcccgtgcagaacccccttgagggcagctggggaggcaggtgaggagcaggacagagcataaggagggcctcacacagcccagagcctggcgggcggcccgctgtgggctgagacgtcatcgaggtcgccaagaaccccaccacactcccacggctgcacagctgccagcctgcttggtgacctccgggaactcagtacagctctcacctcccactgtcaactgtctgcgccccagcgggcgacccgccaggccctgagtgctgtttcaatgtccaggcctctgccatgtcagagtgggtgatctccattgaagcagctcagtggaagtagaaagaagccacgtgctccgtaggggctgtgtggagtcccaggtctcatgtcttgcaggcctggcctggcacagccacatgtccctagtgggcactgagttctgttgctaccaataaatatatgcagggtagacaactagcagcatgatgctcccagaaaacacactgaaagtccattttcggcataggatgagtggaaagaaaatacagatggggccgggtgcagtggctcacacctgcaatgccagcactttgagaggccaagacaggaggatcatttgtgtccaggagtttgagaccagcctgggcaatatggcaagacccccatctctacaagaaacagtttttaattagctggatgtggttgtgctcacctgcattcccgctccagtctgggcaacagagccagacctcatctcaaaaaaaaaaaaaaaaaaaaaaaa

SEQ ID NO: 463 - DNA, 743 bp, Macaca Fascicularis
  misc_feature (1)...(743): n = A,T,C or G
gtatatacaaggcattttcccaacaannncatactnnnatctaaagaaatagggaaatagttaaggacataggctttggagccacacagatgcgggnnngacagtcaggactaccgcnnnnnnnnnnnnnnnnnnnnnnnnnnnnnnnnnnctgtgtttctgagtcctggtctgtaaaatggggattatactccctcagtcagtaggttgggaaaaagtttgagtnnnnnnnnnnnnnnnnnnnnnnnnncactcatacttaatgagtatatatatactcatacttaatgagtatatatatactcatacttaatgagtatatatatatactcatacttaatgagtatatatatatactcatacttaatgagtatatatatatgctcatacttaatgagtatatatatatgctcatacttaatgagtatatatatatactcatacttaatgagcgtgtatatatatatactcatacttaatgagcgtgtatatatatatactcatacttaatgagcgtgtatatatatatgctcatacttaatgagcgtgtgtannnnnnnnnnnnnnnnnnnnnnnnnnnnnnnnnnnnnnnnnnnnnnnnnnnnnnncacacacacacacacacttattgcttggaaaatttctattaactttttaaggctttgttcaactttcaactatcatagaatattaacnnnnggctatttgctctgtccttccnnnnnnttgtactttgcacattc

SEQ ID NO: 464 - DNA, 732 bp, Macaca Fascicularis
aattccacattcattgtatgtattggctgttccatacatgcttctcaataagaaaattaactgcatgtttactgtgtgctgatcacatcagatttttatgtttaaaaaaatctcattatggactgagtccagcccagccctaggagaaaaagaaggcccataggggagacttcaatctcattattattgcctttatccaacagggcttatgaaaccccctaccctgtcccattccagaaaccataagactcaggcagttcttgattctggaggcctgcctggtaagataagatagtatcatttggaactgagaacataccagaaacagcagaacaaggtccagagcagaaaaatgaaaataagtgaagacacttatggatacattggtgcagaaaaagccacggagcccatactaggcttgatatgactttgaggggacagcagattaatactcaatgaggattaaacctgaccggtcttacagtgacaggccacactgcatgaatggggagaaccaatgaatccattgtcctctgcctattttcctgtgcacagtcacattccttccttaggaatcttccccttccaccctttacattaaacaagggaacactgaatctttcaacagaattacacgtttgagttaatgtttcagtatatcattttcatactgtaaattattttgtaagagagatttactgctatcccaggatgttcggacttggcgccccc

SEQ ID NO: 465 - DNA, 2071 bp, Macaca Fascicularis
aaataagctgctatattctttttccatcacttccctctccaaggctacagcgagctcggagctcttccccacgcagaatgcctgctttccttagtgctggacttccattgtctaatttcctcatactggctggggaaagggaaagctgcgagtcctcctgttccgaggaactccagctgaatgcagtttagttgctggtggtttcttggccaacctctgtggtctcagggatctgcctatgagcctgtggtttctttgagctgcctgcgagtctgaggcctcgggaatgtctgagagaacgctgcggctctgggatccgttcgcggtctcaggttttggagacgacgatctagtggatcttttgcgcgacaggagcgctgtctgctagctgcttttcctgctctctctccctggaggcgaacccttgtgctggagatggcagccaccctgctcatggctgggtcccaggcacctgtgacgtttgaagatatggccatgtatctcacccgggaagaatggagacctctggaccctgcacaaagggacctttacagggatgttatgcaggagaattacggaaatgttgtctcactagattttgagatcaggagtgagaatgaggtaaatcccaagcaagattttgcacgatgaaggcaatgattgtaacttttctcctcactgtttctaattagctcatttaaaacttgcatctttgtgaaagctaactgaagatacagttggaaaggaaaaacaagacacaggtttggggaccaaggacccatcaatgatggtgactttagcagaagatgcccacagttattactgccattaatcagatttatgaattttctttggggatcactatagggaacattgcagggaaaatatcttcaaggaaagataggaccatcagtgacagttaagtttaaggagcaagtggaattgactccttcagggaaggaatcacagagtcccttcccaaggaatgtaggtcgtttctgtgtttttccctctctaatgtttaagatcaactcttcctatcctgctaactctaagatttgataagggccacatcccagtgtttatcttagcttgcatcagggcatgtgtatgtacagtaatgtgtattcctgtggtttttctaatagcagaaactgaatttacagagacttagcatgttcttgggtgatgtgagtcatgtgacagaagtataaacataactccaatgtgagaaatgtccttttttcattatgaaaaaaatttaaacactagtgctttagtgtgcactctcctgtaaggtctgtctttgttcagagctaagcacttgtttgtatgtgtttgtcaattgtggaagataatgaccagacaaataggtcaattgtcctattctcagaatgaattatcttctatggcaatgaagaactctttggcttagaaggaattaacaaacctcggtaggaatgtatttccatcctcccaccctacagatataagtggttaaaataacagttcacccaatttaaacccagtagtgtccgttttcctaatctcagtccaggtaggaattaagaaatatctcaaatgttgatgcttatccaagcatgttggggtgaaagggaattggtgcccagaaaatgggactggagtgaggaatatcttttcttttgagagtacccccagtttatttctactgtgctttattgctactgttctttattgtgaatgttgtaacatttaaaaaatgtttttgccatagtattttgggactcggtgttaaaggagccagtggtctctcttgggtagggtattataatgagttattgtgacccacagctgtgtgggaccatatcacttgttaataacacaacctttaaagtaacccatcttccagtggagttccttcatgttgccactcctttttaaggacaaactcaggcaaggagcatgtttttttgttctttacaaaatctagcagactgtgggtattcatattttaattgtcaggtgacacatgttcttggtaactaaactcaaatatgcctttccccataaaaaaaaaaaaaaaaaaaaa

SEQ ID NO: 466 - DNA, 760 bp, Macaca Fascicularis
  misc_feature (1)...(760): n = A,T,C or G
cagcagcagtatagtttnnnnccnnccgagctgagggaagatgagggctaaggtgcgcgcccagatggcgagtnnnaagggatgnnnnnnnnnnnnnnnnnnagtgttcctgagaggctgggcacttacctggaaactgcccacctccccccnngggtgagcctggagccctgcgtgcttgttctcacgtctctgtcccnnnnnnnnnnnnnnnnnnnnnnnnnnnnnacacggtacaatgtccnnnnnnnnnnnnnnnnnccgcctcccctcctgcctcactgtgtctcaggagagaggggtgcacatttcgtggnnnnnnnnnnnnnaagaaaagtcagtattatgtcgttctcagacacgtttgcttttgttggtccttctcttaggcctgctcctggacctctttgtgataccgtaatagggaaaaaatcattgatgtcatagaatattcttcttcctctcaggagaagacggaagctggagttggacatggttcacaaaagccagaaacaaacccatgtggactccgggagggtgactgaggtcctccttccatgtcttgagcgctggctcacccagggggtgaaaaattcccgctcctgtttgcacgctttcttgcctccgtgtgtaagctccttgtacaacctagacccatcttgtattttgtggctcagaaaactgaacaattattttttccctccatagtccaaagggcagagttgtgggaggccgtccgggcttnnnagcaggggctata

SEQ ID NO: 467 - DNA, 1965 bp, Macaca Fascicularis
  misc_feature (1)...(1965): n = A,T,C or G
tttatcaaaacaacactaaggaattatttaaagtgagtaagaagatgtattaaatgtgttagattctgaaagcaaaagttgagaggaatgagagagacagaacagcaaagaaacataaaatcccagtgggaggttttggactaagtaagggactacaactaaagccaatttgcagaaattatgaactatatgactttatcaagaaattacagaaacccacatgtctgtggattatcaaacaaattacttcacttgaatacatatttctctgcctattttatagattccatattctcctccttcttggagttggtaactccatcttctgtaactgatgaaatcaaattgaaaaaggccccttgtggatattccttcttgccagaattgatctaaatctgtcctaggcaataagcctcttccttgacaaacagtctgccttgattaacttcacaagttagttcccttagagcactcacccatctgtaaaacaggaaatcctcctccccaccaccccagattaccagtctgtagggcatttcttcaaaacccaatacctgctttctttttggcaaatttgacgggagtcaagtattcattttacttaattattccactgccagttgccgttatgcctaaaactcaaagatgaagcacttacaagcaacataagcctgtttgcaggtttcacttatctatcatttctaacctttgattcaagacaggaagcacactggccaagtgtattgccatgatgtagagcctagaggattaataattcttggcagtttgtgtcaaatatccctgctaaaattggaggtaatgagaagttcctaaagacagatgagatctcaactttaaaggtattgccccaaacttagattacagaacattttccctttgctctgtggttaactcctagtaccatcaaaagcagcctggggtcttacagaacaggaacctgtcatctcatcaccccgtcattcagagtagactgcccttgtttttctctacagattgtacatgcttttattgttgcatttaacaaaccaaaaagaaagaatttgcttacagtacttttttgcctattagtctcataaattgtgtgaaggcagagataccatcttgttcatcttttaccttcagcactgaacacactatttggagttcttaagaaacacttaagaaatactggggcccaggtgagaagagaaaacagagaacaagtaaagggacataggccaattccaaggtggtccccagacaactattataatcatggatgttgagattgtggaatggaaaaaggcagtcatagctttatattatgggctgataattagagttctggatcttgctggtttgaagcaccactgaccagcgatcagttagatagcctgaatgccttttacctctggttccttgtctaatcatctcccctgcatcatcccagcttgccttccactggatgctgacttttgtagcaataattaatgtggctgagtttctgtcatgctttcctgcccaatttatacgcttctagcagagctgattggccaacttcaggtttcccgattacttccttatcaaagcccagcttttgctaacctgcaaaaaatggtatcgggcnnnnnnnnnnnnnnnnnnnnnnnnnnnnnnnnnnnnnnnnnnnnnnnnnnnnnnnnnnnnnnnnnnnnnnnnnnnnnnnnnnnnnnnnnnnnnnnnnnnnnnnnnnnnnnnnnnnnnnnnnnnnnnnnnnnnnnnnnnnnnnnnnnnnnnnnnnnnnnnnnnnnnnnnnnnnnnnnnnnnnnnnnnnnnnnnnnnnnnnnnnnnnnnnnnnnnnnnnnnnnnnnnnnnnnnnnnnnnnnnnnnnnnnnnnnnnnnnnnnnnnnagtgaaaccccataaaaaaaaaaaaaagaaagaacgaaagaaagaacgaaagaaagaaagaaaaaaaaaaaaaaaa

SEQ ID NO: 468 - DNA, 748 bp, Macaca Fascicularis
  misc_feature (1)...(748): n = A,T,C or G
ttttctggggctttatattcagtattaattatttaaattagcatcctatttcattacagatttaactgcttaaaaaacacaacaggctttgtattccaataagcttctccacaatactacatatatataattagagaatgctacaacagatcaattgaaaatgtttctattaacaggttttcatttaaccaaagtaacactttgtctgttgttattgttgttgtttttaacttaaaacctagggatgcgtccttgatggcaatgagaaggcgcattgaaggtttgactccagaggaaatccgaaatctttccaaagaagaaatgcacatgcctacaactatggaggattttgagatggctttaaaaaaggtttctaagtcagtgtctgctgcagacattgaaagatatgagaaatggatatttgagtttggatcatgctaaattctcacatgtaaattgtgagaaatgtgccttaagtgtttgaatattaaatgcagtaattcattgcactgagtgctatattttttttaactttcataatggtaagattttttttaaacccttatgattctgaataaaggcaatatttttaagctgaaaatttgttttactttagcattactagatttctatttcactgaccacaaatgttacaacagaaatgttacctagcttggaaagctgtcttttcttttttatctttgctttttctatttttttcaagactgtgnnnnnnnccactgaactg

SEQ ID NO: 469 - DNA, 760 bp, Macaca Fascicularis
  misc_feature (1)...(760): n = A,T,C or G
gaaaccaagcannnnnncgcagctgnnncagangncgagggccactggcacttgtcaaggtgatgtcatnntttcccaccggttcttcctgtnnatattcaatgaatccctcaatctctctggagctagtgtggctgggttgttattcttgtggctccatcgaggagaatccaccagagtaaagtaggcatctattgtctgtctgcccacccagcacacacgcccttacaccactacccacgtacacatttctaggaaataccccttgggattccaacgcaagctgacaagnnnnnnnnnnnnaatacacccattctctgggatagagagaaannnnnnnnnnnnnnnnnnnnnnnnnnnnnnnnnnnnnnnnnnnnnnnnnnnnnnnnnnnnnaactgggagcttggagccaaagccctcatgccctttaatagccacagaccatgaggatttgtcataaactgattttcacccttaatggaaccaaaagttagtgacgtgctgggcnnnnnnnnnnnnnnnnnnnnnnnnnnnnnnnnnnnaggctgaggcaggtggatcacctgaggtcaggagttcaagcccagcctggccaacatgacgaaactgctgtgtctactnnnnnnnnnnnnnnnnnnnnnnnnnnnnnnnnnnnnnnnnnnnnnnnnnnnnnnnnnnnnnnnnnnnnnnnnnnnnnnnnnnnnnnnnnnnnnnnnnnnnnnnnnnnnnnnnnnnnnnnnnnnttgtgccatctgtgtc

SEQ ID NO: 470 - DNA, 158 bp, Macaca Fascicularis
agacccacgatagaccagttgtagctcattccagcctgtaccatggatgaggggtagcctcccactgcatcccatcctgaatatcgttggcaactccccaagagtgtttatataagtgttaatacttttaagagaaatgggaggattaattgtggatc

SEQ ID NO: 471 - DNA, 627 bp, Macaca Fascicularis
  misc_feature (1)...(627): n = A,T,C or G
ttacttttacnntctgagtatgtgtnnnnngatnnnngtgacagtgaagatggtanntccnngatgatcttcgattctctgtgctctgtaactttgtacagtttacccatgatgactttccttnnntggcatcctcctcacgctggagtttatttcnnatcttaactgnnnnctaccacaaaatgtggtannncatgctttgctgcttttgtgcctcttacatgcgcctattgtcattgccatgtgaggaaaacggattggggggcggggttggtgattaatttaaaaaaaaagaaaaaaaaaaacctttaaaaaatttgaagacttaatttttttgtcataggaatacataacacctacagtataagttaatcaatttcaagctactgtatagaaatacaacactagcatgcacaatattgtatcaatagagtaatggaggagtaatcgtttcactggagagacagtatcataggcaagtgcatttctttaaaaataaagaaaagaaaaaccattcaaagctgcttaaatatcaagtctcccattccctctccgtttttagccctcaggtgtgatttttatcttgcattattctaaaaagcagccagnnccaaagctgaaatttaa

SEQ ID NO: 472 - DNA, 666 bp, Macaca Fascicularis
  misc_feature (1)...(666): n = A,T,C or G
tggccaaggcctggctgaatgacatcggcctgtcccagtactcccaggccttccagaaccacctggttgatgggcggatgctgaattccnnnnnnnnnnnnnnnctggagaagcacctgaacgtgtccaannnnnnnnnnnnnnncagcatcctgctggggatcgagctgctgtaccaagtgaacttcagcagggaggtgaggaccggggcgcggggcaggnnnnnnnnnnnnnnnntgcccctccccccttggcatctactgtctgttcatctgtccacccaccacccatctatccatctgtccacccatccacccatcatccagccatccagggtctattgatcatctgtccatccatctacctatccatnnnnnnnnnnnnnnnnnnnnnnnnnnnnnnnnnnnnnnnnnnnnnnnnnnnnnnnnnnnnnnnnnnnnnnnnnnnnnnnnnnnnnnnnnnnnnnnnnnnnnnnncaacaaccccctattgggcatgggccaggcactgtgctcagtgcaggggaaatgggagccctcatccttggagannnnnnnnnnnnnnnnnnnnnnnnnnnnnnnnnnnnnnnnnnnnnnnnnnnnnnnnnnnnnnnnnnnnnngggaagcccagggctttatgaataccctaggaaagatacacatact

SEQ ID NO: 473 - DNA, 2165 bp, Macaca Fascicularis
acaccatctccagagtcgttggtggctacccatgctaagtcattagtcctctttgtttactgctggctggcagatcttgaaaatgagccaagaaaaaaatgaaatgtttgaaagtgagtggtcaaaagagagagagagagagaagcagttggcatctggtcttgacactgcagagaaggccttgaaagctgaaagtgaggaattgcaaaaatcaaagtcagagcttatatgcctttataatgaagttcacaatctcccaggggcatcagagagcagagaccattttttaatagcatgtgacctgttacgaagagagaattctgaattagaaacaaaggtcttgaagctttcacaagaatttgcacaattaaatcattttactctcagggggaaaactgcaccttctaatttaattacaagtgaaaatatctgtaaagatcctgagtctaatgaaccagttttggaaatagaaattcaaagcccaaaggaagagagagaggaactctgtcccaaattaggagaaagaaagcagaaggaaattccagaggggtcagtaaaggagggcagttttccaagagagggacagaaggaggagggctcacaacagaatcaagatatgaaagatgaagaaaaagaacagcggttgaccatgaagcctgaggaagttgtgaggcttagagaagagctgagccgtataaatcagagcctccttcagtctcagagctctggggatagttcagatgacagtggtgcccagtatccgtcatctggagataaactaaaatacaaccagcaaggggaagtacaacaacttcaccagaatttgcatcggctccagattctatgcaactcagctgaaaatgagcttcgatatgaacgagggaagaacttggacttaaagcaacataatagcttacttcaggaagaaaacattaagataaagattgagctaaagcatgcccaacagaagttattagagagtacaaagatgtgctcttcactcacggcagagtgtaagcagagtcagcagaaaatcaaggaactggagttggaagtacttaaacagactcagagcattaaatcacagaacaacctacaggaaaagctggctcaggagaaatctaaagttgctgatgcggaggaaaagattttggacctgcagcggaaattagaacatgctcataaagtctgtctcacagacacttgtatttcagagaagcagcagctagaggaaaagataaaagaagcaacagaaaatgaagctaaagtaaagcaacaatatcaagaagaacaacagaagaggaaactcctatatcagaacacagatgagttacacaggcaagtgagaacattacaagataaagaaaatctactggaaatgacctgttctcagcaacaatccagaattcagcaacaagaggccctacttaaacaactggaaaatgagaaaagaaaatatgatgaggatgtcaaaagcaaccaagaattgtcagagaagctgtctaagctacagcaagagaaggaagctctacgtgaggaatatttgcgattattgaagctgcttaatgtccatgtgagaaactataatgagaaacatcagcaacacaaaatcaagcttcaaaaagtcaagtatcgtttaacgaatgaagtagaactacgagataagagaattaacgaatttgaagatgaaattggaatcctgcaacataaaatagaaaaggaagaggggaaaacacacagacagacacagacaggggaagaatgcctcatgatgatgaagtcggagactggaatgatacagctacaagccaagaaatagcaagggttgctggcaaccacaagaagctaggagaaaggcatgcaacacaatctctcttggagcccccatgagtaattaaccctgacaacaatgagaaggcaatacaggaccagatcactgcccaaaatgatacccttcttctagaaaaaaggaaacttcaggagcaagtcatagagcaagaacagttgatccacagccatgtgtagtgatggataatttaaagaaaaaaagaatccttgtttcttggcttttgctcctagagttaagcttgctgcccagataacttgtgcattgctttatttagttgaaataaaatgagcattgaatttaaaaaaaaaaaaaaaaa

SEQ ID NO: 474 - DNA, 754 bp, Macaca Fascicularis
  misc_feature (1)...(754): n = A,T,C or G
aatttgaatgtacatnntgctgaggnnnnnnnnnnnnnnnnnnnnnnnnncatcccttctcctaccccccaactgcatgggaagtcacagtcctggttttgaaatgctcgggcagctcagccgcttgccctcaccctgcatgtcttgttactgggtctccctgtgtacttgtggcattatccacaaccatcatgtttcttaggtgccaaacatttacagaaacattttcatatatcttggggtcagagagagggacagatacagaaggaagtcatgcagttagtttctgcagttagtcgtgtgaggctaggtggtcgggcaggcctcaggctgtcggtgttgggtgggaaaagacccaagggcctgaaagggacggaaaggggagggtagcgggagggtagcaggtgagttcctagggctggaannnnnnnnnnnnnnnnnnnnnnnngccctgtctcaacacaaacccacagtcctcctgggtgcctaccaagcttggtttgtacaaaagcaaggtgggagtctatttttgtacatgagatacatcacactttcctgtgggccagtattgtgaagtgagtctgagttgtttacactgatgccttccctgcccaccacaaattgtgtacatagtcttcagatgataccacccctttccccggctcccaactaagagctggttctaggtctgtgttatatgtcttatttagcctttttatatatgacctttgatttctgttgtttgtattttagc

SEQ ID NO: 475 - DNA, 683 bp, Macaca Fascicularis
  misc_feature (1)...(683): n = A,T,C or G
tgcgctagtcacggtnnnnnnnnnnnnnnnnnnnnctcttagtgatcttagttttagtccctcatttcttgttagaaagacagnnnnnnnnnnnnnnnnnnnnnnnnnnnnnnnnnnnnnacgtgttgttggagaggagggggaaggaagggcggtccttggtccctcaagctgtggctaggatggatgttgaatgcacctttttctcggggttctgcacgcccttgcagtctggctcagacgctctgctggcccgatttgaaacgttgacaggaaagagacagaacnnnnnnnnnnnnnnnnagattgttcttagcggaggacggatgttttctggggcctatcagaaatagactttgaccttctaaatataaattttgaaacaagaggggagcaagggagactttctggggagcttctcaagggtgagaaggtggcctggcacattggagggaacgtctactgtgtgggaaggccggggtggggcctggcgggagatgaaaccagggacacgtgggcaggcctgggctgggagggagggtctggctctcctgccctgtgggaccctctgtttcagctgagccggggccttcagcctttcaattgcccagctccacacctttgcacaagactcccccttagctttgccaattcgtccagttccttctacctctgggagggaa

SEQ ID NO: 476 - DNA, 546 bp, Macaca Fascicularis
atggttcaggggaagggcctgactggcttcatcctggctatcattcttcttcaaggtagtttggcccaatcatttgaagaaaaccgcaagcttaacgtgtataaccaagaagatggttcagtacttctgacttgtcatgtgaaaaacacaaatatcacatggtttaaagaagggaagatgatagacatcctaactgcacataaaaataaatggaatctgggaagtaataccaaggaccctcgaggggtgtatcagtgtaaaggatcaaaggacaagtcaaaaacactccaagtgtattacagaatgtgtcagaactgcattgaactaaatgcagccaccatattgggctttgtctttgctgaaatcatcagcattttcttccttgctgttggggtctacttcattgctggacaggatggagttcgccagtcgagagcttcagacaagcagactctgttgcctaatgaccagctctaccagcccctcaaggatcgagaagatgaccagtacagtcaccttcaagggaaccagttgaggatgaattga

SEQ ID NO: 477 - DNA, 763 bp, Macaca Fascicularis
  misc_feature (1)...(763): n = A,T,C or G
ggggagaggaaacattaaaaattattactgtttntnnngctgggatgaattacttggttgcagggtagcatcagacagctgtcannnnnnnnnntttatgtatacacaaatcaaatcatataactacaacaagattacaaaagccgatcactcatgtaatgcagtnnnnnnnnnnnnnnnnnnntaagtatgcaagtgattaaaaactttgtgattaattgttctgcaaattggcaagtaggacactaagtaatgactttatttactaatattatttattgagaaaatgaaagggggaaattatatttctaagtggtaggctatttattgaaagttnnnnnnnnnnnnnnnntttgagggtatgtgtaatgtctgtatgtggccctcactaacgtatacttatgaaatacttcagaaatgttcatttatttgtacagnnnnnnnnnnnnnnnnnnnnnnnnnnnnnnnnnnnnnnnnnnnnnnnnnnatatgcaattatagatgtgctttgttctgcccattatgctacagaaagtagttctgtgtttagtatgtacctacttgaaagtatcttccttatatttttgtagaaggtgcttcatttgagtactacagaaataattatatatttaagtactnnnnnnnnnnnnnnnnnnnnnnnnnnnnatgnnnnnnnnnnnnnnnnnnnnnnnnnnnnnnnnnnnnnnnnnnnnnnnnnnnnnnnnnnnnnnnnnnntgagacccgcctgggcaacatggcgag

SEQ ID NO: 478 - DNA, 1940 bp, Macaca Fascicularis
  misc_feature (1)...(1940): n = A,T,C or G
ttattaacaacatttaagatgctctctgggtgataagcttatgccatgggacctgctacaaaacaaaatgcccaccagaaccatcttgagaagtttctattggctaaagccaaaatttcagagccagcagtaactaagaaaaaaacctttttaatgggatattgctcatgtcatttttcccctaattctagaacagatttttaattccaacaatgaaaatagtgctgaacatttggccaagaagttggtgctgactataatatataatatcagtacctcctggcttcatttgacagtaatgcagtgaggacttccagagcacatctcttccatctccctgactgtgaggctacatctgttttcaatagtgcacaatttccgttgctctattgacagataacagataagatatgtcctaggagaccacagctactatctggaaccagaatttttattttaagggtaaatctccagcatcatcaatccattactacttcatcagcaaaaattgggtggtaaccttacttaatggtagatctcaatttcatctctatttttgtatcttatactttgtaagattagataactcttgtattaacaagattagaaagatgcatgacattgaaaataatcatttattttttaaatcatgtagttttgttcaaagcaatgctaatgattaaagctccaggtttccctaaatagttccataaagattagatgacttctattttctgaatacattttgttctgtcccacatagagggtgaattcagtgtgttttatgtttacttggggaatgcaaagagagatatatgccttagagcaggcaaataaagtcgttaagaggctgtggttttggccgggtgcagtggctcacacctgtaaccccaacactttgggaggctgaggtgggcggatcacctgaggtcgggagtttgagaccagccatgaccnnnnnnnnnnnnnnnnnnnnnnnnnnnnnnnnnnnnnnnnnnnnnnnnnnnnnnnnnnnnnnnnnnnnnnnnnnnnnnnnnnnnnnnnnnnnnnnnnnnnnnnnnnnnnnnnnnnnnnnnnnnnnnnnnnnnnnnnnnnnnnnnnnnnnnnnnnnnnnnnnnnnnnnnnagagcaaaactctgtctcaaacaaaaaaaaaaaaaaaaaaaagaggctgtggtttcaagttaggttgcctgcatttcagtcccagtacctcatactacctgtattactgtgggcgagttagttaacctcgctcagccttttacccctgatctttaaaatgggtatatttgcatccattgaggtacagataaatatatggcataataccaatggaaaagccataggcaaaaaatggaccttgacatacaattataaaacatctaggaaaaaaattagaaaatcttcaacacggaacactaggagtgttcactaagttcactaagttcttcactattacaggagttcttagacttgctacctaaaactgatccataaaaggaaaatttgatgaagtttaacctcatcaaaattaaaaacttttgctctgtcaaaaaccatttttagggagtgaaagtacacattaaagaagggggaaaatatttgcagaccacatatctgacaaaggacttatatctagaatatacaaggaactcacaaaatgtaacattaaagaagcaaacaatccaattagaaaatggaaaaatacatacacaaacatttcactgaagagatacacaaatggcaaataagcacacgaaaagatgttcaacattataagccattacagaaattcatgctaatactacaataaagttgatcacctgtaaccccagctattcagtaggctgaggtgggagcattacttgagcccaggagttcaagaccagcctgggcaacatagtgagatgctgtctttacaaaaaaaaaaaaaaaaa

SEQ ID NO: 479 - DNA, 733 bp, Macaca Fascicularis
  misc_feature (1)...(733): n = A,T,C or G
gaaaattgnnnnnagctgcgtatgagacataagcgcggtcagctctgggagaaggttggtcttaaggaaaagcagggacctgtggtttaggaaatgcaaatgggactggcttgtgctctacctggnnnnnnnnnnnnnnnnnnnnnnnnnnnnnnnnnngaaaagcctggagaattgggccatactcgacnnnnnnnnnnnnnnnnnncagatgaatcacaggcacataatcggcacagaacttccatgaggcctcnnnnnnnnnnnnnnnnnnnnnnnaggnnnnnnnnnnnnnnnnnnnnagaaagagggaattgaacccagagagaaagagtctatagtcatcaagttgtgtccatgccagcctccctnnnnnnnnnnnnnnnnnnnnnnnnnnnnnntgatccacctccatggcacccgccgggtaggtgcttcataaagctttaccgcgttaaatgtgaacaaggcctaccactttgccttgggcagctgcaccaaattnnnnnnnnnnnnnnnnnnnnnnnnnnnnnnnnnnnnagtgggtcatcctttacccctgtggcgccttactacagctctcctnnnnnnnnnnnnnnnnnnnnnnnnnnnnnnnnnnnnnnnnnnnnnnnnnnncctctgttcaatctttagcaagttgcattgtaacattgtaactatttgtttctccttggatggtgagctgcccccaagaaggggtnnnnnnnnatgg

SEQ ID NO: 480 - DNA, 685 bp, Macaca Fascicularis
agggcattatatctatgatgaaagatgctgtggattcaattctttcagtcaagaataaacgcagactttgtaggttcctgctgaataaacagcaaatcccagaaacccagattttggaagaatcagcaacccccaccataaaataaacccctatcaaaatgtcagaggacatggcaaagtaaacttagcattttcaactttagaaccgtgtcagcttcagggggactgctttcaaatcagccaaagagcctgtcagatctagaaggaagaggttggtagttccctgctctgttttgaacatgctttagttcattaacctgggggcattcccattgctgtcttaagtaagtctcatagccagctcccgtcatgtgaattcattttcgggccagctctgaacaaagcatcatgaacatgtgtgcctttggttgtttgcaatgtgatggtggtagaggtagctactggtttccttggaaagaatgataagaaagattcctatggccaacacgtgtgtatgaacaaaaaactgattggagcatcagctgttaatgaaggtccttgctttatgtcagaggcaacggaacccaagtctccaagtcctcagccttgagtgtactgctgacaactaaattcacaggctgcaaagcagacctctgatgaagacgcctgtcatttcatatcactg

SEQ ID NO: 481 - DNA, 749 bp, Macaca Fascicularis
  misc_feature (1)...(749): n = A,T,C or G
tcagtgtgtcacagcgcatggccntngaatgtggcagagccacagccacagccnnnctgatnnnaggacaggctcatgtnnncagcgacccactggcgaccgactnnncagactctctgtccctcaggagcagccgtgtcctctcccaggccccgggacactgctggagactgtgggacgtacaggcataagtgatgtgtgtgtttctgcttctgttttaaaaannnnnnnnnnnnnnnnnnnnnnnnnnnnnnnnnnnnnnnnnnnnnnnnnnnnncagatgctcccaaannnnnnnnnnnnnnnnnnnnnnnnnnnnnnnnnnnnnnnnnnnnnnnnncctgccttgcctgtccccaccccnnnnnnnnnnnnnnnnnnnnccagccatgcctcctcctcctgccgcctccttttctagatggggaggggattccgtcacaagaagagccacccccatggccgtgtacaggaagccctgggtcgctttgccgagatcagccctgggagaatccccttctctagctnnnnnnntgccgtgtggccagaaggttgcggacacaactcacctgcttcttgaggtggtttatgttttgaataggatgctccnnnnnnnnnnnnnnnnnnnnnnnttcatctccacatacatgtaaacgccaagactgaatgcgaggggtgttggcnnnnnnnnnngagtctgagcagatccatctggaatgttcggggtgtgctgtctggatgtgacgtgc

SEQ ID NO: 482 - DNA, 767 bp, Macaca Fascicularis
  misc_feature (1)...(767): n = A,T,C or G
aacatagtatacattactaaaaggtaaattatgggaatcactgaaatattnttgtagattaatcgtaacattgtctttctttttttcttttgtttcatgattttgatttttaaaattattagcacacaactattttcagccctttaataatggagcatcaaaaacatcacctgtatccccaagcaaatacagaagactgtattttttactatgatatccattttccagaattgtgattacaatatgcaaagagtcataaatatgccatttacaataaggaggaggcaaggcaaatgcatagatgtacaaatatatgtacaacagattttgctttttatttatttataatgtaattttatagaataattctgggatttgagaggatctaaaactatttttctgtataaatattatttgccaaaagtttgtttatattcagaagtctgactatgatgaataaatcttaaatgctttgtttaattaaaaaacaaaaatcaccaatatccaagacatgaagatatcaattcaacaaatactgtagttaagagactaactctccacttgtatgggaactacatttcactcttggttttcaggatataacagcacttccccgaaatattctttcagccataccactggtacacatttctactaaatctttctgtaacacttaaagaattccttcattcattacctcacagtgtaaacagaagtctaatttgtatcaatactatgttttggttgtaatattcagttcactcacc

SEQ ID NO: 483 - DNA, 914 bp, Macaca Fascicularis
  misc_feature (1)...(914): n = A,T,C or G
cgccgaaagcgaagaaggaagctcctgcccctcctaaagccgaagccaaagcgaaggctttaaaggccaagaaggcagtgttgaaaggtgtccacagccacaaaaaaaagaagatccgcacgtcacccaccttccggcggcccaagacactgcgactccggaggcagcccaaatatcctcggaagagcgcccccaggagaaacaagcttgaccactatgctatcatcaagtttccgctgactactgagtctgccatgaagaagatagaagacaacaacacacttgtgttcattgtggatgttaaagccaacaagcaccagattaaacaggctgtgaagaagctctatgacattgatgtggccaaggtcaacaccctgattcggcctgatggagagaaaaaggcgtatgttcgactggctcctgattacgacgctttggatgttgccaacaaaattgggatcatctaaactgagtccagctgcctaattctaaatatatatatatatatcttttcaacatatacgtgcctctctgtcaatttctggttgggccacacacagtgcactgacataacagggcttgggcaagactcctgttctactcatccttttgaaatattcaccctgccactctaccatgtgtgatcactccagagatctttctgactagagttagtgtcctaggaaaaccggaactcagaacttgcctccatggttgagggtaacaagaagcagtacaagaaccccttcttttatccctggaagaggctgtgtatgaaaccannngccctgggtttgaaggacattagcatccatttcaggggagtgtggattggctggctttctgatagcattttgtcctcacacacccatctactacgtccaaccggtctgtctgnnctctcacccctgccc

SEQ ID NO: 484 - DNA, 759 bp, Macaca Fascicularis
  misc_feature (1)...(759): n = A,T,C or G
tacatgagccaatgaaatantttgagctctacttaagcatgaaatctatattataaatctaaacaacaaaagcacttgtaacttgtttagtaaattccatgccttattttccatttttgacaccgtaaagtgcattttctgtcgactgtgagcaaatttcccttttgcctttaatgaaaatagtgcattaagtagccaattgctgcagaattataaagcaagttagctaacggtgggtcacattggactaccactcaaagaaacaagatgcataacagatggaaggtacatgtggtgtggcttagggagagcgcacctgtgccagatgcatgnnnnnnnnnnnnnnngccaaatgtgcctttaattaagaacatctctaatttttttcttcagatcaagtcagcatttgggggcgggatttgggcagggaactttggggtgnnnnnnnnnnnnnnnnncaccagagaatttggttgtcaaagtgacatgtataattttagttgagacgtgtttgtgtatatatgtgtatttgcctttgtttagtagcacggttatttgctaaaataattgtcaaaaaaattgctnnnnnnnnnnnnnnnnnnnnnnnnaacaaagtgtggtctatacatctaatatggcctttgtacctaaccatgttcataggtaatctttgtactctgtgtgcagcagtatttggtttgnnnnnnnnnnnnnnnnnnnnnntgttatttttctggcattactaagataaactgaaaa

SEQ ID NO: 485 - DNA, 745 bp, Macaca Fascicularis
  misc_feature (1)...(745): n = A,T,C or G
acgcnnnnnnnnnnnncatcaatgagtttgagggtggtannnnnnnnnnnnnnnnnnncttcagactcattcagcagntnnnacaggaaatttgggtctgtgagaagcagacaatcaccaannnnnnnnnnnnnnnnnnnnnnnnnnnnnnnnnnnnnnnnnnnnnnnnnnnngatgaggagccccagctcaccaagaggacccacaacgtgtgagccctctacctgggctcgggtcaggannnnnnnnnnggaacnnnnnnnnnntaccctgaccagccgctcaggacaggaccctggggcnnnnnnnnnnnnnnnnnnnnnnnnnnctcccccagcctctcccctgcccctcaacctgccttagctgcactctcttatctacagctggacagtacctgtctgtttcctgtcctccttccagttacgtctgtccatgtctggactcggctggccgttccctccagccccttgctggttacttnnnnnnnnnnnnnnnnnnnnnnnnnnnnnnnnnnnnnnnnnnnnnnnnncaagccctggatttggcccgcggnnnnnnnnnnnnnnnnnnnnnnnnnnnnnnnggtgatgttggaggagtacccccagcccaccgccccgattcctttttgcttctggtttggagctctggaccaggaccttcgtcctgnnnagtttttaaataattatttaacagtgtaacttttagacctgcggacatnnnnnagcgcccaataaagaaa

SEQ ID NO: 486 - DNA, 733 bp, Macaca Fascicularis
  misc_feature (1)...(733): n = A,T,C or G
cagacagtgtgtnnncnnnncagtataaagatcaagggnttccccatgaagccagnntgatctggtaatggnccnnntctatacccctctgaatgcttttccaaggaggcggcagttcccacccccacagttcccctgagggttaagagtccaggtggtggccgcgctgcaagatttggggcagccattttgccaaggatcagagattcgctgtcagagaggggaggtcagctctgtcccatcctgaaaaaatcatcttagaaagacaggtggacttcatcagatttgttagtccttccttgttttaaagagaaaaatgatctctgccttgcttcagataggatatggctattttttttcctcctttttctaatgtagcagtgatggaaaacaccagtctttgaagaacaaattgtggttcccagtgacatgaatccattgtatttgattttggattgtattttttaacccctttttatggcatagaattctggtgccttgctccctgggtttgtctctgtgctacgagtaggctttcttcacattctggcttacaggggaacacaactattccacaagtggcctttagtgctctttataatatgatttcctgtaatttttaaactgtatgtgtaatttatattctggctctgtccaatatttgaacaactttaataggttgatttccatatatattatgcaaataattcttacctgattttttatgttctat

SEQ ID NO: 487 - DNA, 739 bp, Macaca Fascicularis
  misc_feature (1)...(739): n = A,T,C or G
tacaaacactttataaaaaactaatgattgatgttagaacatgancnnncacaatgctgcttgacccctgaaactgacattcatgagcataacctttgttacatcgttctttttgatgtaatttgtagaaatgttttttagttcataatggaaaatgtatgtaccctgaaaaattacttattttgtttaactttggtataaaggtgttgggcattttcttggggagggggggattacaaaagaagtttgtctcccacatcaaaaaacgttcaaagaaattaagtatttattatattttttgcagatgtttccatacaattcacataacctttttgtaaagagagatgaagaaatggattaaagatttttaatatttgaaatggtaaatagaactaatttatttgtaatatatttctgttatttatagatgtttccttaatgttttactgtgcattaccactttcatttaagccttatccttgtgaatttaccatttcttttttaaaacatgtctannnnnnnnnnnnnnnnnnnnnnnnnntaaatcactagcatatctgaattcccaaatgtaatttttaaaaattattttggtttggaaaaaannnnnnnnnnnnnnnnnnnnnnnnnnnaggggtggggaacatttttatggctttatgaattggaatttcataggcttatttacctagattgtgtgtgaacaaaaaaaattgtaaatagatgaatgtttcccata

SEQ ID NO: 488 - DNA, 798 bp, Macaca Fascicularis
  misc_feature (1)...(798): n = A,T,C or G
tgaccaatttcattctttacatagataaatataaggtagnnnnnntgtaataaatgaagccataagggtagagtcccacagatcacagaactgacccagcatccagctctgctcacgatttcannnnnnnnnnnnnnnnnnnnnnnnnnnnnnnnnnnnnnnnngaccctcgtggccccactgtccttcctgcctcacagggtctctgaggggtnnnnnnnnnnnnnnntcttgggctttgaagatcatttcactaaacnnnnnnnnnnnnnnnnnnnntgggcctgagcccagaaacttcacctgcgacagtggctccccaggagtgagcaccaggcactgtcaggggttctcgcccnnnnnnnnnnnnnnnncttgatgggttcttcttccttcaggagcaatcccagtgggcagaaggaggggatgggagacctggcaaatgctcctccccagctccgttccgagctccatggggcnnnnnnnnnnnnnnnntctcgtgcagatgagggattagggttcctcccctgcctcgctgctctcaggccctcatggcaccctccccacccccgtgcagccggcggaccctgctcccacccagctgttctnnnnnnnnnnnnnnnnnnnnnacgacaccctacctggagcgcccgttcctgtggcgcccccagtcctgcactgcagcattcaccctgtcacctccatggcgagaccatcctggaaccgtgatcagcccatcggtgtcatccactgtcctcctagcccattttctgtgcttgtttctcgtcccaaaacatc

SEQ ID NO: 489 - DNA, 1582 bp, Macaca Fascicularis
tactggatcgcgccagttcctcagcctgagtgctgtgaaggtgacagcctgaggtgacccagctggccccccgcgatgctggcagcacggcggctgctcggcgggtcgctcccctctcgggtatctgtgcgtttcagcggcgacacgacagcacccaagaaaacctcatttggctcgctgaaggatgaagaccggatcttcaccaacctgtacggccgccatgactggaggctgaaaggtgccctgagtcgaggtgactggtacaagacaaaagagatcctgctgaaggggcccgattggatcctgggtgagatcaagacatcgggtttgcggggccgtggaggcgctggcttccccactggcctcaagtggagcttcatgaataagccctcagatggcaggcccaagtatctggtggtgaacgcagacgagggggagccaggcacctgcaaggaccgggagatcatacgccatgatcctcacaagctggtggaaggctgcctggttgggggccgggccatgggtgcccgcgccgcctatatctacatccgaggggaattctacaatgaggcctccaatctgcaggtggccatccgagaggcctatgaggcaggtctgattggcaagaatgcctgtggatctggctatgattttgacgtgtttgtggtgcgcggggctggggcctacatctgtggagaggagacagcgctcatcgagtccatcgagggcaagcagggcaagccccgcctgaagccccccttccctgcagacgtgggagtgtttggctgccccacaactgtggccaacgtggagacagtggcagtgtcccccaccatctgccgccgtgggggcacctggtttgctggctttggcagagagcgcaactcaggcaccaaactattcaacatctctggccatgtcaaccacccttgcactgtggaggaggagatgtctgtgcccttgaaagaactgattgagaagcatgctgggggtgtcacgggcggctgggacaacctccttgctgtgattcctggtggctcgtctactccactgatccccaagtctgtgtgtgagacggtgctgatggacttcgacgcgctggtgcaggcacagacaggcttgggcacagctgcggtgatcgtcatggaccgctcgacggacatcgtgaaagccatcgcccgcctcattgagttctataagtacgagagctgtggccagtgcaccccatgccgcgagggtgtggactggatgaacaaggtgatggctcgtttcgtgaggggggacgcccggccggccgagattgactccctgtgggagatcagcaagcagatagaaggccacaccatttgtgctctgggtgacggggctgcctggcctgtgcagggtctgatccgccactttcggccggagcttgaggaacggatgcagcggtttgcccagcagcatcaggcccggcaggctgcctcttagcccaccaccctggcctgctgtcctgtgtctgtccgtctggaatgctggacaataaagcgagtgctgcccaaaaaaaaaaaaaaaaggccacatgtgctcgagctgcaggtcg

SEQ ID NO: 490 - DNA, 713 bp, Macaca Fascicularis
  misc_feature (1)...(713): n = A,T,C or G
agttatgtcacacatntgagctttaactttatttttggcaaaatcagagtaaaaatgaatacctctagttgttttgaggattaaatgagataatgtatgaaaagtgattgggattgggtggtgacttaattaacggtagtgtttttttttttagtagttaaagttaatatatagctttcacattgtcaannnnnnnnnnnnnnnccaagttaactgaattttaaattaatggttaataaatcacaaaggactcaagtcaattctnnnnnnnnnnnnnnnnnnnnnnnnnnnnnnnnnnnnnnnnnnnnnnnnnngaaagtcactgctgtagactggatgtttgtgccctcccctccaaatttttttatactgaagttctaaccctcaatgtgatggtattaggagatgataagtcatgagggtggagttccttggatgtaattagtgacnnnnnnnnagacagaagacagctcgctctccaatctctgcnnnnnnnnnnnnnnnnnnnnnnnnnnnnnnnnnnnnnnnnnnnnnnnnnnnnnnnnnnnnnnnnnnnnnnnnnnnnnnnnnnnnnnnnnnnnnnnnnnnnnnnnnnnnnnnnnnnnnnnnnnnnnnnnnnnnnnnnnnnnnnnnnnnnnnnnnnnnnnnnttaagaaaacaattaactgaaaacttggtattgttgtagtttatgtagtaaatgacttggcact

SEQ ID NO: 491 - DNA, 766 bp, Macaca Fascicularis
  misc_feature (1)...(766): n = A,T,C or G
gagggtgtagcgcagggcttgggatatcggcagtgtgggaaatgtgatgcatttctcatcatcatcatnnctgctacagtcatgtttctgcatgtcagcgagcgacactgtccgtgcctcaggttggaggttttatcagccaaagtgtttttttcatgtattgttcgttccattcatccactctgtgccttgtcagcctttgaaagtcttggttgctcccaggctgctgttctcagggaccttaaaagggacctggttagtcttggggcagagagtatcttcttgggcactctcttccaagaaagaccttgtctccattttcattagacaatgcttcttgtgtgtgttctggaagatcttctaaatggaatgcctgttgcactgttcccaggcgagtggctgccatgagacctgaggaccacacttgggggaccaatcatgtccttcaccactgtgccttagaatcgcccctggacaggcctcctgggcagaggggaaagcagctcccaggccttattcaggcctcaggtccatgggttgggcagccagtctgggcccttctcaggatcctcatctccatcctcatcctcttccttcacggcatttactcggagctctttgtgacacaccatgtcggtcatggtgaatcggccaacnnnnnnnnnnnnnnnnnnnnnnncacagtctaagatggggaactgtggtacagatagacatgaagagagcttagcagtgattgaggtggtgactaaatatacagtcataa

SEQ ID NO: 492 - DNA, 711 bp, Macaca Fascicularis
  misc_feature (1)...(711): n = A,T,C or G
cacnacgtttgccgtcattgaaaatttaaagtatcttttgtttacaagggatgcatcccaacccttctatctgggtcacactgttgtatnnnnnnnnnnnnnnnnnnnnnnnntggaaggagggattgtcttaagtacagagtcgatgaaaagacttaacagacttctcaataactctgagannnnnnnnnnnnnnnnnntgatttggaagttatctgaagatnnnnnnnnnnnnnnnnnnnnnnnnnnnnnnnnnnnnnnnnnnnnnnnnnnnnnnnnnnnnnnnnnnnnnnnnnnnnnnnnnnnnnnnnnnnnnnnnnngcttattgaagaggcattgtctaataaccctcagcaagtagtagaaggctgctgttcagatgtggctgttacttttaatggagtgaccccgcaaaagatggaagtaatgatgtatgnnnnnnnnnnnnnnngggcatttggacactatttcaatgacacactcgttttcttgcctcccgttggttcagaaaatgactgagggctggagaattatagacctgtgctgtccaagagcacttgaaatgtggctagtccaaattctgatacagtgtaagtgtaaaatacacacttcattcaataattcatatattatttgaaaacagtatgaagacataaaacatnnnnnnnnnnnnnnnnnntnnnnnnnnnnnnnctgaactaatgtttggg

SEQ ID NO: 493 - DNA, 1926 bp, Macaca Fascicularis
attgaacactggcaacaccccaaacattctacaaccaagctccttgaaaaagtctctattaactgctctttgcttcccatctctccagttctcagtacactgctaacttgctaaagacaattgattctcaatccttttacagcatgtacaaggttgactacttcctcaaatgctctcctgtcagcttttaaaacatctcctgctcctgattcttctttctcagtgactctttttcattggcttctcttcattcatctgccacttaagagttggtattccccgaaggttgtaccatggctcttttctcgctgaacatgttctacctgggccttcctaatcactgccatgctttagcgattccctgtgagtcagccaatgaaagatgagattggcttttgaagcacattaattctttaagacttctggtaaggtgacccagagaatgtcacattcagagttagccagtcttcccttggagaggacacacaagaagcaaggaggtgacaagcagtgattattttaatgctctcctccttactctatagggccatcccccccttcggaaatgtaaagcggggacataaagacggatctaccaatccataccagcatgctttccttttattggtgtgggtgtgccccttgaagagaccatcactgtgtcaagacaggccaacaccacttccatgactccactcccctgagaccttccactatactttctgtgtcatccagacatctgtagacagtcaaatggtggggtaggatattaatcactgtagtttaaagctaagtttctcccaaggctgaaatccagtccctgttctacttaccacctcagctcatagccagacactttgtcagaggaagttgtacaatgagcaccacacaaaaacaaaaacaaaaacaaacccaagtgaatggcagcaatagaaaatacctcagatgagcaacctgaacttatttctattgatttccataaagaaagtaaattctaaagaaattggaacttcaagtctttcctccttcagtgtcttatcctgcccagtctcagcccgagttgtgtcagaggctagacccacactgcccctaccaatcgtggacaatagtaaagttgtagtggcatgtgggagagggtggataaaacataaaatgaaaagaatcctgacttcaggttcatcaggaggcaaatcttaaactttggagcgtgtaggagtggaatctgcctatgcacacagctattccaatgccaactcccagtacctagagctgacatccaaaagccaaggcatcacacatatctgcatccacatggaattagttgagttgtggcagcagcagttgttcttatgtatgattatttttactaggtcaggagcaatttaaaacttaacagacttggatccaggccaaaatgttataaaagaaaaaagcaagtggtggtgacagaattattctacttcataactaaaaagcatagaatgcaaaagtagggagggccctgccctagccaaaattgcacataccttccctgctgcagctggtgaaggggctaactgcatgtgcttccctattgcaggcctttctggtgggtttacctcctgagaggaagaagtgagaagtacgctggctcctcttaattatataggacgcaggtggagaagcactcttgtgcatgtatagatcagttaaccccacttgtggtgcaataaatatgaaattctgaccattcagatcatctaccttgacttcctcaaataggaatacaggtgtagaaagaagggctcaaagtgttcatgacaaaactggctctcttctgggcttcttccctgtgggctgcttctagaacggcactctccagtaatgcaaatgcatatgcaattctatgttttctgacaaccacatttaaaaaaaaaaaaaaaaaaa

SEQ ID NO: 494 - DNA, 736 bp, Macaca Fascicularis
  misc_feature (1)...(736): n = A,T,C or G
caagaaatgaagagatgaccatagagaaacgtcgagatanctccagctctaaaatcnnngtctcaatgttgtttggcatatgtttcattggaatttagtgtctgagcatctgtctgttactgcagtatttaaaatgcatgtgctataatcatataatcataactgctgttnnnnnnnnnnnnnnnnnnnnnnnnnnnnnnnnaatgtaagattactaattgattctgcccaatctcctttcagattttattaagaaaaaaaataaacctcctgatcagagacaatgtattaatcagaagtgtaaactgccagttctacatagcatgaaatgaaaagacaactaatttggtccaacaaccatgtctgggtctagggcaccctggcttatttggctgatttcctaccagcctttgcctcttccttcagacagtggtttccatgggaatttgcttcagaaaagccaagtatgggctgtttcagaggtgcatacctgtgttttcttaggtcttctagaggggctacaagacttggaacaggttaggaagaatatgtggtagagctcttgnnnnnnnnnnnnnnnaggaggcatttttgtcagcgccatggtttattgttgggattattctttaaaatacccattgttcactacagtgaagatctctgatttgaccatgtattatccacatgcattacaaacatttcacagagctgcttactatataagtgtacaatgtat

SEQ ID NO: 495 - DNA, 728 bp, Macaca Fascicularis
  misc_feature (1)...(728): n = A,T,C or G
tgcagagacgcgagatgcccaggagcccagagannnngtgaggagcgagatcgttagctcttcagttcaggaagataaaggatcacaaagggggtggnnnnncagtcccacaccagctcatcaagtcncnncagccacannnnnnnnnnnnnnctcatctcactcagggcctgggccaagttccttagcatggttcgtcaggtccccagtcacctctgacagtcacctccacgctgccaccctccccactttgctccggccaccctggcctccctggacaggccccgcccactcctgcctccgggcctttgctctggcagttccttctgcctgcagtgcccttgctccagttgtccacgcggctgctccgttcactctgacaggcgttnnnnnnnnnnnnnnnnnnnnnnnnnnnccaccctggcccctnnnnnnnnnnnnnnnngcctcccctgccccatgctggcactccctcggtccccgccctgctctggttttaatttttctgagcacctgtctccttctaatgtgctatatgatttacttatatatgatgttccttgtcttctacccctgaaaatgaaagactatctcttgcacccagaaccggggctggcacttacaagtgctcaataaatgtttgtaatcccannnnnnnnnnnnnnnnnnnnnnnnnnnnnnnnnnnnnnnnnnnnnnnnnccnnnggaattgggagcagcctgggaac

SEQ ID NO: 496 - DNA, 3003 bp, Macaca Fascicularis
  misc_feature (1)...(3003): n = A,T,C or G
ggtcagatgccaaaagtttcaagcaatccttctttattctcacttccagagattcctggtcgttaacacctgagccttttgaggattatttggggttaattttgttggttctcagcattccctacttttactttttcgattcagcgtttccaggcctgccaagtcatccgtctgctttccagtttccaaagttgcattactgttgtctccttttccgttctccttgcccttacagctttatgtctttttaaaaatctctttattagtggggtttgagggagcaaagttggatgtgtgtatttattccactcattcactcttcagctcactcctgcctggtgttcttctcccgtggtttccccaactaatattgctcgagcaaaggtccccagtgacatctggcttgtaaaaagaatgtaccctttttcagtcttcatcctacagtgtcagcatttgacagagttaaacacttctttcttgaaatgtatgtaatcttgctttctttaaaaccattaaaaacatctttttgtgatataattcacatacaataaaagtttttattcacaaggatgtccaaccatcatcactaattccagagcattttcataaccccacaggaaaatctgtacacattagtagttacttcccatccctcactccccttgacccctggcacccactaatctaatttccattactatgggtgtgcctattctggacatgttatctaaatggaataatacaatatgtggtcatttgagattggcttctttcacttagaaaaatgtaaaactaatttttgctagttaaaaacatctccttggccaggcacagtggctcacacctgtaatcctagcactttgggaggccgaggtgggcggactgcctgagctcagnnnnnnnnnnnnnnnnnnnnnnnnnnnnnnnnnnnnnnnnnnnnnnnnnnnnnnnnnnnnnnnnnnnnnnnnnnnnnnnnnnnnnnnnnnnnnnnnnnnnnnnnnnnnnnnnnnnnnnnnnnnnnnnnnnnnnnnnnnnnnnnnnnnnnnnnnnnnnnnnnnnnnnnnnnnnnnnnnnnnnnnnnnnnnnnnnnnnnnnnnnnnnttccaaaaaataaaaaaaataaacaataaaaacatctcctctgcctgacttcttcctggcccaaatgctccagggctctgtgttaggttctcttcccttctctattactctccctttaggtgatcttattcacaccctaactttaaccacatgttccagtgactcctgtcttagtccatttgtgctgctgtaacaaaatcctggagactgggtaatttataaagaacagaaatttattgctcacagttctggaggctgaggagtccaagattaaggttctggcatgtttggtggccaactggcagaagggactgaaggacaaaaaaggggactgtttagttccctgaagctcttttataagagcactaatccactcataagagccctcatgagctaattaccttccagaggccgcgtctcttcatgctgttgcattggggattcagtttgaacatgaattttgaagaggacacaaatgttcagatagcagcaactcccaagtacatctctctcgcctcgacttgagctctagactcatacagtcacttgcttacttggcatcttcacctgtataactaacaggattctcaaactgattatgtccaaaatgtcaattttcctctaatccaaaacctaattctttagtgggtcccatttcagaaaatgatgctgctatccaccaattgctcaagtcaaaaacttaataaaatatcgaagtatgtatttatggatgtgattatttgttttattaatagttctggatccctgactagtctgtaagctccatgaaggacaggacagaccctatttggttctccattgtatatccagtgcttagaacactgcccaacatgtaataggcaagcaacaaatacttgttgaatgaatgaatacagaaaaaaaagagtaagacataatgcctgctcttgagttgcatccaattttcttagagaaatgagctgtccgggtgtattgttaacaaccaaaattacaaaattcagtgtcaaagtgttaaatagtaaggataatgctttgggagtttagaggcagaatgactggggaaaactacatgaagagtgtgaatatgagtaagttttagataggtgaagaacaagagggtaagagcatgcaaaggcactgaagcgaaacttgagttgtttagggggtagttgaggagaccactgcaacttcagaaaccgtttaggaaaacaagtctgtcactacgcttaatttgattaatggacctattgggaggtagactatgtagtagcgggaagaagtacaatactccagcaaatgggaagaactctgtagcaatcatactgatactccaaagaatcaggtattttgtatttaacgttttatttgtgcattggtataaacaaaactatattaagtgtcactgtaaattttgggcataaaaaatagaaattttcaaatctgattagaaaacttaatctgattttaaaaattaattttgtttacagctgaagagctcactcattatgcttcagaaaacatttgatctactaaataagaataagactggcatggctgttgaaagctagtgatctgaaggactaaaaccgcggagataattggaactaaaagaaaatacctggaagaaaactagacgaaggaaggattttggcatagaacatttctatgttttttcattattgagatttctaatatgaacatttctttcagtagcatttatttgataattagtttctgctggccttaagaatccatctttcacttcttatagatatttttaagctgtgagtttcttcagtgaaccatgaagtatattggagaactgaatttctctgataaaaaaagaaagtgacacaccctgaacggaaaaaaaaaaaaaaaaaaaaaaaaaaaaaaaaaaaa

SEQ ID NO: 497 - DNA, 727 bp, Macaca Fascicularis
  misc_feature (1)...(727): n = A,T,C or G
tttttttgcttttgtagaagagattgagaatggtactctaatcaaaaataaagttttgtagtgggaccagaaattacttacctaacatccacccccatttcccctcatcctgctggggttgaaggnnnnnnnnnnnnnnnnnaggccttgtgtttgtcagacacccggcatcctcctgcaaggacgcaactgtgagctgaggtgtgagcctaggagcccaggaccccgacccnnnnnnnnnnnnnnnncctcagaaagnnnnnnnnnnnngcagggnnnnnnnnnnngcccggcggcccccaggaatcacagatagggctaaggttttcaccttaactgtgaaggcaggaggagtaggtggctgcctcccgtccttcacagaactgattctcactctctgtcccttcagtccagggggccagggctcaggagccatgacctggtgtctcctgcccaccttggtcccaggtaaatgtgaatggagacagggatgagagcccgtcctagtctttgattccccccaaccccacctcgggcctcacgacggtgctacctaagaaagtcttccctcccatccccgccagcctggtcagtggtcagcaaattggaagaggatccgnnnnnnnnnnnnnnnngagacacaatgtcgattatacctatttgtggtttagctttgtatttaaacaaggaaataaacttgaaaannnntatttgtcatcataaaaat

SEQ ID NO: 498 - DNA, 716 bp, Macaca Fascicularis
  misc_feature (1)...(716): n = A,T,C or G
atgggccctggcggctgcactggaacgccggaaatctaccctggcctcaaggctggagaggcagggagtggagctcaaggctgcggaggtggaggtggagctgagtgcaaggcgacttcgggcatggggggcccgggcgcaggcccaaggccacaccctgcaggtagcggggctgagaggccctgtgctgcgcctgcgggagccgctgggtgtgctggctgtggtgtgtccggacgagtggcccctgcttgccttcgtgtccctgctggctcccgccctggcctacggcaacactgtggtcatggtgcccagcgcggcctgtcccctgctggccctggaggtctgccaggacnnnnnnnnnnnnnnnccagcaggcctggccaacgtggtgacaggagaccgggaccatctgacccgctgcctggccttgcaccaggacgtccaggccatgtggtatttcggatccgcccagggttcccagtttgtggagtgggcctcagcaggaaacctcaaaccggtgtgggtgaacaggggctgcctgcgggcctgggaccaggaggccgagggggcaggcccggagctggggctgcgatcggcgcggaccaaggccctgtggctgcctatgggggactgatgcctgagcgccacctgctgcattttggacacctcagaccaaggggaaatgcacccccgcagacacctgggacttccccttc

SEQ ID NO: 499 - DNA, 715 bp, Macaca Fascicularis
cagcaggcatgcaagaattttacccgtgaaccagaaaaaggagctaattataaccacctttttaatggagctaatttgactgaatggatgcaaatgtgctttatttatggatgaagaagcaagccttactgcatgatcttgggatcatcggatctgctaagctttgcagctcctgttaccttcagtacattttttatttccggagaaggtatttatatgtaaacaacagctaaccatgcaaaagattcatcggaacaatatactgtggtatatgagatataatcataattttgcagcctctcaggatttcctctaacttggagattttgcaacctttgtgtgcaatgggttatggtaaacaataaatgaatgatgctaaagtgttgtgatttttcaatgtgtagtttattaattttagctttcttaacatgttgattctgaattatttgcaataaatccatatgaaagaaagggaattgctgggtggggttttttaatgcatttgcagtcttcttagagatcggaatgtgtaggtcccaccagcccatgagctctgtaattataaaagaatggtaaaaaatttgacaatttgaagaattggttttataatgggaacaatgtgttataatcagtaaaaggagacttgttatgttttctgtctgtgtagaatgttcttgagtggttaactcctctgttgctgatgagaagtaaatac

SEQ ID NO: 500 - DNA, 727 bp, Macaca Fascicularis
  misc_feature (1)...(727): n = A,T,C or G
tagctgtggagcagtgcgtgatgaccagtnnnctgctgggagagattatttccattctttcctgctgaatatttttcctgttagtgtttatactgagctannnnnnnnnnnnnnnnnnnnnnnnnaaatttaaatnnnnnnntttcctcacaatttgcacatttacattttttggactgctagtttttctatttaaatatttgccttcatgttaggaatgtactatgtgaacatgacatatttgtagttaaccaaacacaccttcttagtccagtttagtacgttttcttttcgtgtattcaaagttaaacacccacaacatttaaggatatgttgaaactacaccaatagagcatttcataccataattaaaatgaatgttaggcttcttgtggccagttaatagttgatgagattggtgatattatttattgccacagcctattgtataaactatgcagagttaaatatttgcttgtaaaatattagccaatgttgtcattactttgatgtatttccttggttatgaccaaaaatatgttgatatactgaaactaatgtctgtgtgtttaaatnnnnnnnnnnnnnnngtcttatgttaatgagaatgtttnnnnnnnnnnnnnnnnnnnnnnnnnnnnatggcataaaagtaactttctctgaagatgatgtgatgttcaggttgtgaaatatgtatgtaaaagaaaaataaatgttatttgtt

SEQ ID NO: 501 - DNA, 758 bp, Macaca Fascicularis
  misc_feature (1)...(758): n = A,T,C or G
gaggatggtcataagatttgcctttcggtattcctgtctggcaaaatggagggggtgatattagcggttccctgtactatatcacagccaagagagattagagagagaaaatgtagatcaaggtgagctgcctacaaattactctgtctccaaagacaacatgaaaagaaatgatggggaagaaaaaaacccacagatttaattcgcactttgactctcacttaattgaactattttctttcctagattggcttttcttactcttttctgttagtagatttatttacaaacatcgcaagaagatttcttgggacaagaattatataatacgtctttgaagtaaattgctaaaatatcctattttaatttgaatagtgaagttttgaaaatactttgaaaaagagaagtaaaagtttaactttttaactaaagttagtatttgtttnnnnnnnnnnnnnnctgaagattcattctgattatacaatatgatttttatgcannnnnnnnnnnnnnnnnnnnnnnnnnnnnnnnnnnnnnnnnnnnnnnnnnnnnnnnnnnnnnnnnnnnnnnnnnnnnnnnntgtgtgtgtttattcttaaatgttatgttttgtaattggatcacatatttctactttcagtgagagtatgccttcactatgttaaaaaataagctcataaaacagggtactttttattcaaatgcttatcattgtacttgcattgctttgaaagagtaaagtaagtatactcaaaaca

SEQ ID NO: 502 - DNA, 565 bp, Macaca Fascicularis
  misc_feature (1)...(565): n = A,T,C or G
ggaatacagnnnnnagagccaggcaggagcgggcagccccacagggcccaggttcaagtgcgagnnnnnnnnnnnnnnnncttggaagcgcctccgttgttctgtcctggatgtttgagtccttggccagcttcctggnnaatggcctcatcccactgagacagacagatgtgcacagctgggggaggggcttggtgaaatccaaccccgcccagcacaggcctgggcttcccggggctggaacttatctggattctggtccagatctctgccttggccctgttgtgcagccctgggcagtgctgtggcttccccttgggcctcagttttcttgtctctcaaataggggaagctcttcattctttcatcagacattgactgcggtggtccatcgttggcccactgactctagtatttgggggtgcattatctggttgtaggatacttctgcccctctattttaaaatttgtctcaaaaaattatggtagaatggtctgggcgcggtggctcatgcctgcgatcccggcactttgggaggccgaggcgggcagatctcgaggtcag

SEQ ID NO: 503 - DNA, 3080 bp, Macaca Fascicularis
actctcccttcgccgctcgctccgagagcgcctgtcccgccccgcggggcgacttctctctttcggccctgaggttcaggatcctgggtggggcagctgcgcctccgggacagccctagccgcagagcgcccagacctgggccgccggagtccgttcagaagtccacgcagccggcgccgccgcacctgagccccggctccggtcacgccgctgcgccggaagcgcgggcggagcgcacgggccgggggagagtagcctgcgcccacgagggggacccaagtccccagggtggtggccgagtcccgcctcccgccagcaggggcgaggacctgcgacgcgcacccctctgcccacgcaccctgcccggccgggtctcctcagcaccagcgccacgcacacccgacttcctcagcttctagtcctcaccctgccaacttccctgccaggaggaacctgccgccagcctgctttctcgcccgcaggccctgcgctgaacgccgccgcgcccagggttcaccttacgccgtcgggaaagcccatgaactctgcagaaacagcgtaagggagggtcccgccgcaacgcacgactggggcccctgggttccccctgggtggagcagctgcagcagaaccgggaaagtggtggaggatgatcttgcggccgaaggggacctcgacgcagtaatgtcaacatgatgtttcgctcagatcgaatgtggagctgccattggaaatggaagcccagtcctctcctgttcttatttgctttatatatcatgtgtgttcctcactcagtgtggggatgtgccaactgccgagtggttttgtccaacccttctgggacctttacttctccatgctaccctaacgactacccgaacagccaggcttgcatgtggacgctccgagcccccactggttatatcattcagataacatttaacgacttcgacattgaagaagctcccaattgcatttatgactcattatcccttgataatggagagagccagactaaattttgtggagcaactgccaaaggcctatcatttaactcaagtgcgaatgagatgcatgtgtccttttcaagtgactttagcatccagaagaaaggtttcaatgccagctacatcagagttgctgtgtccttaaggaatcaaaaggtcattttaccccagacatcagatgcttaccaggtatctgttgcaaaaagcgtctccattccagagctcagtgctttcacactctgctttgaggcgaccaaagttggccatgaagacaatgattggatagctttctcctactcaaatgcatccttcacacaattgctcagttttggaaaggccaagagtggctactttctatccatttctgattcaaaatgtttgctgaacaatgcattacctgtcaaggaaaaagaagacatttttgcagaaagctttgagcagctctgccttgtttggaataattctttgggctctattggtgtaaatttcaaaagaaactatgaaacagttccatgtgattctaccattagtaaagttattcctgggaatgggaaattgttgttgggctccaatcaaaatgaaattgtctctctaaaaggagacatttataactttcgactttggaattttaccatgaatgccgaaatcctctccaatctcagctgtaacatgaaagggaatgtagtcgactggcaaaatgacttctggaatatcccaaaccttgctctgaaagctgaaagcaacctaagctgtggttcctacctgatcccgctcccggcagcagaactggccagctgtgcagacctggggaccctctgtcaagatggaattatctatagaatatccgtagtgattcaaaacatccttcgtcaccctgaagtaaaagtacagagcaaggtggcagaatggctcaattcaaccttcgaaaattggaactacacggtttatgtcattaatatcagttttcacctgagtggtggagaggacaagattaaagtcaagagaagcattgagaatgagccaaggttggtgctttgggcccttctagtttacaatgctaccaataatactaatttagaaggaaaaatcattcagcagaagctcctaaaaaataatgagtccttggatgaaggcttaaggctacatacagtgaacgtgagacaactgggttactgtcttgctgtggaggaacccaaaggctactactggccatctatccaaccttctgaatacgttcttccttgtccagacaaacctgacttttctgcttcgcggatatgttatgctaccaacaaatcggtagcctactggggacctcctgatatctccagctgttcaacagttctgacagtgacttgcttgagtcttcttctgaagctttaaaaacaattgatgaattggccttcaagatagacctaaatagcacatcacatgtgaatattacaactcggaacttggctcttggcgtatcatccctgttaccagggacaaatgcaatttcaaattttagcattggtcttccaagcaataatgaatcatatttccaggtaatgagccagtggtttctttcattttaattaattacttagacatataaaaacttgccgatcgcttagcggttgctgcttccaagaggtcttggtccatgaagtggcaagcaggtctgaatgttggttaagtttaactagagcagtagccataaggtattgtgggagctcagagtgagtatactttcataatctgggtgacaggggaggtcagcttaccttctacaagaggggttactggagctaagcatgagtagggaccaccatacttggggtgagcatcagttcagttagaggaaagagctttaagggccccaaggttaaaagaagcatggtgcattatctttgccagtggttctgaaactgagtattaggatcttctggagaatgctgggtgtggtctcttatgcctgtaatcccagcattttgggaggcctaggtgggtggatcacttgaggccaggggttcgagaccagtctggccaacatgataaaccctgtttctactaaaaaaaaaaaaaaaaaa

SEQ ID NO: 504 - DNA, 741 bp, Macaca Fascicularis
  misc_feature (1)...(741): n = A,T,C or G
gcctcgccacatggacannnnnntcggcctgagtgttctcaggagatggcaggnnnnnnnnnnnnnnnnnnnnnnnagagagaaggcaggagggagcattatggggcttgcttatgatctggccttggaagtgatattctgctacattctgtttgttagaagcaagtcactacacccagcacacacttagaagaattaggttccacttcctaaagggaggactgtaagaatttgtggacttatttaaaaactactacatacccaatcacgttgtnnnnnnnnnnnnaaagagcacaaagannnnnnnnnnnnnnnnaaatcagagagaaaggacatactacctttcaaggagcaatgtagcagcaggtatctcagctataaccagtgtaaataggaatgaaagaaagttgtcatcctnnnnnnnnnnnntcagggaaaatatgagacgtatttttttatagagatggggtcnnnnnnnnttgcccaggnnnnnnnnnnnnnnnnnnnnnnnnnnnnnnnnnnnnnnnnnnnnnnnnnnnnnnnnnnnnnnnnnnnnnnnnnnnnnnnnnnnnnnnnnnnnnnnnnnnnnnnnnnnnnnnnnnnnnnntcaccagcagactctnnnnnnnnnnnnnnnnnttttggggtaatgaaaatgttctaaaagtgattgtggttgcacaannnnnnnnnnnnnnnnnnnnnnnnnnnnnnnnnnnnatgtacactttaatgggtgaa

SEQ ID NO: 505 - DNA, 700 bp, Macaca Fascicularis
  misc_feature (1)...(700): n = A,T,C or G
tggtcaagttttgagtcgtgagtgntgctagnnnnnnnnnnnnnnnnnnnnnnnnnnnnnnnnnnnnaaccattttctgacatttgtgccttgttctcatgctggaattaacgctgaatttttctctcgtnnnnnnnnnnnnnnnnnnnnacttattgagaggaaaaaagactgaacataagatatgaaagatgagtatgagaagtaaaacattctactggggtgctacatagaaggttaggttgtaggggctttgattataatttaaactcattatcgatggatatttctgtatatcactaaatgcggttgaagagtttgtgtgtgtatgtgtgtgtagccaaaaaatagtgccataatgtcagattcttcctttgctctgtttttgagagttgatgacatcaggcacttttaagtgtttggggaaattgattgggatacctcccccaaaccaactcaagtctgtaactggaagccaggtagttggttttctggtccgctttggcctctttcttttatcatcatcctatccaccagcacttaatgtaagtagatgttttagaattgcaatatttattggttttgtatttgtcatccttagaaatgttaatgatgtatttttatattgataatataaattgatgtacagtgtgtgtgtatatgtatttcaggatgttaaaggattgtactttgtatgtga

SEQ ID NO: 506 - DNA, 3557 bp, Macaca Fascicularis
atatatgaaaacagagccaggatattataagcatgtgtaataaagatatttttatattccgatttatatgaatcctagcagcattgtccaacagaactttaagtgatactgggaatgttctatatctgttgtccaatatggtagcaccagctatgtgtagctatcaagcatttgaagtacggctagtgtgacaggtactgagttctttattttctgtaattaattactttaaatttgaaaagccatatagtcaggacagaatggctctataactttttaaccaggctttcattttatattccctgttttgtgttaaccaaatacatcattttatactagtttaaattgaatgtggaaatactgctttaagtatttttaaactcttccagtgccatgtactattttttttccaacccctccccacccccgccaccatgtagtattatttaaatgatatatgtgtcatttctgtgaatgggagaaatgatcaagagactgttctaaatgaatcacctgcggatactcaatagttttgtaaagcggattagtcacttaggaatgatttcttgtctacacattgttaggatgctttagtctgattcataatcaactggaggttcagttccctgtgaaatggaaatgttggagcagccatctctgaatgatggagggtctttcagtatgtatataaggaatttgagaaaatcctttgaagaagttttgctttaagaacgtaagaaaaatgctatcaggatggtaaatagcattatattacttagtactttggtggaagtatgttcagggaaagattaaggatactctagatgtataaattgttttgtatattgtatgttttactctggttatgattcattagtgaataattaaacagaattttaagtttgaagacccaataaacaataaattttggcttagtgtgtgtcagtgtgagatatttatgaatatcttactgctgatcatattgctatttttcatggcccacatttcgtgggctgttggtcaactttaaaggcatgctcaaatgtcagcacctttttgtgattcgtgtgacgtcctccaggaaagttagtccctgtttcattctcctaggcacttggtttatgcttcacctagtcattgtcttttatgttgtaatttatctactgacagattaatcttctactagagtgtgaactttttgagaccaagaaccttggggtttttaactttgtatttccccatgatagaccaagcgcctggcaggtggaagggacttaggaagggctttttacttgaataagtggttctaaagcagttgtgaagatttggggaagacaataataaatctcctaggtaaaaacataaacattcaaaacatttcatacatacagcagtccccccaccccttatccacagtttgcattcctcaatttcagtttcgtgtggtcaacttatttcctgtggtctgaaaataagatatgttgagggagagagagatcacattcacataacttttacagtatattattatgtgttctattttatgatcagttattgttaatgtcttactgtacttgatttataaattaaacttaatcataggtatgtatgtacagtaagttttcacttaacattgttaataggttcttagaaactgtgatttaatgttgttttgttcaacaccacattgatgaggggaaaaatgatttcattgtacattgttttgcttaaggtcatggtttccaagaacctatcgacagtgttgaatgaggacttactatataggaaaaaacatagtactatacatagtttcagacatccactggaggtcttagaataaggaaggactactgtacaaaaaacctttggctactttttccttatctaataactaaaaagtggaaaggatgtgttagtttctttttggccattacaagtggcattcttagtactgtaacttccaattaaaacttatgttgcctttccacatggaaatagtattataaatgtaagatttccaggctaatgcaagtaagaattactgtctgaattctctcttgtctaaagttaagtatttgctttcctagactgatgatggagaagatgatctgaaaaaaggtacacagttattagaaatatatgctttggaaattcaaatgtacacagcacagaaaaataacaaaaaacttaaagcactctatgaacagtcacttcacatcaagtctgccatccctcatccactgattatgggagttatcagagaatgtggtggtaaaatgcacttgagagaaggtgaatttgaaaaggcacacactgatttttttgaagccttcaagaattatgatgaatctggaagtccaagacgaaccacttgcttaaaatatttggtcttagcaaatatgcttatgaaatcgggaataaatccatttgactcacaggaggccaagccgtacaaaaatgatccagaaattttagcaatgacgaatttagtaaggtaagattttatatttcagttaaggtaaatttccttaaagcagttcataaaggagcgagagataaaacttttcagaactcagttgatattcaacatttgcccttttgtattttcttagaaaagtttgcagaatttttattttctgaagttatttacatgctgttttctgtagccacaagattttataaagcattcactacttagttttcctattatctgtgtgtgtgtctgtctgtctgcgcacacatgcacctgcgtctttcagtggaaaattgattgtggatgtcttaaaatgttatttcacaatagtactgcctatacctctcttaatccaaaatgaaattatgaactagtccaagatgagtcaggaattttcagtaagacaagacggcataagcatatttctttactcatatattttctcaatgacaagatggaagtatttttaaaaatgtttacaatggataattttctgaggtggaatgtggggtggcagaagggtcgtactggtaagaaacccaagatttattgaatgattcgtaatgatggttaaccactgaagaacctaccatagtcaattaatattcaacaaaattatggaagataagaccaaacaaaaaacctagaagaaaaggcccatttttgcaaaaggaattagtgagtaagagaaactttcctccaggcatagaataaatggaacccagggtttttgtgggttttattcattaaaaaagtacaagaaatttaccaagtttcttcaggtcttttattttaagttgtacagctgagttttaccacagctggaaaaatgtagttagggacataaagcagggcttttttttttttcccagatatatgtaaataatttaggtgaccagaagttctatttatagtactttttcattgaacagaaaatactattagactgcaaattatgggtcacctacatataaattgtatgtacttggagaaaataacttatttcatgatattaaagttcctgtgtaaaatgtcctcatttaacttttaaaccttaattttggctgcaaaaaaaaaaaaaaaa

SEQ ID NO: 507 - DNA, 722 bp, Macaca Fascicularis
  misc_feature (1)...(722): n = A,T,C or G
ttcccatgtgnnnttcatgggatctttctttgtcctggcagacgannngatacctaagtgtccaacctgtggccaggtgtccctctcatgggaagcttgtttatcctggcacgtgcccttgtggctctcgtctgacctgtgtccagtttattcctactgagacagccactctcccggagacccctgaccaggaaagaagttaggatggggtagaggaggcagctcataagaaccatgaaatgacagaagcagtttattgnnnnnnnnnnnnnnnnnnngagggcagcacgcttcgcaggcccagcaaaaagggggagccatccaggacacgtgggctcaaccagaaggtggagaacgagagagagagagggagttgtgagccaaagcttttactggagcccagggtgctatgtaagcaggtttcccatggaggttctaattggggggtttagagcaagcgggcnnnnnnnnnnnnnnnnnnnctgtgactgagaggagtcggtgtgggtaggatatcagcacggcccatgtgggtgtggggggcagtgggacaagtcannnnnnnnnnnnnnnnntgtccatgaggaggtggtcccaggaggcggttttatgaggcagatgtctggattcaccacctcgaggaactgggagaagctggataactagaaactgtgttactaatctctgcttctagtatgaggaagtccaacttacaatcaaat

SEQ ID NO: 508 - DNA, 729 bp, Macaca Fascicularis
  misc_feature (1)...(729): n = A,T,C or G
tcccaactaaagggtggaaaaggatcacctannnacttcctgaaagcttagtgggaaatccagtgaggtttaggttctatcagaagtactcagacatgcagtgggcaatcgataatttctacctgggccctggatgcttggacaactnnnnnnnnnnnnnnnnnnnnnnnnnnnnnnnnnnnnnnnnnnnnccgggatactcagggccaaactgctacttgacccacactctgannnnnnnnnnnaaggaacgctttgacagtgaagaaatcaaacnnnnnnnnnnnnnnnnnntagaaggtggaagtacttgnnnnnnnnnnnnnnnnnnnnnnnnggacactgcactctattttggnnnnnnnnnnnnnnnnnnnnnnattacacaagatttggatcttcgaggtgcaaagttcctgcaatactgggggnnnnnnnngagtgagaacaacatgacctcttgccatcgtcccatctgccggaaggannnnnnnnnnttggactactctaccgatggaggcacgtgtcaggggtgaaaaccacaccttggagcagattcccaaattccatccaacaccctcagaaaagtctcnnnnnnnnnnnnnnnacttcacagtttcaattgtgaaactcaaaaagaaaaagctacagattttgtttgtattacatgtactgtacaagtgacttctgtgttatgcaaaaaggggacaagagagaaaccacataaaa

SEQ ID NO: 509 - DNA, 717 bp, Macaca Fascicularis
  misc_feature (1)...(717): n = A,T,C or G
tgggctgcattttagggtacagattccctannngagtcgcttggtttctctgtaagcatctgactcatctcagaaatatcaattcttaaacactacgacaacgaaacctaaaatgggtgacacatttgtccttgtgtcacattccattattttatttaagaacctcagtaaccattgtagcctctttccagcaaacccttctccacagcagtccagtcgtggtaggataaattacagatgtagtcattctagcagtttcagtcttttccatctcaaggcattgtgtgttttgttccgggactggtttggtggggacaaagttagaattgcctgaagatcgcacattcagagtgttgtgtctgtggagttttaggagggggtggcctttctggtctgcgcacttccatcctctcccacttccatctggcgtcccacgcgttgtcccctgcacttctggaaggcacagggtgctgctgcctcctggtctttgcctttgctgggccttcggtgcaggagacttgtcccttcttcagatgccttccttgaagatgtatctggcctatcagccttatcagtgtttaagcttattcctttaaagtaagcttcctgagaacgtgaaattgttggggttttttggtgttggttggtttgtttaggttttgctttacactcaggccaaataacatataacacctggttatgtatgaaatgctccta

SEQ ID NO: 510 - DNA, 818 bp, Macaca Fascicularis
  misc_feature (1)...(818): n = A,T,C or G
gaccaacatggtgnnnnnctgnnnnnactaaaatacaaaaattagctgggcatggcagtgtgtgcctgtaatcccagctactcaggaagctgggccaggagaatcacttaaacctgggaggtggaggttgtagtgatccgagattgcgccactgtactccagcctggcgacagagctagactccgtctcaaagaaaaaacaaaaacaaaaaaacacagctattggatcatccacagattttttctttacaatcttgttctccttgtccgtggaccatcaatagttgactcaccaagtttaattcttccattgcttgagaagaaaggaatcaaaagactgtgtgtagtaagctggcagtaaagttaagatcaaattaagacacagagagagaatatgtatcaccaccaggcctgataggcaaaacctgctcttccttttgatagcagtgatgaattgtcaggaccttatttatgaaaccctgacctacccgtaactccctgctaggctaagtaaaaaccaggctctttctccctgcttatggctccccacaaaggggcttgcagcgtgtcctgcaactttgtcttcagttagtgcttcctacaaaactaggacttgttttgtaatcttttctcatgttgaatcagatctgctcactgatctaggtttggttatgagcttgtatctcactgtatttctcatgctttgttcttttaaacagatcctttaaattgtgtcatcttgtgtacacatgtgaggtttggaaaaaaaaaaaacaacaaaacaccttgtgagttttgctcaaannngtggcctaagta

SEQ ID NO: 511 - DNA, 731 bp, Macaca Fascicularis
  misc_feature (1)...(731): n = A,T,C or G
gtctggcagctcctactgctgctttnntaagttactcactgcttcttggtccttgttttcttttgccttgtactatctcgtataatgtttactaaaagagcctccccataaatcagagaggcaaaaaggtagcatagaaaaagaagaaccaaaagaagagaatacctgacttcgannnnnnnnnnnnnnnnnnnnnnnnnnnnnnnnnnnnnnnnnnnnnnngaagnnnnnnnnnnnnncagagctgaagagtgggttcctgtcacctactgctggccattgtcccttctgttggagattcctttctttatgnnnnnnnnnnnnnnnnccttcaacacccccgcttgctggtcctgccggtcacagttgaggatnnnnnnnnnnnnnnnnnnnnnnnnnnnnnnnnctgttgagttgtttttannnnnnnnnnnnnnnnnnnnnnnnnnnnnnnnnnnnnnnnnnnnnnnncagctagatgtggtccctctttcatatccaaaccggaacacatttgggtattcctgagactttatagagcgtgtattgtttgttatacgaacctaacctaccttgttgttttctcatattaagaaatttaaatctactttgttttagtggagctattttggtaacatataagcaattttggttctgtttagggagaattcagggtttccatgacttgatttgagctttgcatatttcatataagtaacacagccatttta

SEQ ID NO: 512 - DNA, 485 bp, Macaca Fascicularis
gtttccaaaccctcccatcccaagcccccggcatgtgccaccgccgttcgcagtcgtgttactggcatggtgaggttttcgggaggcacccaggaagggctgaatgcttcggtttccgcgcaccttaagtccggagcaaaaccccgctggaggtagttggctccgatcgcgtgcatggtttgcttggctgatgtaagacaccagcgcgaaggcctgttcccgcccctgtggcagagataaattaagcgttattattgcaaatgcatcctctctggatctgctcccacacgactgttctgtgtgtcaaaaccgccgcttccaccaggcagccacaagggcgagaccaattaccgctttccccatggttgtgccaaagcacgcagccaacgagggctccaagccgggaccccggttgagaaaaacctggggcatccggcagcaccgccggtgggaaccagatgagcccccgcctccgcgcatggtgc

SEQ ID NO: 513 - DNA, 1392 bp, Macaca Fascicularis
atgtgtcaactggaagcctggaaatcaagatttctgcttgctcttctattactgtatctatgaacttgattttccatgtttagatagctcagactctgaagaccacgacaactttgactttttaagacaacaaaccctggggacttagaaactctttagaaacaaacaagattctaagttaatacagaaaatcatcattctgcttcattgcccaggttttgtcggagtggctttgagaatgtatgcaatgctgaggcaagcaattaataagggaggattttaaatgtctctataaaaagaggatcaaaaacttagatcaattataatgaaaataattcaaacacattaatttgtcagtaaactattggacatttctatctcaactgtctaaataggcatttggccctaatacattcagattaccatgttagtaagctagaaagataagtaaattagtagttttaaagttggtacctatccttgctctaaaaaaaccaaatatagtggcttgttgggcttacaagggaaaccataatcaacttattcttatccttgatattttccatggtttgtaggattgagttgaatgtaactttctgagtacaaaattatcagtagatttgactacgtgaactaacctttgaccattttttttaccgattataaaggaaattccataagatttaaaactaatgcattgagcagagaagtagtttatttcttcaattgatgtttcaatgattgatacctgagaagtcacctattagaaacagagttcaagttcaccatttacgtaataacctggtcattcaccatgcatttacaatgtatcaggccccaggtaaagaattaagtattatgccattcatctcatctaaacttcgtaacagtatgaaggggaattatttcctttcattttgaagatgcaaaaacacgctgagagtttggataacctgctaaaggggtacagccaagtttcagactcaggtctgcaaaatgtcaaagcttttgatcacctgcccagatgcaggtaagctacagatcagtggtgaagaagatattccttctgacatgtaaatccacacctagctctcctccacaccaatatctctgcttgctgcatttgagcaagggacatagtaaatgttatctgtgtactttggccttgttgattcattaagccagattatgaatgagtcattcttcacagccttgctgcacaaaatatatatttttagtatgacgagtcagccagtatctctggataaatattttctaggttacttgtttatcagagaaaaattctgagtagccattttaaaaaaggaaacgggttctatgcaagtcaatcaaaccagtccaacaccaccagccacaaaaaaaaaaaaaaaa

SEQ ID NO: 514 - DNA, 631 bp, Macaca Fascicularis
  misc_feature (1)...(631): n = A,T,C or G
tgtgattagattgtccttagaaactcattcaccctcctgcctcctgaagnnnnnnnnnnnnnnntcctaaatgggcagaagcaggcaaaccgtgtgtgtccacaggaccgggagcctctccctccttggattaggcctcctcctcaggattacagggctcttcagttttctcaacatgtatacnnnnnnnnnnnnnnnnnnnnnnnnnnnnnnnncaggactttgtattacgtattttcagttgttttttttctgagatagaatcctgtcgtgccatattatagattattcttttagtttatgtcttagaatgattttttccagagctcccgcccagcccacttggctgaatggagtggcgccagggctgagccaagcggacaggggtcggcacatnnnnnnnnnnnnnnnnnnnngcacagccagtgaagagcgagcaccagaggccgggtcggagcggctgccnnnnnnnnnnnnnnnnnnnnnnnnnnnnnnnnnnnnnnnnnnnnnnnnnnnncttccagactgaccccaacaccaagaagaactggatgcctgcgagccacaggcggtcaccgtttcctgcttctgtgatgtcacaaggaacagctatgggatcgtcagtgtggac

SEQ ID NO: 515 - DNA, 3024 bp, Macaca Fascicularis
  misc_feature (1)...(3024): n = A,T,C or G
attagagggagtgagctgggaaccagaccagcagttccaaggaacagagaggctgccatgcagggctggagcgggatgaacaaggcaagaacaggcaagaacagcacgccatccagtaggagaagcagacagcggccaggccacacagagccctgcagggcacgctgacagagctgcttgaaacgaagccgttccctgaaaggcacacgtgaatttcccctgcggaaaattcaaacagacacacttgaggatttccactaaattctctccggcccccagagcactggggaagcgtgtgagacctgtgccatcccagaactgtggcgacaatggtagttaacgtccatcatccgcaggcaccttcaggatgaggagcgtgcagagatgactcacgcccacaccggtgacctccaacacaccagggaaggcaggaaaaggctgtgtgccaggatcttgttctgggctagaaaagtacgcctgttcattacccgacctttgctaagtacaccaactaatggagcgagagacatgaaagatcttcacaggccatgtggaaatgtaattcaaacccagcctgaggaggtcacagtgttcagcaagtaaacatggagcctgctgaagctgggaatgccaagtgtgcaagaagcctccctgtgggaacctacggctcagcagggagatgtgaaatagctgggaatgccggctatacagtgtaaagggcgtgccaccttgggatggggtcagaaacagaggagaggggagatcctggccagcaggggtgtcacagaggctttttagaggagggggccctggagctgaactttgagaccagcagcattcgaacacatccatgggtctccctttcagatttcagtgccctcttggccttgggctgatgagctaagttgctactggagaatgacttttcacgggaaattcagaaacccagtcatcaatgttggactaccctgccaccaagtccctccattgccctggcttggtgtggctgcaagaagtcatctgttcaggcccctcctgcctcctccacacactcacctccttcagactcagaacagccaatgctgccctctgaggtctgcccctttgcacaggccttgtccacatccaggctcctggattcctcagaagctggctcctggggcctgtccagcaaggcttggaagcccggatccccaaagacctgctagttaatgagttctgcaaaaactaggtctgcctgtaatcgaaatgggagtacaaggcttgcacagtccctgaattaattcagtcctgttagaaagggagcaaggcagagtttctgctgctgtctgcaggacccatggaggggtctgtgcactgttacttccatttggggacccattgttttccatcgcttcagcacaatctgggagacattctccaagtctattgttcctgtctcctgctgccacactgaggcagttgttaacaatgccctctgcccaccccggacccctcctccatttaaataccagtctgatgggcaaaaagagcatttaatgactgctccagactaaaaagttcctattattttattcccttcttactcctgcccaatttccttccacatggggacaggtgggtataaaataaatggagctggaattacaatcacaagaagacaggtggggaaattgaatgtgattagaaaatttgtccgtgcgcctacaggtgtgtctcctgaggtcttgcagggtaccaccatccccctcccccagcctggccattcttcaaatggtctgggaatggggaatatgagtggccgagacttcccctcccattggagtcgtctgagtatccaggcagaaggaaaggagacatttggcaagggggctcttagaatggcagccttgaagaggtgcaggcagtgctgacctgacactaccttcaccatcaggtgttgggcccccagtacgataccacagagtctttatgccttccttctggattctcttctttcctctcagatgccgcccccattgggaagtcttccttgattaccccagagttagtttctccgtgctttctgctcctctctctttgtatccctattaaacgtgttattggtctatgatgttcttctgcattacaacctgtctccatgtttgatggctggtgacttcctgtacagaggaggtttagggacatgcatgcttgagaaagactcctgttctccacttgcttgctgtgtgactgtgcaaacttcttttatctctataactctgtctgtaacatgaggacaaaaaagtctatgtcacaaggctgttgtaaggagtgcgtaagatccagcttccttctctccacctcagccatttacagtcactactattgggaaactagggctgtggagtcagatcagcctgggtttgaatcctggctccaccactttccagctgtctttggccctgttacaaccattctgtgcctcagtttttcatctgtaaaatggtgataactcctatcccatatctcatatacttcttgggagaataaactagggtaatgcacgtagattgctcagcgtaggcctggcacggacccagcattctgaaagttagctatcatcgttggtagtgttgttactaacactgtgagttggtggagtctgaagcctcagcctagtatagtgcccagagcctaatgagtactgagtatataaaaaggaaaatgttggccaggcgcggtggctcaagcctgtaatcccagcactttgggaggccgagacgggcggatcactaggtcaggagatcgagaccatcctggcgaacacggtgaaaccccgtctctactaaaaaatacnnnnnnnnnnnnnnnnnnnnnnnnnnnnnnnnnnnnnnnnnnnnnnnnnnnnnnnnnnnnnnnnnnnnnnnnnnnnnnnnnnnnnnnnnnnnnnnnnnnnnnnnnnnnnnnnnnnnnnnnnnnnnnnnnnnnnnnnnnnnnnnnnnnnnnnnnnnnnnnnnncaaaaaaaaaaaaaaaaaaaaaaa

SEQ ID NO: 516 - DNA, 746 bp, Macaca Fascicularis
  misc_feature (1)...(746): n = A,T,C or G
catnnnnnggaaggcctggttgctgatgctactttataaatgagttgcttgcattttcacagagaatgaaggaagacctaatgtggctccagaatgaaggacgacctaacatgtctccagaatcttttcacatgatgattggggtcaacaaaaaaatgctaccctctagattagacannnnnnnnnnnnnnnnncaaaggtgccagggctgggctgactgtgggatgagatttggtactgcagacagatttcgatttccacagttgagctggaaacaaannnnnnnnnnnnnnnacggcttttctaacttaaggtgagttatatgttaggtgtgctactaacttaaaaaatagtgcactctctggccnnnnnnnnnnnnnnnnnnnnnnnnnnnnnnnnnnnnnnnnnnnnnnnnnnnnnnnnnnnnnnnnnnnnnnnnnnnnnnnnnnnnnnnnnnnnnnnnnnnnnnnnnnnnnnnnnnnnnnnnnnnnnnnnnnnnnnnnnnnnnnnnnnnnnnnnnnnnnnnnnnnnnnnnnnnnnnnnnnnnnnnnnnnnnnnnnnnnnnnnnnnnnnnnnnnnnnnnnnnnnnnnnnnnngcaacagagcaagactgtgtctcaaaaaaaaaattcactctccttcaagaaagttttctaacatctagtgatttgtaacttagaagtggagttgccttgtagatgtcttttttgcattctgtaggannnnnnnnnnnnnnnnnnntcagg

SEQ ID NO: 517 - DNA, 685 bp, Macaca Fascicularis
  misc_feature (1)...(685): n = A,T,C or G
aaataacaannnnnnnnnnnnnnnnnnnnnnnnnnnnnnnnnnnnnnnnnnnnnnnnnnnnnnnnnnnnnnnnnnnnnnnnnnnnnnnnnnnnnnnnnnnnnnnnnnnnnnnnnnnnnnnnnnnnnnnnnnnnnnnnnnnnnnnnnnnnnnnnnttgnnncaaaaaaaaaaaaaaacaaggccaggcgagctgnnnnnnnnnnnnnnnnnnnnnctttgggagatcgaggtgggaggattatttgaggccaggagttcaagaccaacatggccaacatagtgagaccctgtctcttaaaaaaaaaaaaaaacccagcatcaccaacgaaaagatgtaattctagtaaaattattagactttaaattttggggggttctagagaaaaggaaccttgtgacttaaagagaaaagacaattaggttattgtcagacttttcaatagtaaggattggtgcagaagaaaaaagaataacatgtttaaaatactcaaggaaagaaagtatgggccagggatttataaccaggaaaattgactttcaagtgcacacaaagacttatacacaaaagtttatagcagctttactagccaaaaactgtaagcagtccacatgtccatcaacaggtaaatgataagttgtgatatatccatactttggaaatactgccagcataaaaagaaatgac

SEQ ID NO: 518 - DNA, 539 bp, Macaca Fascicularis
  misc_feature (1)...(539): n = A,T,C or G
tnnnnnnnnnnnnnnnnnnnncgggaaaagggcccggaccgcgtatacccgctaccagacnnnnnnnnnnnnnnnngagttccannnnnnnnnnnncctgacccggcgacggcgcatcgagatcgcccacgcactctgcctgtccgagcgccagannnnnnnnnnnnnnnnnnnnnnnnnnnnnnagtggaagaaggacaacaaactgaaaagtatgagcctggctacagccggcagcgccttccagccctgagcccgcccagaggagcccagcggcccaagagcccatgccacccccagccctggcccctccaatcctccccgcgctgccgccgcccgctggggaccggttcccacaagcctgcctcgccccggccttgtgttacgatatttcgtttggtcttaggtcttcctgtggcgccctctctcctggactggttatcttgttattattgttaataataataataattattattttccttccatgctcccaactcccttctgcttgccccaaatccgccagcgttctgaatgtt

SEQ ID NO: 519 - DNA, 690 bp, Macaca Fascicularis
  misc_feature (1)...(690): n = A,T,C or G
gaaataaatgtgnnngtgttgtccgattagacgatcattggtgtcttgccacaatgtttaaaaattactgtacaggaaagtcacagcaaagatagcagttgtgactgacatgtaggactttcacagttgtgccacatttttgcctaaaatttgggttatgacctttttcttggttcttgtctgaaaatttcatctgtaacctttcatgtgtgttattaagaaacactgatctgataatcatttgggatttgctgaggcatttgtgagtcttccttataaacctgatgagcagatctcaagcatccaacttgtgtgtcatcannnnnnnnnnnnnnnnnnnnnntagcaagtcctcaattaatgattcttgctttcatccctctagtatttgctatgggagctccttttattctttaatttggaattcagtaatttttcttnnnnnnnnnnnnnnnncctcccctcacaaaactgttctttcccacttctctccatatctaattcctgattcttgtaatttttaagtcataaatgtagccagtcataaatacataaatgttaaccttgggttggaaccttgtctcttgcagtttaaggtaatggatattgtagcccatctgaattttcttcactctttttctcgtaattctggagtttcttcagattgtggtgtattttattgtgctctct

SEQ ID NO: 520 - DNA, 3743 bp, Macaca Fascicularis
  misc_feature (1)...(3743): n = A,T,C or G
ttttaagttatttatggcttggtgtctttcttgttttgtggctgtgtttttgcttttgtttctgcaggagcgcctctcccaagcagtgggggcctgagggcttgaaagaggctgggaacactagcagggagcacttggctcctggcagagggagaggacaggaggaggagccttccccaggaggagcgaggagaggtggccgcatggcaggccacagtgccctatgggcttttctgtttgaaccccatgtgggatgaatctcaaagccacctgcgttctggcctagtgtccagagcagcagagatttgcagccctcgcccctccctgagaagaagctggatttgaaaatccctcacaggccctaacatgtttcctgggtgggcagaggcctcatgatcaagcagcaagtatacccagagtagaagcccttccccactcccacctcaaacccaggagcagaactcagtgtccagagcttgcaagggtttgccgagggctgcccagccctgtttctggtttcctggacaatttctctgtcagatacggcccattgtaaacccagagggctgcattttgggttgagtaatacggacaccagggaagtacagaatgagtccagcattgccgtgggggagggaagagtgtgtcctggcaggaagccaccattggagaaggtgaggccagtaaccgtctcatgggatttgcaatcatcagcctatttgagctgctgggtctctgttactgtggactccagtcattcaaggagttctccactcttgggtttttttttcttttcttttgctattttgcctgaacaccccaacactcttggttttagagaccaagagtaagttgtgcagagacatggttctaatttggagttcaaaggaacaccagctctaaaaaggtgactatggggtcaggatgtttctggcaggctcagaagtgctggctgctcttccccagcctccccactgctccctcctctgttccccatgtggaggtggggggtgctgggactggggagagggcagccacctccatccaaggctcttcctaggggccttgctattgtggacagcagactttatccctccttcttactctgggccaagacctcccactccgctctctgaggatggcaccaagaatgggcctttgagacttctcaggacattgacaatgtgcacactgcaagttgacttaatttatttattttgtgaaaagaagagacagaaaataccttattatctgcagggactcgacgctgtacccgaatcaagaaagaaaataacaatagaaaccattcacacactctgttcatgcacggacaccagaagacgattcagaacaccagaggagaataagccggagcgccagcaccacgatggccccgggacgttgtttaagatctgagatcccttggtttctctcatgtttatctgagatgccacatcagggcccttgctgctatattacctctgcccgggtgtttgagaccggtcacaagtgcgtgggtgtttcctggaaatgtattcccctgggacttagcgatgctctgggaaccgttggggtttggggaaggacaatgtggtgtgactattggcttgacacgttgtggatgtggttggagtcatccacgtggacacgattttcagcttggagctgggatggagaagatggaagcgctgggggccgggcctccttttccagcaaggctggccctggtttctcctctgttccagcttgtctgccagagccttcccctataaagtgcccacctgcccggagacagagggagcagctgaggcctctctccactggccgccagcctccccagcacaagaggactattcagctatgagtgtttactcatgttctttcttattgatgagttctgcgacccagcctatagaaatggctcagaacattccaggccttggtgagacagagcagcatccagcgctcacaggctgtccccgctctgcctgttcccatcttccccttggggcctgttcataaattgaggaatggataagggccctggagggtccttgggagtaattagtggagggcaggattcccaggtccccgtagagagggaaggagaagcccacatgtgcacagaagcccgtctctgtcacacacacactgcaggtggtcaccgatttattttccaaaagcttagaaatataaagcaaatttaggcttttgtccctctgcgatacatgcacttgaaaataaacagaaaagagatgtttaataacaagtttacttcctgtctgctagcaccctcagcctgggagcagacaccctcacaagccaagtgtgtcttacagatctatacaagctgatagaaggaccgcctgctgaaatccagggctcctgagttgatgggtttgcttgtgaagcttctaggacaaggcgcagccagatggaagggagaggatccaggacttcctaaatgcagccgcatcacctctcaactcgctgcagtttcagagacagtggaagctgctctttacctcaaaagcacaaagcagaattggcaacttcacatgtctcaagagcttcaagatcctttggtctcgtgtcctttggcaccccacaactgtatgggggacaaatttgttacatgtttccaaggctacagacatggtgccatcctcacgggcctagctcatgtgaggtacatgtctgccattggtttgaacagggcaccccctgaagtctccatctcggctgtatagtctagtccaaatttgcctggctcccccgctccctcccaggtcctgcacactgtctttttgccaacacctcagccctgtgtgctatttcatgtctgcatggtacgagacaccgcttcacggcatatgctgccacggtatgtacatatgcatccacgtgtatgtgtagcatgtagctcattctgctcagcctctggtgccgttccacattgctcccaaaccccacagaacggaggcaccggcatcacacgacatctttcccttccatctcggtcatctatctgtctggcaatggaaggagctccagcaggaggtccttcccagaaggttgattcttggcctgggtggtagaggagatatcctgaccctaaagtcttccagccccaggtcatcctctgctatgctggggtccattgaccgtataggccannnnnnnnnnnnnnnnnnnnnnnnnnnnnnnnnnnnnnnnnnnnnnnnnnnnnnnnnnnnnnnnnnnnnnnnnnggagaccagcctgggcaacatggtgagaccaattgactgtagggcttgtcccttgctagaacaggagcagaagactgaatagctgtgtcctcaaggcagtcccctcccacccccattcccaaagtcagaaagcgaagccagatctcaaaggctgatacctgaggcaaggagagctaaggggagagaaagcggggtggggtgggagcagacaccctcacaagccaagtgtgtcttacagatctatacaagctggcgtaggggagcagctgctgaccaaaccccactgctgtcactgtcgtcccagatgtccttgccatggccacagacaatctgccatctcctggaaacgctggggctgcccttcagagagctggcagccactggcagtcagggcctgctttgcagaatagaatgtgaacccatctcctgatggcctacttgacttatttaattaaagatgaaaacatgcaacgagcaaaaaaaaaaaaaaaaa

SEQ ID NO: 521 - DNA, 1645 bp, Macaca Fascicularis
gagttcttttacgcagtgttttggggtgcgggactgcaatgcgtgcacttcgggaccccaggctgttcccacggcgactgacacctcagacacgcgtgggaggggcggcgcgctggctatggggctgtgctgagtgcgcgcgagcgtggccggcacccacctgctacagggccagcactgcactggggtcctggagcggctcctcccaacgtctccgcgggttgtcgggttgtcgagttgggctgggggacgctacaggtagtgggtcccgagcagcggctggccccttatctcactgcccctccccgcagctctgcctcctcggacctcaccgtcccttggaagctcgctcagggcacctaccgctgtgaccacctggacgcagaagctcaggattggactttgtcaggaaggtgggtcccttctctcagcacctcaagcttgtttctaccccggtctgagagctgcagaggctggagctggagtccccacctgaaggtgtctgctttcccacaacagcaaagaagaaccatggcccagtgtagtacaaagttaggggcgtgctcagcttcctacctaacctaacatggggagagcggacctcagaaggtggtaagagcaatctcctctacgcctttgccatggtacccagtgccagccactccacattcatcagccatgtgctgtcccaggggtcactgtcattcggggacgtggctgtgggcttcacctggaaagagtggcagcagctggacctggagcggaggaccctgtaccggatatgatgctggagaactacagccacctgctctctctggggtgtcaagtcagcaaaccagctgtgatctccagtttggagcaggggaaggagccatggatggaggaggaagagataaggacatggagcttcccaggttccctgacaccagccttaagaaaccacagagaaggatggaaatggtatgaagaagagactcttcctctttcccaagactcctgaagccattggtggcttccttcttggtgggcctcactggcatagacgtaattcttcccaatcagccttgaccggcatgcacgttcgccagccaggaggttaggtaggcagaggctacctgcactgaccatgcttctgaggttcctggctcctaaatggtcccttcaggaggtatttgtttttgagacagggctttgccctgtcacccaggctggagtacaatcacagctcactgcagcctccacctcctgggctcgtgatcctcccacctcagcctcccatgtagctgggactacaggcacacagcattacacctggccaatttttgtagaggtggggtttcaccgtattacccaggctggtctcaacctcctgggctcgagatcctcctgccttggcctcccaaagtgctccagtacgccgagcccaacaacatttttgatcatcactctcaatgtccccctgacttggggttctgtccctggaacctcagagagccagaggctccagccttgtgctgcagccaattgctccaaattctgttggatcctcccctaaaaatgccccttggcatttgccatcagttaccatcaatctcagatgaggtacctgcaataaatcagcttcatggtcaaaaaaaaaaaaaaa

SEQ ID NO: 522 - DNA, 748 bp, Macaca Fascicularis
  misc_feature (1)...(748): n = A,T,C or G
agtgcaataggatttaatgtgggttnnnnnaagttgacttaagttggcaacttgcaaaatggtctaagagctnnnnnnnnnnnnnnncctatattctttttcattctgctcataggaatttctaggtccagattgttttgtttttaaaagaaaaggttcaggatgggtgcaatggttcaggctgtagtcccagcactttcggaggccaaggcgggaaannnnnnnnnnnnnnagagttcgagaccagcctaagcaannnnnnnnnnnnnnntctctacaaaaaaatttaaaaattagctgggcactgtggtgtgagcctttggtcccagctacaccagaggttgaggcaggaggattccttgagcccaggagtttgaagtagcagtgagttatgatcataccactgccctcgggcctgggtgacaaagtgagaccttgtcttttttttttaaaaaaatgcaatctagaatgtaatttttaaaatcaacatttccggccgggcgcggtgtctcacgtctgtaatcnnnnnnnnnnnnnnnnnnnaggtgggcggatcacgaggtcaggagatggnnnnnnnnnnnnnnnnnnnnnnnnnnnnnnnnnnnnnnnnnnnnnnnnnnnnnnnnnnnnnnnnnnnnnnnnnnnnnnnnnnnnnnnnnnnnnnnnnnnnnnnnnnnnnnnnnnnnnnnnnnnnnnnnnnnnnnnnnnnnnnnnnnnnnnnnnnnnnnnnnnnnnnnnnnnnnac

SEQ ID NO: 523 - DNA, 746 bp, Macaca Fascicularis
  misc_feature (1)...(746): n = A,T,C or G
actgaacatagaatatgtgttatcacatgttaaatagggtatatgnnnggacttttttaaaaaaaatttccccctaggcatttgagatcagctgaattaagcagctaatcattattcccctttcatctcattccttggtccaagtcctgagagagatactctctctcttaaggatacttaggaaataatgacaaggaaatattttgcttgtcatagtatattgcctgttttaagacctacttttaaaatcaaataagccataaattattattatgccatacttttaatcatttaacctaaatgtttaatcaaaagttgtctaatataaaaactagtaagcaaaaagcatgtgaaatgcatgtatatactttaaccaagaaattctaaaaattggtttctatagagaaaactggacagaatgacaatgtatgtgacacaacagtgtttactacagcattttttatcatagtaaaaagtagtaaaaaaaaggtcacaagctaaatatcaatggagaattgattatagtataaaaatgaacataaaatgattatatatacatttttcatgtatatggtaagttgtccatgacttaacactggtttaaaaaagtggtaaaactaaatatatgaatgtcaaaatatcaacagtgcttgcatttcggtggtagacttttatgtgacttgtactgtgtactgaattgctaaaattttttacaaccagagtatattcccttttataaggggtaa

SEQ ID NO: 524 - DNA, 276 bp, Macaca Fascicularis
atgggactggaggacgagcgaaagatgcttaccgagtccggagatcctgagaaggaggaagaggaagaggaggaattagtggatcccctaacaacagtgagagagcaatgcgagcagttggagaaatgtgtaaaggcccgggagcggctagagctctgtgataagcgtgtatcctctcgatcacgtacagaagaggattgcacggaggagctcttagacttcttgcatgcaagggaccattgcgtggcctacaaactctttaacaacttgaaataa

SEQ ID NO: 525 - DNA, 1216 bp, Macaca Fascicularis
ctcagctccctccatgaggaggagctacagatgctgttcttctctgagacgctggccatggtctcagacaccggagagcctcagggagagctgaccattgaggtgcagagagggaaataccaggaaaaactcggcgtgctgacatcctgccttttcgtgcatgccttcagcagaggcttcttggataaaatgctctgcggaaattccctcctgggctatctctcagagaagctggagctcatggaacagcacagccaagacttcatcaagttcctcatcctccccatggaacggaagacgagtttgctgaagcaagatgatcagctggctgtgaccagaagcatcaaggagggtgaggaagtgaagactggagtgacttctttcccgtggagctcaatcaagggcttcgtctcagaggctgccaacctggtgctgctcagggtgatggcctggcggcggatggtgcccagcaacgcccgcttcctggccttggacactgagggcaaactctgctatttgacctatcaagacctgggcttccagaccatccaggtagaccatcagcaagccgaagtcttcatcgtggagcagactgtccactcagaggagggcatccccatgtcctgccagtactacctgctctccgatgggcacctggccaaaagaatacaggtgggctccccaggatgctgcatcatcaccaagatgcccatcttgagggaagtggatgagattgagccacgcccagtgtttgagaagaagccccccgtgtgggaggaggatatggagctctattctaagttcctggaccgtaaggaggagctccggctcggccacgccagctatctgcggcagcaccccgaagcccacgcgctcatctccgacttcctgctcttcctgctgctgcgccagccggaggacgtggtcaccttcgccgccgagttcttcggccccttcgacccgcgacgtccgtcgtcaccggccttgggctcctcccaccggcccaaccctttccgctccctggagccggagggagacgcccgctcgggggcgggctaggctgggcccaagccgggacagggcaggaaaccaggagtcgggctgggacgcgggcgggacgcgccggggcgggggcgctttccgggctgtgattttgggggaataaacggggccctcccgcggctctgcagcgccagccgaaaaaaaaaaaaaaaaa

SEQ ID NO: 526 - DNA, 722 bp, Macaca Fascicularis
  misc_feature (1)...(722): n = A,T,C or G
gtgcttgcctttccatgtgactttaaaaaggctcttaaataataaagagcaaatgtcctcttcttcttgctgctagagtgggaagagaaaggtatcttgccttaaaagtttactgtttcttctgttcttctagcatctctcaaaaaattcacagtactccattttgaggtgcaaactggtaatgctcaaaataataaatgtttataagaaaattctttattgagaacattcatacaaaaattacctaaagcaaagtaaaaaaagtaaaatcaaggtggtatatttgaagtgaatggtgattggagatttctttagctgaaacaaacaaacaaaaagaaagaaaacaactttttttaaagcatcattcttttttctgtcaaaatgtaccttattcccacacactcttggactgaccttttttttatcaataggctcaatatcactttgtttaaaatcaaatgcttcagcggaagtcattctctctttaaccgtataatgtaaaaactcctcttcaccattgatagcaaaatcagaaactttagggcaccagtgaatnnaaaaanctggttttaaattggaaaagctaatcttattaataatattatcctgtccatccatatattttgaaattgtacaggtccataatttcattttaattaactataggagagaagagaagataatacccatttgttccatcaccccctctcgctgtcattaac

SEQ ID NO: 527 - DNA, 770 bp, Macaca Fascicularis
caaaatggtagattgcaaattagtctcataggttttagctgagctgaacttgacaaaaatatattagtacttattacatgttttagtatttatcttaattaaaattgtaacatttagttatactttcaacagttcatatgttatatattcatttaattttgttttcatgggatgtttgatgtgttgagacaaagcacattcttaaagataaatataatatttcatctaatgtttatagcctttccttcaaaattatatatgtgaaagtttccttaactcattttctatttttatattcttttagaaatggaactctttttcaattaaaaaaagttttagttggaaaagagatttagaaggtcatgaagatggtttcccatttggggacatttcacttctatgccattaatgtatttactgtgacatttcagcagaatggtagctatttgtatattatttcataagccttatggaaagtcaaactgtgaaaatttattatatagaacccttttttatttccatattttagtttcaaaatatacctgaacaaatgcataaataacaaatcctctgttatttaaatgtataacaatgctatgttataataagagcacttgtagaattttaattattataaaaatatttcagtaacaaagccaagattataaattttttgataccctacagaatggaatacaagtgatgaattgcattgtatgagaatcagtaactacaacaatatctctcttccagactaaaacttttttaat

SEQ ID NO: 528 - DNA, 863 bp, Macaca Fascicularis
  misc_feature (1)...(863): n = A,T,C or G
ctgttggtgtgcgggacagtttccggtgggattttgaactggtcattggtgtgtcccctgagttgcagctcattctgtctcttttctcttttgctttctgtttcttaagggcacacacgtgcgtgcgcgcacacacacacatacgtgcacagggtccctgagtgcctaggttttggagagtgcgcccgttctatgcctttagtcaggaatggctgcannnnnnnnnnnnnnntcttcaagcctggnnnnnnnnnnnnnnnnnnnnnnnatttctttcaccggctggtgaattcagacaacctgcccaaagattgatttgtgtgtttgtgtgtgtgtgtgtttgagtagagttgannnnnnnnnnnnnntgaacttttccagatttggggtgtaggtctcatctcttcaggttctcatgataccacctttactgtgcttatttttttaagaaaaaagtgttgatcaaccattcgacctataagaagccttaatttgcacagtgtgtgacttacagaaactgcatgaaaaatcacgggccagagcctcgggcctagcgttgcacttggcctcatgctggagggaggccgggtggccacggcttggaggaggagggatgcgctgctcgcgttcttattctggcnnnnnnnnnnnnnnnnnnnnnnntagtggatgannnnnnnnnnnnnnnnnnnnnnnnnnnnnnnnnnnnnnnnnntgctgagaagcaaaccgccctgcagcatcccnnnnnnnnnnnnnntttggctggcttgtttgatttcaacatgagtgtattttttaaaattgatttttctcttcattttttcaatcaactttactgtaatataaagtattcagcaatc

SEQ ID NO: 529 - DNA, 1743 bp, Macaca Fascicularis
  misc_feature (1)...(1743): n = A,T,C or G
tactactgacctaccctttttctggcttttcatcattcagatctcagcctgaatgataccttctcagggggtcacactaacacaagaccctgttttattttccacgtacacttaccatgatcggaactgatcgtggccatttaagcgtttattatctgcctcccctttggaaagtaagttgcttgaaaacggtcctgatccatctcattcaatcacttcattcccccatgcctggcatattgtagacagtaagcaaatatttgttgtttaagtaaagaatgagtgataaatcaatatgatatttaaaagtgaggatactaagtatgaggcaggggagtggggacacacacagataggaaaaacattccaggtcaaagtcagaacttggacagagccagctctgaggcacagagggcaagtgggaaagggggaagctgaagggatgggcagagcttggatagtagaggccttgagctaacaggtgagatactgggtttttgccatgtgccaggcctcacagcttcacatatattatctcatctcagcaatcctatgaagtagatactatttttattcccattttacagatgaaaatgttgaggctctgaaaggtacattaatttgcccaagatctcacagctggcagagctgggattcagacgcaggcagtgtggtctgactcgagacctcaaaccatccagctgttgtgtgtcctggattcctgaaggggactttatcctgtgggccgtgagaagcctttgcagggttcaaagtagagaaggcgagagggcaccggagggctgggggagaacaaacaacctgagttggctcttggcggtctgggggttgcttcccacaggcagtgggatccgggtacatcttggaggataggcgtcatgagcctgaggaaggaaggcgctttcctgcagagagaacacgtgcaaaggcctgcaggcacctcagcttttcaagagctgccagtagttcattttcactggagattgacagggggccaatgtgtatgtgtgggttgatgtacgtgttgatgcagaggggtagctaggtctggaaggactttggacttcctcctgatttccaagcagggccgtggcagcatcgtgatcaactctgcatctctgttgtctcagtgtcttgaaatgattagcactcatgagccatgccactctgaacaaatttaaagtatcagagtgcctgagactagatagtggaagtactcaggagtcagggctagatagattatcctgtagggaaggtaaccggagccattgaagagttttagcagaaagtcacaactttaccttatttccaatctttggaaaacaaagggcttaaggtaaaaattttgcggagccattaagctggaaaaggattcagctatatctggtgaatcttaaaatgttaaaaatattctatgtaggccgggcgcgatggctcaagcctgtaatcccagcactttgggaggccgagacgggcggatcacgaggccaggagatcaagnnnnnnnnnnnnnnnnnnnnnnnnnnnnnnnnnnnnnnnnnnnnnnnnnnnnnnnnnnnnnnnnnnnnnnnnnnnnnnnnnnnnnnnnnnnnnnnnnnnnnnnnnnnnnnnnnnnnnnnnnnnnnnnnnnnnnnnnnnnnnnnnnnnnnnnnnnnnnnnnnnnnnnnnnnnnnnnnnnnnnnnnnnnnnnnnnnnnnnnnnnncaaaaaaaaaaaaaaaaaaaaa

SEQ ID NO: 530 - DNA, 2183 bp, Macaca Fascicularis
aacattaaggcgggcccaaacatgaaccactctcgccagttttgcagtgccgtggtgcttgatggcaagatttatgcaactggaggcattgtcagcagtgaggggcccgcactgggcaacatggaggcctatgagcccacaaccaacacatggaccctcctcccccacatgccctgccctgtcttcagacacggctgcgtcgtgataaagaaatatattcaaagcggctgacatcagcagaaagcccatgataagactgtggacaagtctggtgaggcaagtgccacgcaatgataattttccagcgacaccaacaagaggccaacaaaacacaatcaaggaactcactgcgctcaacatgttgaatattctctacactgaatgtagaaaatcatcctcacctttgggtgaaaccgaggcaccatgcatggagccgcaggaaccacaatcccactgtggggctggctgcctcctgaccaggcgcctgccctgaacaggggcacccgctctgccaggtgcaatagagtttcacatatttttcaactgggagagagaagccgtcttttccttcctgcagagcaagcttgatccctaaacaaccatagatcagttatcttatgacgacattaggcatcaggctctcttggaataagatcaaagtgtccttatcactttgattcctacttttgttttttaaccaatctacactttcagtggccgacagaaaacaagggacaatactgtgcatcatcacaaggcctaggaggctgctggtccccactggggccgaagagaagcccagctgcccacgctgagccaggggtggcagccgtgggagagccggggagcgaggacagtggtctgtccttcacaggtttttctactgtgtttttgctggagaaggacaaagtgattgcgctagctttctcttacccagtatgaattatttagatttctgaggcattttcttgataaacaaaaggctatttttaagtactgagaggagaagcaggccacatgattgacaacaagtatgcccccgctgtcacactcaatggcttcgttttcatcctgggcggggcttatgccagagccaccaccatctacgaccctgagaaaggactcccagacagccccataaaagctgtgcccaaggaagaagagtctgctctagaaggagcccggttctggctcaggacaccggcccagctccctccatgaggtcaagctgaggacccaggccagtgggaagggaaggagggagaataagcatctataaagcacaggagactatttttgatattcatagctatatattaaggcacctgccgcaagagctctcaggatggggacagccttcttagtggagccatggcagcaaggcctgagggcatgagcagaaccactcttcttgtcacatatgaacctgagaaaagggaagccaggagggaggtcacaccgtggctcaaaagggaaaggccttcccgctagtccttagcccctcaaacctcacacggtcaacagtttccattccagggcaggaagaatgctgccgccaccaccgccaccactgcgctgttgagttgaagttggtaccaaatacacatttaccacttttatatctgggaagtcaacttgccatcgtttcatgatgataaccatttataagagaaaaagacaggacatgctttccatcttttagtatttgatgacacaaaattccagttctaatgctgggcatcaacttctagcactacgagtgtggctcccacttggacaagataccgagcttcgttatgcagtttttaatattatttattattttaaaaagtaataagcacaaaactacatacattgtatgtcatttaaagtatttatgtcaaacagggtgcaagtgtgaacccaaggactggagcacaaattcctaactgcctggggcagggctaatgttagcattggtgtgcgtctgcctccaaaggaggttctagtggtcagcgagactcaacacagatgacattgaaattccgtttctctcctcatctatcacactggagcaaaactggctatttctgtgaatgatataaaacagggttctctgtaatggtattgtacatagtatatgtttattgttaagttcctgttatattataataaatatatttatagatctagaaaaaaaaaaa

SEQ ID NO: 531 - DNA, 752 bp, Macaca Fascicularis
  misc_feature (1)...(752): n = A,T,C or G
accagaagtcatccctcatgatacatgaaagaannnnnnnnnnggagaagccgtatgaatgcaaagaatgtgggaaaagcttnngccagnnnnnnnnnnnnnnnagacatcagagaattcacacacatgagaaaccatatgaatgcaaagaatgtaggannnnnnnnnnnnnnnngtcagccctcactgtacattacagaactcactcaggtgaagagnnnnnnnnnnnnnnnnnnnnnnnnnnnnnnnnnnnnnnnnnnnnnnnnnnnnnnnnntatcagtggatgcatacaggaaataaaccctgtgcatgtaannnnnnnnnnnnnnncttcaaccacaagtcaagccttaatacccatcagagaagtcacacagggaaagccctgtggctgnnnnnnnnnnnnnnnnnnnnnnnnnnnnnnnnnnnncctcaggaggcatcaagaaattctcacaagggagaaagcctaagagtgtaatgaatgtgggnnnnnnnnnnnnnnnnnnnnnnnnnnnnnnnnnnntttgggaggccgaggagggcagggaggccgaggagggtggatcatgaggtcaggagatggnnnnnnnnntggcttacacggtgaaaccccgtctctactaaaaatannnnnnnnnnnnnnnnnnnnnnnnnnnnnnnnnnnnnnnnnnnnnnnnnnaggaggctgaggcaggagaatggcatgaacctgggagttggaggttgcagtgagccgnnnnnntgcaac

SEQ ID NO: 532 - DNA, 722 bp, Macaca Fascicularis
agcgggctgcagaccgcagcaccggtgtgactgacggctgaggcctctctctccttcccaagtcccctccttcctccttgggggtctcaggctgcccccatcatgggggtctgggccctccccaccctcctgccctcccccagccacctggctgtgtttttgaaactgcctggcccccagggaccctggcctgccctctttcctctcccctcaccctcctgtccttggccactgcagaatcaggaggggagcagaaggagcctctgctgctccccaggctgctgggactgggctggttttgtccttgaaatggccaggatacaggacaagggcagccccaccccatccaacctgggacccccccacagacccttgctgctcctgtggcctggacacgctggggagcttctcacacctacccctactgtccagcctggcccgttccctgaatcagcttcaagatggcaccagctctttgggcctaggatactgccgggccccccaaagggggtccccagcagccaggcctggcctcctggtatctgtggtcatagtggcccatgggtaggggcacccaggctgaccctgaggtgctgctgctgggtctgtcttggctctggggtatgctgggagggtcaccaggtccctttttcttcctgtgccctctgaaagccaagtgtctgtgtggctgtggagctccagggtctgttaataaaggcagc

SEQ ID NO: 533 - DNA, 699 bp, Macaca Fascicularis
  misc_feature (1)...(699): n = A,T,C or G
cttttatgggnnnctgccacgccnngtccccagcccctggcaagcagcgtcctnnnnnnnnnnnnnnnnnnnnnnnnnnnnnnnnnacgtctcgtggcaacacaatcgcagcacaggtggctgttggtgtttggcgtctctcgctgccgtggtgtctacgaggctcttctgtgctgtggcaggcctccgagtttcacacctgactggttgaagcctcttctctggtgtggacaactgcgtttacttggtccatgactccactgctggcccagctctgcttggatgatgcacccggctggtgtcccgggaaccgccgcggaggtcctggaacgtcccgcgtggtgcccaccgctgaggaacctcgtttggtctcctgggagggctgcctcttcccggattctcggcagcacagctctgcggcaggtcagagttcagctgtggaaaaggctggagttctgtgctggggcgggggatgctgcaggcaggtgtcctgtgagcagagtgggggccgccaggtctcnnnnnnnnnnnnnnnnnnnnnnnnnnnnnnagcttcccgctggccatgcctggtctggggacacgagggtcccagggttctccctgcagacctccaccacttctccccagaagccagggccagccagagcattcgaggctccctttagccagggtctcctaggggctctggggatggaa

SEQ ID NO: 534 - DNA, 136 bp, Macaca Fascicularis
caattcccagagccagatcttcctcatccaagcaataacggaacgagggagccagggccaaggacactcagggacactgttggggccggagccccacatggtaatgttttctttagggagaagaaaaaacaactgg

SEQ ID NO: 535 - DNA, 742 bp, Macaca Fascicularis
  misc_feature (1)...(742): n = A,T,C or G
aagggtacactgcgtccaggtttatttcagnnnnagactgaggtctannaagaggcccagnnncaaactcaagataaaaacagaaaagtcccagtgttgactggagtggaaaagcccgtgtccatttcaagttgctggcatgctgctctaacctgtgctatactagagtactctccatataatgcccccatttaccaacttgctcttaaaaaataccaaagtaggccgggcgtggtggctcacgcctgtaatcccagcactttgggaggccgaggcgggnnnnnnnnnnnnnnnggaaatcgnnnnnnnnnnnnnnnnnnnnnnnnnnnnnnnnnnnnnnnnnnnnnnnnnnnnnnnnnnnnnnnnnnnnnnnnnnnnnnnnnnnnnnnnnnnnnnnnnnnnnnnnnnnnnnnnnnnnnnnnnnnnnnnnnnnnnnnnnnnnnnnnnnnnnnnnnnnnnnnnnnnnnnnnnnnnnnnnnnnnnnnnnnnnnnnnnnnnnnnnnnnnnnacaaaaacaaaaacgaaaaacaccaaagcaaagtatttttggttcaaacctgcactatttaatatgatagccactagccgcatgtggctattgaccacttggcattatggttagtctgaattgcnnnnnnnnnnnnnnntaaaatacacannnnnnnnnnnnnnnngtacagaaaaaataatgcaaaatgtcttgttaatgattttcatgttgattgcatgttaaatgatactt

SEQ ID NO: 536 - DNA, 741 bp, Macaca Fascicularis
  misc_feature (1)...(741): n = A,T,C or G
caaagctgttgctatacacaatgattacagtataaatgtactttaaacagaggctgannngcaggaaaatgcaaataaactactataatgctggtggcttaatctattgctttaacaaccctttccnnnnnnnnnnnccttgaagannnnnnnnnnnnnnngatggaaccttgcaagacgatcnnnnnnnnnnnnnnnnnnnnnnnnnnncagcgtgcctccatctccnnnnnnnnnnnnnnnnnnncccaaccctccggaacaaaaccccttgagtgatttagtttccggagcnnnnnnnnnnnnnnnnnnnttaactttggcctcataatgtaatcctccaatcttaaaatatcaaaaagaaaaagaaggagaaggtgaaaaagaaggagtagaggaaggagaaaagaggaagaagaagaagggaggaggaggaagaagaggaggaggaggaggagaaggaggaggcggtggcaacgacgacatttccatgtgtnnnnnnnnnnnnnnnnnnnngtgactggatccttgcctgtgttaagcagttgcgatgtctgtggcttttgtaagcaagataatgcacatatcatcagaaaaagaaaaatttttttttgtacctgtcccctctctattgaagaaaggaatctgaatcaaggattttggtatggcttccaagttttaggacaaaggtatattagtataccaatttagtagcttattataaagatctggaaactaatg

SEQ ID NO: 537 - DNA, 610 bp, Macaca Fascicularis
ttctggctttactcataagtcaattctaaaagctaaacaccaatgaacagcattgattacataaatactatttgatgtaaaccatgtagagtgattcgattcatgagaaaggaaatatattccatattgttaagatcaagctcagagaagaacttttcaagtatcaagatccaacagaattcctcttctttagcttctcttccctcgaggttgtactctgctgctgttacatagccagtagttctagtttctagtggtagtttctagtttggggctgttacaaccagtactactgctatgtcttagattttttattctgcaggaataccttacacccatctacttagatctcccctgccaggactcaagtccaaactctcagacatttccttgcttcatagactgcagtagccattcacttgccctaaactgtatccacttccgcactaaaaaatttggcagagtggtttgttttttcaattttaactttactgaagtaaaatatacatgcagaaaagtacatttatcattggtgtacagatcaatgcatttccataaactgaatacaccccaatcaaaggtcaacattatcatgaccccagaaaggccc

SEQ ID NO: 538 - DNA, 765 bp, Macaca Fascicularis
  misc_feature (1)...(765): n = A,T,C or G
tcannnnnnnnnnnnnnnnnnnnnnncnnnntnccacgtattgtagaaaaacaagctgccccagaagagattattggatactctcaaacgtggtgttggacnnnnnnnnnnnnnnnnnnnnnnnctccagaccttagtgcttacttcatgttagtattttatattctgcaaagacaaaaactaaaataatccaaatttgacannnnnnnnnnnnnnnnntcttatttgagatgtttaacaaatgtctggatcatcttttcttatattggattacggcgcaagaaacactgtgaagtaagcaaagttggaatgcccaagtcaaagaccatttgaatatttccaagtagatttgagacagaaataataccgagtggtcacaggataacaaattctaggcagcagatttacctgacttaaggttatgggctnnnnnnnnnnnnnnnnnnnnnnnnnnnnnnnnnnnngtaagactgactggacccaatgtggtgctggatttaatgtaggttttacctnnnnnnnnnnnnnnngctcattaacatactaaatcacacacccaccagtgccatgacagtnnnnnnnnnnnnnnnnnnnnnnnnnntggatggcaccacagttccgagacatctccacctttacccaggaattttcattaatattccactccattgttaaagtaacccatcaagatgaaaccccagaacccattgttctctctcgggtatgcatgaactccccttttttgagtgtgtacttttgcttgca

SEQ ID NO: 539 - DNA, 1948 bp, Macaca Fascicularis
  misc_feature (1)...(1948): n = A,T,C or G
tattggataacttacacttaaaataagcatgaattctgcaatgaatgctcaatttacaagagttgtccatccaaacttgtggcaagtatctcacctctcgagttgttttttcttcatatatttcttgcttttgtctaggaaggaataatttggcttgcctttcaagagtgtacagtcaacgtgataacccaaacacttaagacatttgctagcccatgtggatcccttgagaggaagaaaacagtgatccttttactgagcagatagagtctggggccaggttttgtggcttgaagatttcagcttctccacgcctctcagctgagtgcctctggaagcaatttacaactcgtgaggctatatactcaaaggctctgttattaattccccgccttccaagactccatttcagaggatctcagttgctctcagagtgaatttactgttttctgaattccataatcccaataacaggtctattgtccttactaaatagcttaagttagattcagcagtgtagttggcaactgagctactaagtatccaatgcttatgtggaaaatatgttccctattgcaaacaactgataatcatattcaatttggcaccataatctatctataaagaagatactacttgtgtttattaagttttatcccaaataattatcttagtaataatctttgaaattagatcttggtcatttgcatatctgtatttggcatatcctgagtctttgtatgtattagaaagattacgtgttttgactggatggtttaatacaaagatgtccctcactttgggcagagacatttgaaaaaggcactacaaccagggacctaagagatgaatgagatgcagctctgaatcaggtcacacggccttgggagggaaacatcttggttttcacatccctcacttctcgatgtcatatgcaatacacaacccctcaacacacacgcatgcacatacacaaacatgcacttgctcactcactggatcgtctctttctttgactaagtccttttaagtcaagctccaaagcttttttacttacctaaggtgagtatgaaaggatttgaggtttcaatattaaaattcagaaacatttaaagttcagtttaaatattagtaaaataaaaccttgacaaaatacaattatagacaaaaagaaaattcagaatatttggaatttaaggtttaggttacagccctatttatgaaagattagaagaagaatgttggagagaataaagcagttttatgagtctgatagaaagcataaccagataattatgcatatatttgcatatgcaaagctttctaggcaatctgaacatttaaacctacaaatgtggctgcgatgaacagccacagaagagcaggctagaaaagaagagcaggcagaagttgtaaataaaatgttacttttaaatggttgatctcccaagtattggaatagatttgtgctgttttcaaggttttggttcacagaatccagtagtgtcttgaattgttttgtggcacgtccctgttattttgctttgtatgctacctctatccatgaagtggctatgagccccttacacaacactgttgatttttttttccttatctattcaaaagatttttgattcagggccaggcatgnnnnnnnnnnnnnnnnnnnnnnnnnnnnnnnnnnnnnnnnnnnnnnnnnnggatcatgaggtcaggagatagnnnnnnnnnnnnnnnnnnnnnnnnnnnnnnnnnnnnnnnnnnnnnnnnnnnnnnnnnnnnnnnnnnnnnnnnnnnnnnnnnnnnnnnnnnnnnnnnnnnnnnnnnnnnnnnnnnnnnnnnnnnnnnnnnnnnnnnnnnnnnnnnnnnnnnnnnnnnnnnnnnnnnnnnnnnnnnnnnnnnnnnncaaaaaaaaaaaaaaaaaaaaaaaaaaaaaaaaaaaaaaaaa

SEQ ID NO: 540 - DNA, 774 bp, Macaca Fascicularis
  misc_feature (1)...(774): n = A,T,C or G
atcaggtgtatggtatgagtgggctnnnnngcagaagatgtgatgaattntcctgtggtacaagattatcttannnnnntgaccaggtgtgagcacgtgctctcgctccnnnnnaggtttactgtgtttaaaactaaactgctgcaaaagttctcaatgttattttccaacacatctatatgtatatatatatggacacacagtcacgcaagctagttcccaatgactcctggaatnntgtgtatgcagaaggctacatatacatagttgctttctttcctttccattgtaactctttgcctctcaagtgtcattgatacatgcattgctnnnnnnnnnnnnnnnnnnnnnntcgcagtnnnnnnnnnnnnnnnnnnnnnccatcccattgccaannnnnnnnnnnnnnnnnntgtttgtactgtgcagttttcaggatgagatgacagatagcatgaccacactgaggccccctcagagaaagcagggcctgatttatctagctgtccagccgctgtggctggaggtaggctagttgggatgggcagctaagtagtcttctcttctgcctttatgagattgggtagaaagatggggcatattcatccacccccaaaagaacactataaaaacagctcctctatatttccacctctttctatttatgcaactcatcttcacagattgttctaaagtaaaatagatggtgtatgctgtatccacaaatcatctgtaacaattatgttttcagtgctgtgtcattccaaataaacc

SEQ ID NO: 541 - DNA, 742 bp, Macaca Fascicularis
  misc_feature (1)...(742): n = A,T,C or G
atgctatgannnnntatcacagacatagaggagaaagnnnnnnaggaatcttctatcacccagcactttccttttccatttaagcaaactnnnnnnnnnnnnnnnnnnnnnncttgatnnnnnnnnnnnnnnnnnnnnnnnnnnnnnnnnnnnnnnnnnnnnnnnnnnaacacatgaaatatagaaaataaattgttttctgccatttcagtaaatttaagtgaagcaaaagactcnnnnnnnagattttaaagagatgttttgaaaatnnnnnnnnnnnnnnnnnngaagggagggcaaagacatatttaacannnnnnnnnnnnnnnnnnnnnnnnnnnnntactaataagagaaatatttgaattcaagtatagaaagatgaaaattataggatgtaggaaaaatacccaatatattnnnnnnnnnnnnnnnnnnnnnnnnnnnnnnnnnnngctgcgcgccccggccatagcgagtaataattgacgattgacgcctgagctaaatacatttccactctatacctcctccctagttttatcttcttccctgtactattatctcataaaagatggcgctcttcctgcttcttcttcacccatttttcccgcgcccgcgaaaatcactnnnnnnnnnnnnnnnnnnnnnnnnnnnnnnnnnnnnnnnnnnnnnnnnnnnnntggccacgcccactgcggagagatcatcaccgccttagcccaacccctgcccctcctaa

SEQ ID NO: 542 - DNA, 733 bp, Macaca Fascicularis
  misc_feature (1)...(733): n = A,T,C or G
agtnnncatccagcttgnnnngtcatcctgnctgggatatacttcctaactcctctggannnnnnnnnnnnnnnntgtaaaannnnnnnnnnnnnnnnnnnnnnnnntgtggttccttcaagctctggatctcgaattccatgattagtaatgtatgtatgtatatataaatatgcttatctgtagaaacgggcccgtttgaaannnnnnnnnnnnnnnnnnnnnnnnnnnnnnnnnnnnnnnnnnncagcgaattcctaaataagttcataaaatcttattttacaattcaatggtagtgcttaatgttattgtctgaaatccactgtttaaccggatggaagactggtgccatttaaaacattattagttnnnnnnnnnnnnnnnnnnnnnnnntttaataaaactcatttgttatagtcagaaattcaactcttctgtacttgggcaggtcccagcagccccttggcaggctggttttgtgcatgggcctttgcaagctatataaacgttaggtgttggcttgattatgataaatatgagcaggctccctggagaacagtccagaaaaaaagagttatagttctcacaaactggtgacatgagtccattaagctgtgtggcattttccagtgtaaagacattgtttgctggctacgatctctgactttctgtggcatatgaggtgtaaaatgttgtcaaaaaagaatctggtgttaaaatcaaactatgg

SEQ ID NO: 543 - DNA, 725 bp, Macaca Fascicularis
  misc_feature (1)...(725): n = A,T,C or G
gtaaggagagaacagaggtcncagcctgcttcaggtccaggcagttctgccattgccctcgactcctcagttccagtcatgggccaggcccctgggggacttgggatgagtaaaacatgcacctgtcattaaggttcacctggtctagaaggggaggcagacccacactgcccaccatgacccggacagtggtgataaatacagagcacctcatggccagggcctgggggattcccaccctgccctacccagtgccaataacagagggaccctgcagagttgtgtacacaagatagcagtttagttcttgcacacatactagttgagaagggaaatcagggctgatgaaacagctcaactgtctggcagagccaggctcctcctgccatgatgcagtttggatgcttgtccgtttctaatcgtacatggaaatttgatccccagtgttgaaggtggggcctgatgggagatgttcctgttatcgggatggatccttcattagtagcctggtgccatctttgtggtaacaagtgagttctcacttgattagtttctgtgagaactgtttgttaaagagagcctggcacctccctcccgtcttcctcctcttgctatgtgatgctgctcccctttgccttccatcatgagtggaagctccctgaattccccaccagaagcaaatgctggcaccatgctgcttgtacagcctgcagaactgtgagcca

SEQ ID NO: 544 - DNA, 1771 bp, Macaca Fascicularis
caacaggttgctgaagagcttcagcaagtggagtcttgtgcagttacatggtataatcaggaaaaattaattctcttcatggtgtctaaagatgcttcagtaaaagaatacatctttaaagaactgcacaaatatcttccgagtcatgcaatcccggatgagcttgtattgattgattctctaccatttacatcccacggcaaaattgatgtttctgagttaaacaagatatatttaaactacataaacttgaagtctgagaataaactcagtgggaaagaggacctttgggaaaaattacagtatttgtggaagtctactctgaatctctcagaagatcttttgaaggttcctgatgagtcactgttcttaaatagtggtggagattccttaaagtccatccggctcctcagtgaaattgaaaaacttgttggtacatcagtgcctgggcttctggaaattattctcagcagttccattttagagatttacaaccacattcttcaaacagtgtttccagatgaagatgtgacattcaggaagagttgtgccacaaaaaggaaactcagcgacattaatcaagaggaagctagtggaacatctttacatcagaaagctatcatgactttaagttgccacaatgagattaatgcttttgttgcactgagcagagggagtcaaattttgtctctgaatactactaggttttcaacaaagttaggacattgctcttcagcctatccttctgattcagtttcacagaccaacattcaaaatgtgaaagacttaaattctccagttcttattggaaagtcaaaagatccatcctgtgttgtgaaagtttctgaagaggggaaacctgtgatagggactcagaaaatggagttacatgtgaggtggaggtcagacacaggcaagtgcgtagatgcttcaccgctggttgtaatacccgctttcgataagtcatctacaactgtgtacattggttcccattctcatagaatgaaggcagttgacttttactctgggaaggtgaaatgggaacagcttttgggagatcgaattgaatcctcagcatgtgtatctaagtgtggaaactttaatgtggtggagaaagaagtgtgtttggaagtcaaaatgtggaggaactgtcttttcctctccgtgtttgaacccgattccacatcatttgtattttgctacattgggaggacttttactggctgtaaatcctgctactgggaacattatttggaaacattcctgtggaaaaccactcttctcttccccacgatgttgctcacagtatgtttgtattggctgtgtagatgggaattttctctgctttactcactttggagaacaggtttggcagttctgtaccagtggaccaatcttttcatccccgtgtacctcatcatcagagcaaaaaatattttttggttcccatgattgctttgtctactgttgtaacatgaaaggtcacctgcagtggaaatttgaaactacttcaagggtctgtgcaacaccgtttgctttccataactgcaacggcagcaatgaaatgttgctggcagcagcatctactgatgggaaactgtggatcttggaatctcagagtggacaactgcaaagtgtttatgaacttcctggagaagtcttctcttctcctgtggtcctggaatcaatgctcattattgggtgtagagataattatgtttattgtctggatttattaggtggcaataaaaaataatacagtccttattta

SEQ ID NO: 545 - DNA, 476 bp, Macaca Fascicularis
  misc_feature (1)...(476): n = A,T,C or G
agagagagagataagcaagctggtaataagttcctcagttggggtaagcagaagatactnnnnnnnnnnnnnngggatacctaactaagttgcagggaaagatggataagcttagagaaggctttggtggaagtaatttaaccaagatcttgtgagatggaggtaagagggcccacaggaagctttggaggtgagagacctcacgtatattgcacttggaactgaaagtagtagttcagtagggttagaannnnnnnnnnnnnnnnnnnnggcaagaagcagaagtgggagataaagttggagagttggaaatgttgnnnnnnnnnnnnnnnnnnnttgggaacaatgaggagtgatatggtcagattactaaataaatattctcaacnnnnnnnnnnnnnnnnnnnnnnnctatagatctttgagatgacccaccattttgtttttcagaaccataacttttgtggccaggcgcg

SEQ ID NO: 546 - DNA, 681 bp, Macaca Fascicularis
  misc_feature (1)...(681): n = A,T,C or G
atcggccgcccttttcaacactctctgttatcgtcctgtgtgtacagtatatatatgtatatatattttaattttttaatttaagcaaagactaaaatcaaccatttgatgctgcagggcatccctttcaggacctgggagggggcagagtctggagaaaaggagggagacgcaggtggacttggggcaagttcagatcaggagaggtggagagtggcacatgcggcaggtaccagagtgggcgctggtggccgcccccctgtcccgtgtgtttccaccgcccagtctggcttgtcctggcagtgcttgaaccccacaggctagcaagggcctccgggggccctcccctcggtccccagcctgggtagagccaccaggtacgaccaggtaccagaaaccaccaggtgcacggggcggaaagccagcatccatgccccagcagccccctcctgcctgctcctggctcccagctcccacccctccccagggcccccacctccacggcccacttnnnnnnnnnttctcattttgcagagttgcacaaggagagaactcagcatggggggttggttctttgggttctgtttgtttatttgtttaatttaatgatttgtaaagtgatgttcctcttccttttttacacttttcagctcatatttaacctctgtttggaaaatgatt

SEQ ID NO: 547 - DNA, 751 bp, Macaca Fascicularis
  misc_feature (1)...(751): n = A,T,C or G
aaatatgaattacagcagattaaacatgaacctgttgcatctgtaagaatcaaggaagaacctgtgaatgttaatgttcctgaaaagactagagcactgaataatatggatggcaagaatgttaaagcaaaattggatcatgttcaatttacagaatttaagattgacgtggattctaaatttgaaaatagcaacaaagatttaaaggaagaattgtgccctggaaatctaagtctagttgatataaggcaacannnnnnnnnnnnnnnnaatcaagataaaaaagatgatgacattttgtgctaaatnnnnnnnnnnnnnnnaaaatcctttttaaaaaaaatttaataatgtaataaagattcatgaattctgaaagcaagccaaggacttgctcctatatctgttnnnnnnnnnnnnnnnnnnnnctttgtaacattcctcagtgcctgtccataactgtgaagtattaagcacttagggccagatgcactgtaaacattgcaggtttaaacataaaggagtctttaaaaaaaatcatttacgttggaattttaggttttagaatagagctgacattaacatatatataaatatatatatattttgtaatatgagccagaattctttttcaacaatttaaagcttttccatagagcttatttatatcctttttttttcattttaaatgtgtcagcactgtagtgtaaatagcttttaaaatatctttttagtgtgatttatactgaaa

SEQ ID NO: 548 - DNA, 818 bp, Macaca Fascicularis
  misc_feature (1)...(818): n = A,T,C or G
ataaaaatgtccatcagatgaaggtcaagggggtcgggggcagatgcttatgcgggcacagcgaggtggcagccccagcagcctttcagccctctctcgtgcaggccttgctcggagtcccaggagatccacaggtccagcgtgaacagtgagaggtcagaggtggaaggctcagcaggagaggagaggaggatcagcagaggtcatgagaaggccagaatccagggtcaggcctggtcgaagttgagtttcttagctggaggagtttctcctagcccttcaatatccaccaggtcactgttggcgtcggagtcgttcagagcactgagtgtcacatcagccttctgtttctttatggggggacccccggcctcggggacactggagctgctgggaggaggggcagctggaggaggtgataagacaccagatgccaccttcttgggccctttcttgggtgactcagctggaagggggatgccagaatcttcatataccttgcgtttcacagtggcctttatctgagccctgaagaaaagagagaagaggttaggaaaggagtcatcagagagactaacagaagaagggaggggaggtgaaggggttctgggagtcccttgaaaagaatccaggtcggggccccaacccattgggagggttctcactttcccaaagttttacactcactcagggtgggtggaatgtggagagtggagtccctgagatgagtagtgngaaaggcccatctcctcattctcttccgggagnnnnntcgggtaaggcttggtgatttacaggtggattgggatttactgatc

SEQ ID NO: 549 - DNA, 2156 bp, Macaca Fascicularis
gattttattatccccattttataaagagtgatattgagctttggagagattcaataatttgtccaaaggcacactgataatggtactgaggcgagatttaaatgacataatgaaactatttgttcaaaaggaagctggaacagagctctcatcttcaagtttagtgttagagaagataaaatgtctgtgtgccattgcctttacttctctcttaaaaaatagctggaggagtgaatcatggcttagatcgggcagagacattccagtgacctgtaagaatattcgttctttctagccacacagatcattattaattcatttgaggcatatgactttgcgctgtgctctgtaaatgctgccgcagtggtggcatgtgaatgattctcttctcctcatcctgctgtgaggtgtcactcttcccttccagggagaatagaccagaaacaactgcttctcaacacagctgtttgtgatcaattttaaaccagctgttcagatccaaatccatgtaatttattgattgattgttctagatggtgctgagtgccaatgctagtcacatgtttagaaaaaaatcaacaaaaactggctcagaaaagagactcatttctgcaacatcaagaagctctccttcacattcagactcttgttcaaaaatcattaggctcctattgtttttcagacaaccaggcagctacccaggagaatgatgtacacagatgaaagacatagccacctgttctcaagcatttgcaatctagcagaacagaaagttgtaccaggaatcatagcaagtgtattaagtaccataacctatatggggagctacaggaactcaaaagaggaccaataggagccaggagagatgagaggttttggcttcctgatggaactaactatggctaggtcaccaaagtatcatgcaaattttgataggacaagaaaagtagaatgatgattctaggaaaaccaaaagcatatgcagaggctcaggggcatgaaagcacagcttgtttggggaagtgggaagtagttaagtttggcaacacgtggtacatttggagaaatgtcaggagattcacagaaaataattttaaatgaagagcctgatgtgtggctcagtattatggaggcaaatagcttcgttttaaattaaaatggagactctgtttctaaattttttcaagcaatttttttttcagtgttcccaaattttctttgacttataaagcagtacaatgtaaaacaattttttaaaattttccttgtagtttctgaggaagacaaaggatttggaccaatttttgaagagcagccaatcaataccatttatccagaggaatcactggaaggaaaagtctcactcaactgtagggcacgagccagccctttcccggtttacaaatggagaatgaataatggggatgttgatctcacaagtgatcgatacagtatggtaggaggaaaccttgttatcaacaaccctgataaacagaaagatgctggaatctactactgtttagcatccaatagctacgggatggtcagaagcactgaagcaaccctgagctttggatgtaagtaaactgtaactttttaaaaagggcaagcgtgtttcggtgagttcagcaagaagaaccatcaagaaaggatagtgagaggaaggcatcatagatgaggtagatcttacaagatgagtgggccataattgtgtgatggagacaacaaagcaccacaaggcataccatgaatgcactcaaaacaatgaaagatgatgttgtcaaataaaggaaggctagggtctgaggatcttgactctctaaaaattagcatcaggatgagcgcagtggctcatgcctgtaatactagcactttgggaggccaaggctggtgaatcatgaggtcaggagattgagaccatcctggccaacatggtgaaaccctgtccctacttaaaatacaaaaattagctgggcgttgtggcacgtgcctgtaatcccagctactcggaagtctgaggcaggagaatcgcttgaacccgggaggtggaggttgcaatgagccaagattgtgacactgcattccagcctggtgacagagcaagaatctgtctaaaaaaaaaaaaaaaaaaaaaaaaaaaaaaaaaaaaaaaaaaa

SEQ ID NO: 550 - DNA, 749 bp, Macaca Fascicularis
  misc_feature (1)...(749): n = A,T,C or G
gcaaaatcagtagcaagtgctgggaaaggcgcatgccagagatactcaagagttcccgagacttgctnnnngctgacccagtgaagaaaaacccagagactcatgtttccagnnnnnnnnnnnnnnnnnnnnnnnnnnncaggnnnnnnnnnnnnnnnnnnnnnnnnnnntctgaggctgcccaggccgggaaagtccaaggaaggggcctggtggtgctccacttccagttctttaaagaatgctgctttttattctcttaaccccttcaagtgggtgcagacttcttgttagcagctggaagacattcctcccacactttacccttcctggcccaagagagcatccagaaggcagttggacctggtttttcaggtactgggaacaggggactcagtgcttggactctgcttagggtagggacggtaaatatcctgcctgcatggctttaccctccnnnnnnnnnnnnnnnagggatcttctggttgtcacagagtttgattgaatctagctgcagccacgtggccatctggagctggtgctgtaggtgaccatctggtacattgaggggacctgtttgcctcctccactctataagcagtaatcttgggagaccgggaagagaaggtggtgggctagtcctgtgtcctccttcacttcccatgcccctgtgttacccgtctgtgtctcccatgcagaaggagaggaagaggcattaagggatgaagggtgattatgtattatccatt

SEQ ID NO: 551 - DNA, 702 bp, Macaca Fascicularis
  misc_feature (1)...(702): n = A,T,C or G
ggatagcgctacctcatctgtaaaatgggtcttctctcctgtnnnnnnnnnnnnnnnnnnnnnnnnnnnnnnngtcatgagccagcgaaggcgctgctggcttgaaacagctgtgcaaacctcagaatcacggtcttgactaggacggtcaccgccccccgcagcccctgggcaaggtgcccctggtctgtagggcgtgaaatttcaattccctgccctgggaagtcccctgccgacctctccccacggccccacgcggggccccgcacgtccacccgccgcgcacaggccaccacgcattcccgcctgaagaagttttcgtatgcgctgttctnnnnnnnnnnnnnnnnnncaccgacctcgaggaaatgccaccttctccaggggccttcccaggtcccctcccctgcccgcgttcgccggccgccctttgattactgggggtgcggtgggggtcactggactcgctgccgatcccaggagcccagcacggcgccgcacgcggtgggcccaaagcccgaccgtggggacctcaaaccagaggccctcaaggctcgttccacccnnnnnnnnnnnnnnnnnnnggcacttgggaacgaaggtccctgccttcccgcgggaagcccctccgtggtgcgcgccgtgggtctgcgggttggtcttttcactcgtcattactattctgtaagtccaccattaaaa

SEQ ID NO: 552 - DNA, 579 bp, Macaca Fascicularis
  misc_feature (1)...(579): n = A,T,C or G
atcacaaagatgggactgtctgctcagnnnnnngntgacatgatcctgaccggtggtcctctcccattccgnntgctctaccatgacacatgtataggacactgtgctgtgtgcagtggagaaatctccctgagccaggagaaagttcagacagtgcctctcgattgtgttttgccttccccagtgnnnnnnnnnnnnnnnnnnnnnnnnnnnnnnnnnnnnnnnnnnnnnnnnnnnnnnnnnnnnnnnnnnncaggcccnnnaggtccccctgcagtgtgctggctggaggcccccggaaagccagcggcagaagagcttcctgggcggcttcccccaggacagtgttcccaagccagtccaaccacaccccacccccgcgtccaccatgaccctcttcgccacgctgacctgtgttccctccccatttatnnnnnnnnnnnnnnnnnnnnnnnnnnnnnnnntctctatctctatctcaacttcatggnnnnnnnagttgtaacttcttccttccctattacaattagaacctgagtataaatttactttttcaannnnnnnnnatgagaggttgac

SEQ ID NO: 553 - DNA, 2047 bp, Macaca Fascicularis
  misc_feature (1)...(2047): n = A,T,C or G
tttaatatggtatgcatatggctttaatttctaaggggttgggtcctcccccaccactgtatttcttgggagaacagataacagcaaaatgtcctgctgtgatacagtgtttttccaaaatgaaaaaatagcatttttctgatgactcactggtcaaatactttgaaatgccactcttcgtggagggggatgggatggtaggtgacagtgacatttccatacttaccaccttggtgatctggtgtctctccaccccaaaataacccccaatgttctcacttagcaacctcctcccaccccaccttaactttctaggagggggttttcgtataagatttttgaaattctcttcccatctctcttatcagtcaaggctctgctccctaactgggaacagacttctgattgccgccacgagcaagaaagacaaccacaaagcaaagaggctgtgcaggtttgagtttccattctagcggtgggtcagcacctggcttagatttcacaccctgggcagcagcagccccgcgctttgctgaggtgggaaagagccgccaatcaccacgtgaattcctgctgctgttctcagaccacagaagccaatgtgtggtattgctgtgctggtgttcagcattttcccccttaaaccctccctcgtcccagttcaaaatgatgggtgaaagctgaaaaaacacccagagcccaaagttcccaaactcctattataacagcccatgcctgccgcagcatctatgaaagtaaatagggccgtgtctttcttggtgtggtcagttaagtatgctgacggtggaggagtgtgcgtgagaataggatgcctgaaatggcaaacatatccacccacagaaacacataatctcacaaacacctattcactcaacactcaccctttgtgtcttctgccgctttctgtggaccacatttgagtcacaaaatcccaggctcagcttgagtgcaatcacaaatgtatccacctacagaaacacataatctcacaaatacctattcactcacacactcaccctttgtgtcttcctgtcgctttctctggaccgcatttgagtcacaaaatgccaggctcagcttgagtgcaaggctagccagaccacacgtagggcatgaaggagaggccgttgtggttctcagtaacatccacgtatgtttatgctttggccacccaaatcacctcagctgcaggtccattcatcaatactgtgtgtctgccaaagagtttctgtttatgtacatctaagaaatttcaacagaaaggagataagcccaacaccattatccattaaaaaaacaagtatgcatctcgttctcacttataagtacccttggccaggcgcgnnnnnnnnnnnnnnnnnnnnnnnnnnnnnnnnnnnnnnnnnnnnnnnnnnnnnnnnnnnnnnnnnnnnnnnnnnnnnnnnnnnnnnnnnnnnnnnnnnnnnnnnnnnnnnnnnnnnnnnnnnnnnnnnnnnnnnnnnnnnnnnnnnnnnnnnnnnnnnnnnnnnnnnnnnnnnnnnnnnnnnnnnnnnnnnnnnnnnnnnnnnnnnnnnnnnnnnnnnnnnnnnnnnnnnnnnnnnnnnnnnnnnnnnnnnnnnnnagtgactccgtctcaataaataaataaatacccattaagcaatgggtgtacatggacatacagagtgaaataatagacactaaagacgacaaaaggttgtgggggagggttgagaaattgccttttgggcacagtgtcactttgggtgatgggtgcactgaaagcccaggcttcaccactccttcatacatgcatgtatgaaatctgcactcgtacctcctaaatacacacatttttaaaaaattaataataaaaagttggcttaaaagcaacagtggcagccaggcatggtggcttacgcctataatcccagcactttgggaggtcaaggcaggtggatcacctgaggtaaggagtttgagacccgcctgaccaatatggtaaaaccccgtctccactaaaaatacaaaaaaaaaaaaaaaaaaa

SEQ ID NO: 554 - DNA, 820 bp, Macaca Fascicularis
  misc_feature (1)...(820): n = A,T,C or G
gcatttccnnnnnnnnnnnagcttaaatattaatcttgcttagagtaggttatccacttatatgctgcgnnacggccgtgcctttgaaactccttgtttaaaacatgatatgatttttgtgnnnnnnnnnagaaaagaaaaaaaaaaatctaccctttaattcttacttgcaactcaacacatctccctgccgtactgccnnnnccaggaactttacttcagggctctcccgattgcagctgtgcccagtgtatgtggatctagttcagtctttggaagctagcggtcatgccctccccgtactgtctactgattctacatagatttgttatcctcagcagacaatgttaacaccactgtaacagtgtacaaattcgtattttatgtatttaaagtaatccatactgtgatttggtttttccctgcactgttcattctggcatcagatgagtttttgtgttctgaagtcctgttgtggttgacccgagactacagccgtgagaccctgaagtagagataaggtacacatacattattggagtaactgtttccttggggccaatctgtatatgcttttagaagtnnnnnnnnnnnnnnnntttttgtctataacagtctgtcatttatttctgttgataaactatttggacagagtgaggacgtttgccctgttatctcctagtgctaacaatacactccagtcatgagccgggctttacaaataaagcacttttgatgactcacaagatgaatcctttgttcctctgtcccaattgtgtctgtctgttccaaacacattttaaatactcggtcctgacag

SEQ ID NO: 555 - DNA, 876 bp, Macaca Fascicularis
  misc_feature (1)...(876): n = A,T,C or G
tgttgtnnnnnnnnnnnnnnnnnnnnnnntgcttccaactggatatacagtcagctctctctatccctgggatctgcatttgtggattcaaccaactgcggatcaaagatatttggaaaaaataaaaaataaaaaataaaaaactatgacaatttaaaataatacaatttttaaaaaatgcaatgtaacaattatttatatagcatttacattgtattaggtattgtaagtaatctagagatgatttaaggtatatgggaggatgtgcctaagttatatnnnnnnnnnnnnnnnntttatataagggactttgatatataaaggattttggtatctgctgtgggttgtggaatcaatcccctgtagataccgaaggacaaccgtactcatggaatctcaaattcaatgtatatacaaccaaannnnnnnnnnnnnnnnnnnnnnnnnnnnnnnnnnnnnnnnnnnntattaatggcaccattctccnnnnnnnnnnnnnnnnnnnnnnnnnnnnnnnnnnnnnnnnnnnnnnnnnnnnnnnnnnnnnnnnnnggataattggaacattctacaggcttgacctccataagacctctcaatccactccttccttttcatctctactattagtcatctggttctggccctcctgagctcctccctggacagtagcctccaagttggtttattcacattggtgcctggtcttcccactataatctaaatcagtcttcgtaggtatatttgtaattatgttactaaactgtaagctgcttgaagnnnnnnnnnnnnnnnnnntcatttttgtatcccnnnnnnnnnnnnnnnnnnnnnnnnnnnngtatatattnnnnnnnnnnnnnnnnnnnnnnnngt

SEQ ID NO: 556 - DNA, 744 bp, Macaca Fascicularis
  misc_feature (1)...(744): n = A,T,C or G
aggaaatacagagctatgaaacaannnnnnnnnnnnnnnnccaacaaannnnnnnnnnnnnnnnnnnnnnnnnnnnnnnnnnnnnnnnnnnnnnnnnnnnnnnnnnnnnnnnnnnnnnnnnnnnnnnnnnnnnnnnnnntgtgtaccagataatgtgaattaattctaacttaaaatgggaagatatacatattgtgtaaaaaatccctgagctgccctactgaactaagtaggtttcaacttctgttcannnnnnnnnnnnnnnnnnnnnnnnnnnnnnnnntttgatacaaacatagcaatttagctatactaccgattataaattaatgaacacccaattttgaatgaaaatacaatacacttaatcctgtaacttaataggacttagccaattatttttagcttatttctccattttactgacaagagaatgccatttactgaatatnnnnnnnnnnnnataatttcttatttctcttaacttttgaaaggaatcccttttttttttcacccaatnnnnnnnnnnnnnnnnnnnnnnnnnnnnnnnnnnnnnnnnccaagtttctgacaatgatttaaatgtagttatagaaataatatgtgtggagttattctgacnnnnnnnnnnnnnnnnnnnnnnnnnnattacatacataactattcaattatttccnnnnnnnnnnnnnnnnnnnnnnnnnnnnnnnnnnnnnccaagtcatctgttgtgtatcaattaccttc

SEQ ID NO: 557 - DNA, 2370 bp, Macaca Fascicularis
tgtgaattataatgaaatagtgggggtaattgatttggggaattaggaccaaaggacacatgtttttatgacacatcctattatgcccagtggcacattatttgaggaaaggggttaagtgtctcctgttgttatctatttgccaccttttgccgcctggccacgtttcccccaagtcaaacactgttccctgtagagtggtggaggcctcttgatccgtcctggagagtctgggctgacttgctgcttcctgctcctgagggagtccgcgctctgctcttgcagcctggttcccaagtgtgcacttctcaggaaactgaatcagcttgtctcaggatccttcaaagggaattctgaataaaaccattttttacagattccaaggacacatcttggacatcctgttttctcttaagggtgaaatgaccatgaaataatcatgccccagatgaggccacctgctcgcagcaaacccagatccagtgtcagtgagacagtggctgtagatgtgaaccaagtactgcaagtgacccagctgcccagcagggctccagagtttcttctgctgccacagttgtcaaaataaatacttaagtatcaaccaggacttgaaggtgaggcgcggaggaccctcagtattcagctcttgaatattggttttcctgctgagagtcaaattgcaaatcattcttcattttaaggtgttaggccctgttttttttttcttgccagcaatagggaaagttgtctgtttattccagatggccctagtaagtcaaccgtcttttctgtgcctgcatagcatgctccagacctcagcaaagatacaacatctgcttcagtaagcatcctcaggtctgaataagtgttcccttggaaactgctcagatgggatgaaagaaaagatacaaccacagctccactgggtcttctcaatttccaggactctgcttttcatgctatttcgtcaccaaacttattttacactgacaaaaatgcggtacctacctcttaaaatgtgtatcactggggaatcagtaacacatacattcgtggtggttgagattttagttgtggttgtacaggaagaggcacattttaaagtaacactgactccccatccagtaaaaccttgggcatctggaaacaccagaaataagatattttagttggtcatgtttttcatacagttgatagtgcacctctgaaaaagtataaggtttaattttattttagacctttaatcaaaatacttccagactatatttccaaccacaaatgttgctgccagtgtagtctcatcacgtgtgtcaatagatgaccgcaccacacacaacttagggatatcctcagggcactgagagaagatttgcgtttacaccaagtggtttaacaccagttctttttatatttttgtacccctttttttcagttttgtatgtctttgctgctgtcactttttgttactgtctaggaactacctataaaccctcctcttcctttttctctttgtaattctaatgtggggagcaaaagtagttctgaactggagtcctgaaaggttatcctgaatcgtgtggcctttgcgttgtctattttttgttactccgaagctcttgttcttttctcctagcaatgggcttggatagctgagtctcagaaagatgttcgtgtgtaagatgctcagaagggagaatgaagcaaaagctgtaggagttcaccctgcatttgacagtctgcgagaaagcgatgtgattagatgcaacagcatttctgttaactgcagagcgtttctcctcgcaggagaatggtaggctcgaagacagtttgagcatccacaattaagaaaccagaatatcatgcagacaaaacagcgtcagctgtcaccaagtcatttgcaattcgtgttcttaattctctaaaacattttgaaaagcatcctagatttctcagccactagttatgttttaagctcagcaagtagttctcaaacttcagaatccatttagaacacctggagagctagttaggattcttcagcaaccaccagatggtctgatccattgcgtctgggattggatttacaaatctagttttggtacccatgccatgtacctggtacacatggctgagaaatacagatctaggcagcgtatttaatgtgcttgcagagggagccatctcttgttcattgaggttaccaccttttcccgttcacactttggttccccttcactttggtgacagaaatgtgtcattaatttctctcctcttggtataaatattaagccccagactcatttgtaacgatggcatgcaaaaattaaaaccaattgaactgaacaaaaaaaaaaaaaaaaaaaggccgca

SEQ ID NO: 558 - DNA, 776 bp, Macaca Fascicularis
  misc_feature (1)...(776): n = A,T,C or G
gtgcagatgtagatatttttcataaacaagttctagtcaaagtgaaaatttcatagtaagattgatatctataaaatagatataaattttaggagaaagagtttagtattatcaaagggataaagaaaaaaatactatttaagatgtgaaaattacagtccaaaatgttattctttccaggctatgtataaaatacatagtgaaaattgtttagtgatattacatttatttatccagaaaactgtgatttcaggagaacctnnnnnnnnnnnnnnnnnnnnnnnnnnnttccctcactaattggtactttttaaaacataacgtaaattttttaaagtctttaataaataacccataattaaagtgtataatagaaaaaattttaaaaatctaagcagcttattgtttctctgaaagtgtgtgtagttttactttcctaaggaattaccaagaacatcctttaaaattttaaaggnnnnnnnnnnnnnnnnnnnnnnnnnnnnnnnnnnnnnnnnnnnattcccaaatgtggttacattagccattcatatatatcagaagtgcagatttggggcacttactggtcaccttgtaacagttttgtgtaactcccagtgatgctgtatacatatttgaaggatctttctcaaagaaatattaagcatgttttgttgctcaaagtgtttttgtgaattgcttggttgtaattaaattctgagcctgatattgatatgattttaagaannnngttgtaccaannngaaattatttggagg

SEQ ID NO: 559 - DNA, 695 bp, Macaca Fascicularis
  misc_feature (1)...(695): n = A,T,C or G
atagcataaaagtggaggcctggtnnnnntccannnnnnnnnnnnnnnnnnnnctcctccatctgaatatgaacctccagggtaagaatnnnncagacatgtctatactgaacagnnnnnnnnnnnnnnnnnnnnnnnnnnnnctccttttgttcttcattgacccattctaattcctgttaggtgtgagaagaattgtcttcagttctctctccattctcattcgnnnnnnnnnnnnnnnnccattgaccagttgagaannnnnnnnnnnnnnnnnnntggtattctattggtaaggcttattaccaaacttctgataatgaagnnnnnnnnnnnnnnnttatccagcccaccctaggagtgtttggatttgatcatggatgtagcatacaccaaaatccaccgagacctttgcaaaattaggctacttgttttattttgccagattatcatgggagagtctttaactagttctgaatatttgtaagtctgagtacttcatagaattataaagcaggtacagctgaccccttctcaccatgttnnnnnnnnnnnnnnnnactgggtgcagtagtgagggataataatcttctgatttatcaaatgctggctgtctagagcaaattgtacactctctttgtgaatggtcctgtaacgtgtatgaacacatttctgggtgccttagaagttgtatt

SEQ ID NO: 560 - DNA, 2007 bp, Macaca Fascicularis
  misc_feature (1)...(2007): n = A,T,C or G
tttcaggctctctacgtctttattacatattcaactattcattgagccattacaatatgctgggtactgtgctaggtgtttggcatatagtggtgacaaatatccctgaagttttcatgtctaattgctaatcctttttctttcttctgtctatgagtaggaactctctccgtccctgtagaatctcttggacatgtttatctcatgcttatggggtccctgtttcttggagtgggattgacattggtggattctgcttcagtgtatccttctcgcggtcttctttgcgtgcatgagttaaccgtgtgcattccattgtcctttcccctaggccaatctctcatgcccattccatttcccctgccttataggcctcctttcgtgtactctgcccaacggttttgggggaccatctgggccagaaggggagcgcagcttggcaccccctgatgccagcatcctcatcagcaatgtgtgcagcatcggggaccatgtggcccaggagctttttcagggctcagatttgggcatggcagaagaggcagagaggcctggggagaaagccggccagcacagccccctgcgagaggagcatgtgacctgcgtacagagcatcttggacgaattccttcaaacatatggcagcctcatacccctcagcactgatgaggtagtggagaaattggaggacattttccagcaggagttttccacgccttccaggtgaggcttgaaagccctccttcaaaggagggctggggcctcagggacgtagggacgtagagagaatactgctgccttttctcccatagggctgtacttgggggaggaggaagctagagctgaaggggaggactctgcaggcaaggtgccgagtccttggaagctgatgggagagtctttacctgggaccctgacatgttctacttgagtagtcatgttctttctgggcagtgggcctttcgcgggtcctcagaaggacccatcatgagccgaataaaagggggtcagttagaatttgtattctagggagtagtaggtatttctgtgtgccccagctgcatcaacttttgtgtgactccacccttggcctactcaggaagagcctggtgttgcagctgatccagtcataccagcggatgccaggcaatgccatggtgaggggcttccgtgtggcctataagcggcatgtgctgaccatggatgacttggggaccttgtatggacagaactggctcaatgaccaggtgagaaagggtagagaaacaggcctgagaggggattcagggagcagggtgtctggggccctctgcatgggggagccctgtacccatgccgcaccctccatggcaagctgcctcccatcttctccccaggtgatgaacatgtatggagacctggtcatggacacagtccctgaaaaggtaggcccaaccagataggtcagtacccagaagaacttctgcagttttaagcagctttttaagctcctttcatccttttcattttacatagagagggtctctgtttcagggagagaggtggtagtggtagtgtattaatttcaaatctgtaatcttggccctggatgtatcagttgttttcctttctgccggtatttagtgtttttccctatggccagccccaagaatcgggatgggatcctattgtaaaacaaggttaaaaaaacaaaaaaggctgccaggcatgnnnnnnnnnnnnnnnnnnnnnnnnnnnnnnnnnnnnnnnnnnnnnnnnnnnnnnnnnnnnnnnnnnnnnnnnnnnnnnnnnnnnnnnnnnnnnnnnnnnnnnnnnnnnnnnnnnnnnnnnnnnnnnnnnnnnnnnnnnnnnnnnnnnnnnnnnnnnnnnnnnnnnnnnnnnnnnnnnnnnnnnnnnnnnnnnnnnnnnaggcggaggttgcggtgaatcgagctcacgccattgcactcctgcctgggcaacaagagcagaattctgtctcaaaaaaaaaaaaaaaaaaaaaaaaaa

SEQ ID NO: 561 - DNA, 729 bp, Macaca Fascicularis
  misc_feature (1)...(729): n = A,T,C or G
tgctttctgattcaannntnnnnggctanggccaaaggctatactcatgtgagccatgtgaannnnncccacaaggcagcttacttcatcagagctagcaaaaaagagaggttgctagcaagatgaagtaacaatcttgtaattgaatcaaaaaagcgatatcccatcacttcggccatattctatttgttagaagtaaaccacaggtcctgccagctccatgggagtgaccacctcagtccagggaaaacaactgaagaccaagacggtgagctctgattgcctcagttggtcatcaactattttcccttgactgctgtcctgggatggcctgctatcttgatcatagattgtgaatatcaggaggcagggatcactgtgaaccatcttagcagttgacctaatacaccttcttttcaatatctaagaacttttgccactgtgactaatggtcctaatattaagctgctgtttagatttatcgtatatctatggctacatggttatattatgctgcggttgcattcggttttatttacagttgcttttaaaaatatttgctataacatttgacttctaaggtttagatgccatttaagaactgagatggatagcttttaaagcatcttttacttcttaaccattttttaaaagtatgcagctaaattcgaagcttttggtctatattgttaattgccattgctgtaaatcttaaaatgaatgaataaa

SEQ ID NO: 562 - DNA, 1642 bp, Macaca Fascicularis
atacattacttttgtaagctacttttggactttcctacaagggctcacaaatgaacacttaagtctgcacatggtaatgctacagtttagtttcaaaagctttgccatctttgtacacgatgctggctttgcataattctttacagtttgattgaattttgacgtgattttattaaataagtatgggaaactgacaaatgttaatagtgacagttaatattaagctgttaatagcaataagcagatattttgtaaatttaacaaaataacacaagatggaaatcaatatgcatgtaggaagatgtgaggcttttaacatcaattggacactgagtggacttaagctggttgactgtcatgttcagatgtgatgaagaaagaaattaaagaatgtctacgatgaattgagaacatatcatctaagatcagacagtttataattttaaaaatctctgggaatgggataaacattggtcaactcatagcctcttgcaggccagcactgtctgaaggtaggggatggccttcctgcctcatccatcactgtcaccatctctgggagccctgtctctgcacctcaggcgtatcggttccctgctggccccttcagcattctccatacccacaacaattatctgctggcatctcagtgattacactgtgagcccctcaaagatagatagtatctcattgatcttcctatcggtgaccaatagatgcttcatgaagtatatttcatgcgacagaacacacatgctccaagggcatgatttttctaaccttgccactgtctccagagaaaagaggaagttcttcttccatatggactcagtcctgggcagtccctgaggaaaaagtatgtggtaaaatcaggatcccttatgttcgatggaactaggcaggttaaaattactttactgctaattagcagagaaaataagctaagctcaaatgttgtgaagggaagataaaggaatcaaactttaggcatgaaaattaccagctacaaaactccaaaaatgttcgaattgatctggaactactggatggcctcttacgggaatcttcctgctaaggtctgaaaaagtagtctcaaaatatacatgggtccttaagactataaaggaaatgagtagaaaattttcatttcagagttgacttcctatgataaggaaaaataaattttagaccttggtcaacttttctctgggattggaaagttccaaatcactgggaagagcagacatcaattctcagttccacagaagaatatgtgatttgctaagctggaaaaaaaaaaggagaaatgaatgaaaatgatgaaaaaaatgaatgaatgaatgcggctttgttattctggacttaatgaaaaatctgaaacaacagccacccaatatgtagcaatgcatttaatgttcttgccttaataaccatgctaacatcacctactttctaccaggtagaagtaacagcaggagcagctctagcagaagctatgcaatatgtctggactgtggttcaataattatgaggtcaactatttcatcactaaaaataaataaaaataaaataatctctgtcctccaaaaagcaatttaaaaaaaaaaaaaaaaaaaagaaaaaaaaaaaaaaaaaaaaaaaa

SEQ ID NO: 563 - DNA, 2096 bp, Macaca Fascicularis
gagatttgcaagatgctgagtccctggtatgatgagttcctggatgaagaggactactggtttctcctttttacgacgtaactaaaatgtcctttgaggagctttgctacaagaatccaaagatagccgtagagaagatcagtgacgactacaaagtatactgtgagaaagcacctaaaatagattttaaagtggaaattatcaaggaaccaaagatattttcacgctcaaataggaaaatgtccttcctcaaaaaaactcttgtaaggaagccatcaatgagacccagaaacttgacagaagtcctcttaaatacacagcacttagagttcttcagggagttcctcaaagaacggaaggctgaaagcccattgcaattcctcatagctgtacagaagatcagtatggagaccagtgaaaagatttgcaagtctctcatagaaaacgtaatcaagactttcttccaaggccaactctctcctgaagaaatgctgcagtgtgatgcccctattatcaaagaaatcagtcccacgcgtcatgtcaccacaaccaccctattaattctccagggatatattatgaaatctatagaagaaaagtggtttaaagattatcaagacctgttcccacctcgccctgaggaggtggaagtgcaaagtgaagtacaagtttcatctaggaagccctcaaagatagtgtcaacttacctacaggaatcccagaagaaaggctggctgagaatgatcagctttatcaggagcttttgcaagtaccgcagatttatgttgaatcctaataagcgccaggaatttgaagactatcttcgccaggaaatgcaaaacagcaaggaaaatttcaccacatcacacaacacatcgggacgttcagctccaccctccacaaatgtccggagtgcagaccaagagaatggagacacaacccttgtaaagcgtcgtgtatttggccacaggattatcactgtcaactttgtgatcaatgatctatatttcttttctgaaatggaaaaatttaataatctggtaagttcagcccacatgctgcaggtcaaccgggcatacaatgagaatgatgtgatcctaatgcggtccaaaatgaacattatccaaaaactcttcctgaattctgacatccctccaaagctgagggtgaatgtctctgagtcccagaaggatgccatccttgttgccatcacagagggctacctagatcggagcgtcttccatggggctatcatgtctgtcttccccgtcattatgtacttctggaaaaggttttgtttctggaaggcgacccgctcttacttacagtacagggggaagaagttcaaggacagaaaaagccctcctaaatctacggagaagtatcctttctcgagtggaggagacaatgccatcttaaggttcaccttgctcagaggtattgagtggttgcagcctcaacgggaagcaataagttcagttcaaaattcttcatcaagcaaccttactcagccaagactcgtggtatctgccatacagctgcatcctgtccagggacaaaaattatcctacaccaaaaaagagaagaagtaatcaaaccagatccccagcagaggcaaatcatctctcagaggcctcctaacactgacagaaccttttctgctcaaaaatgaaaggccccggtgccatcttccccagaaatgatcaagaagggcaatggggtgacagcccaaatatggcaggaccagactgcaatgggaatctcatacagagcattcaggctaaagggtgacagaaagaggcagaggaaagcagaaagagcaagagtgactgagacctgccttcaccttcatagaagccttttctgatacatgtcagagagtgacatgaagtctcccctctttatacagaagtatgaaaagacatctatccctcattttgagagcttccaactgatccaagtgtcatccagaagaggaagtggcccatgtgtgcaggacctcagggtgccagccctcacccatacacctccagggctgcaggtcattagccagaataaaggatgtccacattcacaatcaaaaaaaaaaaaaaaaa

SEQ ID NO: 564 - DNA, 704 bp, Macaca Fascicularis
  misc_feature (1)...(704): n = A,T,C or G
gcccttgggagaggtgccaactttatagatctattaataaaagannnnnnnnnnnnnnnnnnnnnnnnnnnnnnnnnnnnnnnnnnnnnnnnnnnaggctcaaccttggccaacaggctgcagcccatcaccctaatttcaccccgcttcttacccaagcatccaaggctaggcagcacccacccagcagcttccacctggccgaagcctgcacctgctccagaccaaggttaggtggaaacttggcatgggaagagagggctcacctgtgggcaggatagaatctatccaagaaggagacctgaaaaattaaagcctatgagacaaggggtgatcctgaaggcaggcaggagaaagggccggaggaagaggccactggggaattcttcctggtgaatactgaagttactagatgttttgtcttgcaaaactcaagggaaaactctcaaactctaacatttgtctgttctgtgtccagattgtccttttgaaacggacccaactttcagtaaagaaacttgcgctggcctgcccagcctggtgtgctagttctgcggaaactgaccggccagggtggccacgggaggaagagcctggttctccttcaccagctcctgtgaaaaagggacctggtcaataaggcaaatgacgtcacttgccaacatttgatattgccaaagtgcttttgtttggcactactatag

SEQ ID NO: 565 - DNA, 774 bp, Macaca Fascicularis
  misc_feature (1)...(774): n = A,T,C or G
agcagcagctcccnnnnnnnnnnnnnnncctcaagccccagcaggctgagccccanncncgatgggcctccacctctggctcagcccccactgatcctgcagcccctggcttccccactgnnnnnnnnnnnnnnnnnnnnnnnnnnnnnnntcatcctcaaccctgcgctcatcgaggccacctcaccagtgcccctcctggccacaccccgccccacagatcccnnnnnnnnnnnnnnnnnnnnnnnngnnnnnnnnnnnnnnnnnnnnnnncagtgcttcccaccaggctttccttgaccccacttctggctgtcctgcgggccacaggctctnnnnnnnnnnnnnnannnnnnnnnnnnnnnnnttggatggggacctgaaaaagagnnnnnnnnnnnnnnnnnnnnnnacccccaatcagctgtgggacctttttcctcctctgtgctccattcctggaggttcagcctgggagtgcannnnnnnnnnnnnnncagcctctgcctccagcctggcagctctgggagaggcatccgtgtgccagccctgcagtgcctgcccacnnnnnnnnnnnnnnnnnnnnnnccaaccactctgcactttgttttccactcccattagccctgggccacctcctccagttcttcctcttttactaattagttggtcagtttggagagttgactggcaccatggagggtaggcaggtaggggctgggtgggggactgcccacaggagcatgtacatatggaaaaacagaacaacaatgg

SEQ ID NO: 566 - DNA, 2007 bp, Macaca Fascicularis
atcatctagacctcccaggtttgctgggataatgtatgtaaaatgcttagtgcagctcttggcactatcgaaaaacacctccataaacagtaactgttactactttaacaagagaaacatgagaaaactgacttgcgcatgtctcctgagccagtcatggtggagctgggattccagtccaggcctaactctgctctgccacccaatgaggtggaatcaagagatgccctttcttataccgcttcatccccgctgggtctgggacatcacctgcatagaacatgctcactaaatatggacatagacaactgggatgaggataatggtaaagttgaatgcacctgtggacaaagatgtgcagaaagaggatctagggggctctcaggcctagaggccagccttgaggaggaccggcctctcaggacaaggggcagcgcagaggaagggctggagttccacaggaaaagagaattgaggccagtgcttccactgtacagaggaggagactgtggcctggggctgcttacctgggaatcaaaaggtggaaggcaggaaaggctaatgaagtcccacctggaagagctacctgagccttgagttgtgacacccactacccacggccatagctgagttgggagttccaatgttgtgagatagaaagaaaatctatgaacctgaaccaggagacatgccaggcaactaaaaaagtatgaaggctttagactctaccccacaacacaaggatttagagtgtcagagacagaagaggccttggggttcacccaactcaattccttcttttcactgatatgaaaactaaggtcccacttgctgaaggacctgcccaaggccacatatgaaagtagctgcaggtattatggggaaggccagctggagaccagtatcagatattatgaataatgtgctatgaacactactgggtaacaatcagccaccattcccacgtggctgcaccctatggatctggactgatggagccccagggcattacctcaggtgggcaaggtgggcactcaggtgggacacttggtgggtgagaccaaagatcagaaaagaaactgtgagctgccaccaggccctctgtccactcccctcttagaagttgtcttagtacttttaaaagttgtgttgattttaaaataataacccatatgctctaaactttaacaagagaacttttagagcactgcaggctcctctgaaagaagtggacctggtagggaggaaaagaaaagagagggagacagaaagacatcagcaactccaacccccttggacatccagcctgaggcatcaacttcaggaatctcctccaacttcctgcagaagcaagagcagtcagccaggggccagtgcaccagaaggttcagctcagcccaggcatgcctctggttagcccccagggggtacttagccttttgggatctagacctaaattctaaagccagaagagttcacagcctctcccagtgcctggaaaagtttcagtttgggacattaccttccacccccaatctttgcagctcagcatcttgcttaggaaaagattcacatgcctccccggttgccaagtttccccccctcccaaagaggggctgtgggtggggagggggcctcctgagtgcccatccttcctgcccccagaagccgaagactcaaccctaagccccatgatgggacacgcagaaaaggagctcctggcactttaaggctggctgagcctaattgcccagattcccctggcagccagataaacagcgcagccggctggcgccagcaagaggcaaactgcacattatcaccccttcctcacctccaggaggagctaggaggagcaggcaagcagggctaggggccgctgagccgggcagggcgggggcttggaagcccaacttgaaattgatctcatttcaaagggataatgccaggccaaataaaaggaaaactttctagcccattctaattcctataaaaaaaaaaaaaaaa

SEQ ID NO: 567 - DNA, 787 bp, Macaca Fascicularis
caaaaaagagagagagagagggagtgattagaaactaaataggaaaatttgagcttcaagtcagtgacaagtaaaaaagatttctaaaaaacaaagaaaacaaaatataaggagaaaaaaaaacatgagaaaaataaaaataaaaagagaataacaggccagtcactgtggctcatgcccataatcccagcacttttgggaggtcaagttggacagatcacctgaagacaggagttagagaccatcctggccaacatggtaaaaccgcatctctacgaaaaatacaaaaattagacgggcacagtggtgcacacctgtaatcccagctactcaggaggctgaggcaggcaggagaatgacttgaacccaggaggcagaggttgcagtgagccaagattgtgccactgcactccaccctggccaacaagagcaagactccgattccaaaaaaaaagagacaaaagaagctacagcatgatgtcagttaccaaacctgccacgggtcctctctttttagacacactcgatagatcccaacactgagctctgataagacactagatagatccccccagtggaaacccaccctcaccaacaacccactgagccctaggccacatcctccctccctcacctccaccttctccctgccttctctcttctctcctctgagcccccaggcctttcccactttgagggaggttgtctgaagaatgttgcccacacctgagcgtgagaagcctatgtccgttcatccctgagaggtctaaaaaaagtaaaaataaat

SEQ ID NO: 568 - DNA, 1940 bp, Macaca Fascicularis
  misc_feature (1)...(1940): n = A,T,C or G
ttcaaaatacataaatgcgttaggcacccagaagaagctgtggagattgcgtgtttggaaatgcagtatcttggggagacgtcaacttctgaagtgactttgaaggcagggcagctacccaggcaaatggcgtggaaggaagagctgagagtgggcctgggaaaggctgcaggcatggagtgaagctgtcactgaaaatgaacttgatccactttagtacggggacagaatccccgtctgcactattgagggagttttagaagagaaggaagaggtgctgggaggatgcttctgcagtcatacagcaaggaaatgtccagggctgtgaagatctacagaggaagtgctgctccagtgttggtggggcaagggaagaggacaaaaatgatgagaatgacactgaggtcattgtttagagcagatctcagcagccatttggccatgccacatcctttgtggagcatagtgggttatctctatatatatattcagctgctttactgctacctacacatttttctccaaattttattaatttcatagcgttttgatttgggtggcagatgacttttaagcagtgggtgtttgccggccagatctttcctggcatgtggactgtgaggcaaagcacaggtgaaggtaggcgctaaaggctttgggctcaaaccagcaagcagttagttctgtgctataggagtctctcatttcccgtggacagggtaagttccttcatttgcacaacctctttgtaagtgctccagtgaccaaaccagtcatttggacactgatttgcagtgcattggcagtaattcacaaattagtcattatgtaagtctctctcacccctttcacacgagattctcagacgtgaatgaatttgtcgtttgcaaggaaagctggttaaggttttgggcacaggggtaggaggactccagttttaactcccacgctaactttagctcaagtggagttttcaccgtggtcatttctacctgcggagcaaggttccaacgccagtgctagagcctgcttatccacatttgccctggacaggagcaggaggaagtccacttctgtaccagcagacagagcatgtgaacacaaaacacgtttctatggcatagtcaactgaacttcatttttacattgaatctaacatgttaacacgttctaacagggtttctatgagcagctgctgtaacataaaatatgatagacttaacacttgttacctaatgaacaaggagtgtgtgcatttcaggtttcttttgatattcttggaggtgattgtcagtgtttaaataggactactttctccactctgaagatgacttgaaaattgcaacatcatggcacattgctaagtccatggcttgtgtgtgtgacagtagacttgataatttatcttaagacacagcagcattgaaatttaggaaaagaatattaaatgcctttggaaacatgaaacgaagttaggagccagtaagaaagtgacagaagcaatgaatgtcttaatgcagtatagttaaaatggcttcccacagggtaattatccaggatccttacttttccttcttcctccaggtttttcaggggtcacttcacatttctaaagagtgaataggctgggcatgnnnnnnnnnnnnnnnnnnnnnnnnnnnnnnnnnnnnnnnnnnnnnnnnnnnnnnnnnnnnnnnnnnnnnnnnnnnnnnnnnnnnnnnnnnnnnnnnnnnnnnnnnnnnnnnnnnnnnnnnnnnnnnnnnnnnnnnnnnnnnnnnnnnnnnnnnnnnnnnnnnnnnnnnnnnnnnnnnnnnnnnnnnnnnnnnnnnnnnnnnnnnnnnnnnnnnnnnnnnnnnnnnnnnnnnnnnnnnnnnnnnnnnnnnnnnnnnnnnnnnnnngtcccgtctctgaaacaaaacaaaacaaaaaaaaaaaaaaaa

SEQ ID NO: 569 - DNA, 2411 bp, Macaca Fascicularis
  misc_feature (1)...(2411): n = A,T,C or G
ctgctgagagtgatgttgagtcctcaataactctgtgtcaaaagtctcatcctctccaaatgctcaggtctgagagaccaagtttctaagaaatctgaactcagatgtaacaatctgaactcagatgtaacaagaacagctttatatttatattacactgtacattttccaaagaactcacatttccactcatgcattttgtcttaggcctcacctcctccaggaagtaccccctcagggcctccttcaggccaggtgagatgctgctctgccccctatgctggtctccatgcaaacctcttctcacaaggggtgacccctgtgttcgtgaagaccagttaaattgtccatttccccatccccgggcttcctgaggagatccttaccctttatcacgtatctgcagctcctaacacaggcctggctcatggtaggcacataatagatgaatactggacagtactgacattcatagctaataactcattttactttcacaatatcctttttgagctaaggaccgttacatcccaccattatgggacagctacagaaactattacataaacaagtgaaatgacttgcctgaagtcacacagccaattgaagaaaaacttaggattaaatcccagccctccagacatgatccagtgcctccctctgtgtgctgatgcctttcaaaccaatctctttgctactaagaaacccaagaagaagattcccaattctactgctcatccatagctcttgcaaaacaaacaaacaaacaagcaaaaactattagtgctactactactaataataataacgtgataatagagtaccaaattgcaagtaagggctccataaattagggctaactggagaagaaatcgaagcacaagaaaaggagtttaaagggggctgcaggtaagcgagttaattggatatgctgattggaattggatattcaagaaaagaggctgacattaatttctgtccagacatagctgtaatttaaaggaaaggtactaatagggttactatttcattctcatttcaactggaggactggacactaaatctctgctggattttacctcacacactcctgccccaaagccagccctgataaactgagttttatgccccaggtaaggccccccaaaattaggttctgagtttactgttgtccccaagaaataggagattgtcccactttgaacttgggatcctaaagggggaagagcggatgagggggaaatgtggacttttagatgacccatctactttgttgagtggcaagggcagctatgtttgccccatattagcccctcttcagagaattcaggctccagctgtgaatcttagttatgccactctccagctgtgtgatcttgggagggtcgcctaacactcctgtgcctctgagtttttatctataaaatgggattaaaaatagtatttacctcaggaatgcttggaagtgttaaatgagatcatttttgttaagtactgtgacagcacgtagcgctgtggtagctattattaaattctttaggtgaaaagaacctttcaaaatccaagtctatcctactgccttcaggccgggccaaatttaaccatgaagcaaaaggggttatcctgggtttaaaaccctcctgaggagattacagtctcctatagtcacccattctatagtaaagtctccagttcttactagagctagactaaatgtccttatgtcagtttagtggctcacacctgtaatcctagcactttgtggggctgaggtgggaggatcacttgagctcaaaagtttgagaccagcctgggcaacatagcgagaccctgtctcccttcaagaaattaaaaagtagccagttgtggtggtagacacgtgtagtcccagctacttgggtggctgagtaggaggatcgcttgatctcaggagctcaaggcctcagtgagccattattgcgctactgcactcagcctgggtggcacagagtgagaccctgtctcaaaacaaataagtagtttaggcacattttgagtaaagactgtcactctcttgtgtaccttgtgctacctggctgctgagccttgtccaagcaaaatagcctgcattggccgggcgtggtggctcaagcctgtaatcccagcactttgggaggccaagacgggcggatcacgaggtcagnnnnnnnnnnnnnnnnnnnnnnnnnnnnnnnnnnnnnnnnnnnnnnnnnnnnnnnnnnnnnnnnnnnnnnnnnnnnnnnnnnnnnnnnnnnnnnnnnnnnnnnnnnnnnnnnnnnnnnnnnnnnnnnnnnnnnnnnnnnnnnnnnnnnnnnnnnnnnnnnnnnnnnnnnnnnnnnnnnnnnnnnnnnnnnnnnnnnnnnnnnnnnnnnnncaaaaaaaaaaaaaaaaaa

SEQ ID NO: 570 - DNA, 2304 bp, Macaca Fascicularis
aaaaaaaaaaaaccagacggttccaagttcggtgactaatatcagggatgaattgtgcgtggtgaaaaggaaattttgtgcgctggagaaatttatacgctgagatcagccatatcacaggtgtgcaggatcacctggtgaaactgaacttgagaaaaggcgagttcaaacatttcttcaagcagcacgcctgtcatcacagagaatgaaaaactgaacagcgctatgcggtatctgatcactctaacaacaacagcaacaatagctgtctttagggaggacttccgggactggagccggggcagtcactgggctgagccctgcatatcttcgatcccattgagtttaatcctcacaaaccgtaaggtcggcatcccacgtgtggcgggcacggagacacaccacacagttcctctttcaaggaaggtctttttgcctcagctgctgggagtgcgccttcaactgccagcctctcaagggcacagagctgctctgcccaaggacacggccttcccagggtgttccccatccactgactgatcaagactggggcatataagcccaggaacgtgacttcaacgtgggacaatcctgaaggccatttcggctcctgcacttcccagggagctgtcatcaatgccagcggctccctctgccaatcctgctgcccagctccctcccacaaatgttgatcccattggtgctcctcataggcatcctgcatacaaaagccccttgaggctgctccccagagaatccaaccagtgcctcaatgcctctatggataagaaaaagaaattcaatgttcaaggtaagtggtacaggttaagccagatggttaggaaaaaaaagctttcatcgttatcttgggaattttcctcctctataggagcgacacctccaacagatggttaaaactcaacctaggggaaggctgggcagttagccgaggtgatcatttgcgcggttccaaggagataaaggagcacagaagaactctcagggaggcacgttgagctacgtggtcagcctccaatctccctggagcaaggtgagtgctgtcctgacccactttaaagctaggtcattagatatattcccattcaaatctaagttcatgtctgtctctcatctgttgtttcatctctctctctctctctctctctctctctctcacacacacacacacacctatcactaaaaatattccatgtctctttctcttcctttccatggaaaactgaggcctgattacagttgtattagtcaggttacatgttcataagtgatataagattaaaaagaactaggagttcactaaaagaacaacagaatctataacttccaaaccagtagtgctatccagaagaacctgtgtcacagccagtgctctctaaagctaacgaatcgaattttcaccgcgctggctgggctcatctcgaactcctgacctcaggtgatctgcctgcctcggcctcccagggtgctgagattacaggcgtgagccaccacaccccgccagaggtcatttcttctgaagcctctttccttggcttgtcttctccgtgtcctcacgtggcctgccctctgcatgtgtctttgttccatgtgcctttgtgtgtgtgtgtgtgtgtatgtgtgtgtttgtgagaggcgcggtctcactctgttgcccaggctggagcgcagtggctcactgcggcctcggcctcccgggctcgggtggtcttccagcctcagtctcctgagtggctggtaccgcgggcgtgcactaccacattcggctaattttattattattattattattattatcattattatttcttatagagattgggtctccctgtgtttcccgggctggtctcgaactcctgggcctaagagatccgcctgcctcgacttcccaaagtgctgggattacgggcacaggtcaccgtgcccggcttcaggttcctcttcttaaaaggataccaggcatactggattagggcccaccacggtggccccattttagcctaattatctataaagaccccatctctaaataaagtcacattctgaagtagtagggggttaggactccaacatttgaatttggggggtgacatataattcagtccacagcagcataaagagaaagactaagatgaacaaaccaaaacttacctagagaagaaacagaagtaacaaaaggagccaagacacttaccattttttaaagttctaactagtaccattcaaaggattaaaaaatgcacaaccttataaacacacttgtgtaaaaaaaaaaaaaaaaaaaaa

SEQ ID NO: 571 - DNA, 1722 bp, Macaca Fascicularis
ttaataaaactgtcagggcaaaccaagcattagactttattttttctccacatttagattagctgtcaaactaaacaggaatatattttaaaagaatgcaacatgctaagtgtatgattaaactttaagaatttaaaaactatccatttatgtgactaagacaaagagggcatttgtttaaaaaatacttaatactaggatgaaagaactataaacacttaaaatgctaagttctaaacactatgctttgataaaaatctaatattaaagaaatcaatcatgtatttgtgaaagaaaagagaaatcctcagagaacactaatataggacatttgggcctaaattaatttctcctcaaagtacagaaaaattaggaattataaggcagatttttacttaactgtagcttgtatcactatgaaaactgaatgccgatcttcacttcctgattgccttgctggtaagtaaaggtttattcaggttttcaagtatattaacttatttgattttagttctttaaaatcagccaaaaattcaattacatttttccaagaaaaaatgaccatgattttttaaattatttgaattatttaaggataaagctggaaatattttgtgaacagctaattatattcaaatttctgagtaaacagatcaaaacagcaaaaccacatccttcactgaccagccatctctcccacttggcagcccctaaaagctcattactcttagaccattagaatatggcttggcaaaataatagtttttaaaagggtcttcagtggcctaacacgttcaacacagttgaactctctccctcatactatcaaagaatacacagtcttctttagttaaaattgtaactacaaatatagaaccctgacatacttgacttcaaaaaggatttttattttattttattttattttgttttttattttggacagagtctcgctctgttgccaggctggagtgcggtgagccgagatcacgtcagccagggagacagagtgagactgtctcaaaaataaataaataaaaaagaatagacaaacacacattacactagcgtgaagataccatcacatgtcatataaccttttagaaaactctactatacatgtgtaagagaatgaaagttcaagaggcaaataacatcttagcattattaaataattttaacatcatggtcttagggactgactcttaggagactgtagacatcattttgaaaactcctgaattaagctactttgcactgacttttaaaaaagtatttgcacctaaaggtacctaaaatgattcagtggtgttccccaaaaacacaattatttaataaaagcttgccattttggccgggagcaggggctctgcctgtagccctaccactctgggaggcctaggcgggcggatcacttgaggccaggagtctgtgattagcctgggcaacatggctaagccctgtctctacgaaagaacacaaaaattagctgggtgacacgcgcctgcagtcccagctacttgggagactgagctgggaagatcgctggagcctgaaaagtcaaggctacagtgagcggtgattgtgccactccactccagcctgggtgacagagcaagactctgcctcaaaaaaaaaaaaaaaaaaaaaaaaaaaaaaaaaaaaaaaaaaaaaaaaaaaaaaaaaaaccaaaaaaaaaaaaaaaaaaaaaaaaaaaaaaaa

SEQ ID NO: 572 - DNA, 714 bp, Macaca Fascicularis
caaataatgtaatttagcattttacctaataaatgagaaagaagcatatgataatcttaatagatacagaaaaagcatttcataaaattcagcatccattgattattttaaaaacatatggtaaattaggaatggaaagaaacatttttaaactgataagtggtatttactaaaaacctgcagcaagcatccacttaacgttgaattgttcaaagtggtccccttgagttcaggaataagacaagaatgtctcttctcactacttcttgtactctaggtcccagtcaatgcagtaaggtaagaaaaagaaatgtatatggattggtaaagaagaagtaaaactgccatcattcacagatgatgtgcttgtgtatgcagaaaaattctaaggaagctacagattaaaattattaagagagactagcaaagtcagtatacaatatcaacatcaaaataccagttatatttctatacaccatcaataagcacttagaaaatgaaatttaaaccaatatttcatttatagtagcatacacaattaccttgaacgaaatgtaataatagacatacaaaacctgaagcaaaagttatgaagctttgttgacagtgtcaagtgtttgtgagaatgtggagcaacaggaactctcaaacactgatggtggaagtgaggattggtacaactttggtatacagtttggtggtgtctagtgaagt

SEQ ID NO: 573 - DNA, 739 bp, Macaca Fascicularis
  misc_feature (1)...(739): n = A,T,C or G
accaaccagccttgtagccactcctcctttggactgtttcttttgtgagagactaaacttatttttaagccagttgatttaggatgctctgttactaataactgaagacattctaattggtacagacttaaacctttataggagttacacagttcagaagtggactttcggtaagtcatttattttaagctgttgatatagagatttattttctgtaaattttgacgtaaatagtttgagcattagaaatcaagttgaaacaattaaatgtatgcttccttgaactgtcatatcgttgannnnnnnnnnnnnnnnnnnnnnnnnnnnnnnnnnnnnnnnnnnnnnnnnnnnnnnnnnnnnnnnnnnnnnnnnnnntttgagagaatttaatttatgtgattcatctatcactgctacagtgttagctgacaacatatagtatgannnnnnnnnnnnnnnnnnnnnnnnnnnnnnnnnnnacttgatagctgatcatctgatttatttactgctttaccactgagctgaaatgccatgtttttcatnnnnnnnnnnnnnnnnnnnnnnnnntttttgttacccagcactttttgtccatattcttcaagatgattgtgagtatggtacataacaggaattacatctggtaagttgtatagttttatgtaggaactctatattcatagcatatttgtagaaatgatacctacagaggtttcccacactggcgtgtcgttac

SEQ ID NO: 574 - DNA, 815 bp, Macaca Fascicularis
  misc_feature (1)...(815): n = A,T,C or G
agtatgtcatatatcacagaagaaattgccttacactggttcatgttgcagtttactgttgtacattggatagatgtacacacgtatttaaatgtgatgtctttgtatatatctgtataatgtttcgattacttacaaaatacgtctgagtgacacttttccccttgtacagccaaaataatgtatatatggaaagtgacagacaaattctctaatttctttggtatcctataacttattagaatcctctggatgagggttagaagagagtttttccaaacttctacatgtagaagtatcataaatgtgctacacatttatgtttgtggatttaattaaagtattttaatatggttttcaatgctgaaattggagtcagatacttcttggttttaagctgtctacctacttgctgtctcccagcagcctggtggcatgcccagtgttttggggggcagggatagaagtgccatcaggaaatagctgaatccattgtgaaatatgaattcagtcatggtgatcattggaaactcttttaaggtttttgcaagtagattttgtaatgtttgtgtatgcagccttgctgttcagtcagtcaaaggggttttacttacgacaagttgtaccttgccctctctccagctctactcccacannnnnnnnnnnnnnnntatttctacctcattgggtaagtcatttaccactctgtgcctcagtttactctgtagtttaccattagactgtgagctccttgagggactttgtcataatcactgttatatcccagtgcctcacaccatgcctgaccctaaaga

SEQ ID NO: 575 - DNA, 2380 bp, Macaca Fascicularis
agagctgcgcggccatggacttgggcgccgacgagttcgaggagagccttcctctgctgcaggagctcgtccaggaggcggacttcgtgggtctggacatagagttcacgggccttcgatccaacctgtctggaccccagcagatcagtctttttgatttgccatcggagtggtacctaaagacccgtcagagcgttcagcaatttacaatctgtcagattggattgtctgtgttttccgctattgaaggagaagcaaacaagtatatagcccattcatgtaacttttttctcttccccacaacgtttgggattttggactcagaattctctttccaggcttccagtgttcagtttttgaatcagtatggcttcaactataacaagtttctcaaaaacggaatcccatatatgaatgaagaacaggagaagaaaattcgacacgatatcctgactgggaactggagagtccgcagctctccggataaagaccaaatcaaggcggtgattggcaaagtgacacggtggctggacctggccaaggaaggtgactggatgactcttcctgggatcgctggcttccaggcctttgaggtccaactggtgctgaggcaggccctccccgacatctggacggtgctgaaagatgagggggtggtggtgaagaaagtgagtaaacaacatcgctggtatcttcagaacacctcttgtgaccgagagagctgttggaaggaaaagattcttctctctgcaaggggtttttctgtctttttccaaatgctggtgaaagcccagaagacagggtctcacctgtcacccaggcaggacggagtgcggttgcccagggtggtctcgaacccctgggatcaagtaatctacctgcgttggcctcccagaatggtgggattacaggcgtgagccactgcacctggccttccttctcatttataactagcttcgtggatctaaccttgctttcaccaaatcatgataggttaatttggggcaggagtatccataagaaacagtactacttctttgctcctttccgtaacgcaggaatttcagtactaactgatctaaaactacttgggaaactgcaagcgcctgcctcacagtatagatttccagcgcagaccctgccttacgtgcctcctacttgcgaattattttcttttttctttttgttggcatttaagcggttgaactacctttcatggaggcaaaggaaggttaggatggaactgtcaagtgatcagaattgcagtgggtcctaatgctacatcttttgcaagaaactgttagtctgtagtgtctgtattacattttttattttctctcacttgttgatttactcccaagtagcccttagtgggacataatatgatgatggacctgctgcacctccatgagaagttcttcagacccctcccagaaagctacgatcaatttaagcagaatatccacagcctatttcctgttctcattgataccaagaatgtaacaaaggatatctggaaggagatgaatttcccgagggtgtcgaatctttccgaagtctatgaagtcctgaacagtgacttgaatcccaccaagaattctggaccagagattgttcacgcaagcagttaagacaaagtgcccccacgaagctgcgtacgatgccttcctctgtgggtcagttcttttgaaagtggcacacttgcttctacagaagatacatggcatcgaccctgtgcctgagtcgtcctttcctcagtacctcgacgtgctggctccttacgtgaaccaagtgaacctcatccgcgcgggggtcccaaagatcaatttttctggtccagattatcccagtatccgacctcccatcctcatcctcagcatcaaaaggtggcccggggtcagcgagcagcaagtctaccataagtttcagaatctctgcaagtttgatgtcaggcgactcacaagaagccagttcttactcctgaccaataagtttaaggacgcgcggaacgtcctgaaggagtaccggggccacccgaccctgtgcatctccctgtaccgctactggaggcactccccagacgtcaactgcatgctccaagtctgtggcatagtgactgcctgggcccttctcgcgttcatcttcggaagatctggtccctgagcgcagcgaggcctcctgcggccaccctcaggtccccgtgctctctggaaggtgtgctgggtgtgtttgtgtaaatcagattctgtttgcagatggatctgtttggtcgtttctagaaattctgttgtgtcctgaacacaaaattctgtcaacactctcaatgataaatcagccgttgggtatcataaaaaaaaaaaaaaaaaaaaaaaaaaaaaaa

SEQ ID NO: 576 - DNA, 726 bp, Macaca Fascicularis
  misc_feature (1)...(726): n = A,T,C or G
caacatacagtctctcannctggtgtgcggagagtcggcntnnnaggcatcatcccatctgcatcctatgacgggcaattatgaaacacgcctcagctggcatcatccccaggaagccacactgcagctgatgtctggcatctccagggcctgttccgctcgcagaaaatctacgcttctggagcgagaaagcccaacagaaataaagatagttgagaaaaattcatttcttccagtaaactcagccggtgagctcagaggagcaaagagaattctccagtgtggcattcacacagtcctcagccctgcgttttagcattgaacaccaccaggccatcaatgtggctggggtgaactnnnnnnnnnnnnnnnnnnnnnnnnnnnnnnngcatgctgaatagctatttatatattatataaataaataaatatattatatatatatatatctcacaaatgcaggccacatgtcaaattcagctttgctttttacaaatgaatgaacttaataaaaataaacattggaggaggtatttggaaagacatctatttaaatttttattacatgtttgatattaaaaactaagaatggtttagataaaacannnnnnnnnnnnnnnnnnnnnnnnnacacacactacagataaagcttttttagaaaacacattagctaacaggtgatatggaacttcaagtgttttgttatatagcatggacgtttttttg

SEQ ID NO: 577 - DNA, 793 bp, Macaca Fascicularis
  misc_feature (1)...(793): n = A,T,C or G
acaaccagatatgtatttgctactcaagtgtacagannncctcaagaaacgtcaagggactcctctgtcacatagtgtgtttttattttaccattggtgagggaggcgacctgatcaggggaggtgggggtacacatcaatttgagtagtttaggctactggaacattaaaatgtgaattcccaaacttttgtttttggctttgtcagggaaaaaaaaaaaatctttataaatctttggaaattagaagnnnnnnnnnnnnnnnnnnnnnnnnagctagttccccaacagaaagatcatttgaaaccagtttttatcccttctctttccttccctttccctaaatcaaatcaatattaattgtgccttatttcacttaacatagacttgaattatttttagggaaagcccctataatgaattcagaagtcactacaagcagcattaagactgaagttggaatattctgttgaacgtaaaaccttgatatcattctgtgtatatagaatgtaaaaggaatattcagtgttaactgccatatatgtaatatacacaaactcaattagcattgtgatggccaaatgcattcccctgtgcttttctgttttaaaaaaaattgaaaaatcaattcttatccccaacagctgcctaattttaggagtctgaccctccacatctcactggtgtgggtgcatggggcnnnnnnnnnnnnnnnnnnnnnngtgtgtctgaatgtgtgtgtgagcgccttggaagggactctttctgcagatactgtaaatacaagtaccatt

SEQ ID NO: 578 - DNA, 728 bp, Macaca Fascicularis
  misc_feature (1)...(728): n = A,T,C or G
cannnnnnnnnnnnnnnnnnnnnnnnnnnnnnnnnnnnnnnnnnnnnnnnnnnnnnnnnnnnnnnnnnnnnnnnnnnnnnnnnnnnnnnnnnntggtgcataccaccacgccaggctaatttttatattttcagtagagatgaggtttcaccacattggccaggctggtctcaaactcctgacctcgtgatccgcccaccttggcctcccaaagtgctgggattacaggcttgagccaccatgcccgaccggggcccttcttaaagggaaaggcacctgaccacaacacacatcaggaggaggactgcagccagggtggaagtgctacagtggcacaggagggtgggtgtgcaagtctggagacaatccagaaaggccgtatggaggaagtgacatttattccgggcccaccctcatctctccctttgaggtccaaagtttggattgttggaaccggagcccaatgaggcctggaacagaagttggctgctggtcaaaaaggagaaattagccccatgtctaagaacatgtagcggaagagaggggcagtgtggggaaggcttttgctaggctcagtccatcagaatagtctagttgtccccagagcaggtaaaccaggacttccaaactgttcccagtacaactgccgaaggaattcaccatctggggtcccatcaacaggagagagctgctatgctgtccaaaaacaaacccgtgctaaagccttc

SEQ ID NO: 579 - DNA, 736 bp, Macaca Fascicularis
  misc_feature (1)...(736): n = A,T,C or G
gacatttcatcnntcaaaatgtaacactgtacctattagcagttcccattccctcttctttccaacctcttgccattactaacttactttctgtctctatgcacttgcctattttggacattacatttaactagaatcatgcaaaatgtgaccttttgtgtctgtnnnnnnnnnnnnnnnnnnntgtttataaggttcatctgtgcagtatcatgaatcagtacagatgctcctagacttacaagggggttatgtcttgttaaacccattgtaagtttgaaaattataagttnnnnnnnnnnnnnnnnnnnnttcagtttacaatgggcttatctggaggtaagttgtcatatgttgaggannnnnnnnnnnnnnnnnnnnnnnnnnnnnnnnnnnnnntaaaaattgtaagttgaaccgttgtaacatggggnnnnnnnnnnnnnnnnntttttaatggctgaataatattccatgtggatgggccaggtgtgnnnnnnnnnnnnnnnnnnnnnnnnnnnnnnnnnnnnnnnnnnnnnnnnnnnnnnnnnnnnnnnnnnnnnnnnnnnnnnnnnnnnnnnnnnnnnnnnnnnnnnnnnnnnnnnnnnnnnnnnnnnnnnnnnnnnnnnnnnnnnnnnnnnnnnnnnnnnnnnnnnnnnnnnnnnnnnnnnnnnnnnnnnnnnnnnnnnnnnnnnnnnnnnnnnnnnnnnnnnnnnnnnnnnnnnnnnnnnnnntg

SEQ ID NO: 580 - DNA, 392 bp, Macaca Fascicularis
  misc_feature (1)...(392): n = A,T,C or G
agcaagaccccatctaaaaaagagagagagagagagagagaaagagagagaaaaaaaagttgtttgacttgcttgctaaatgttgttaatgcaacatattgaagtagttaggtaacattaaacaatcccagatactgatactggttggggtcaggttaaccaaagtctaagagagtaggcctggcacannnnnnnnnnnnnnnnnnnnnnnnnnnnnnnnnnnnnnnnnnnnnnnnnnnnnnnnnnnnnnnnnnnnnnnnnnnnnnnnnnnnnnnnnnnnnnnnnnnnnnnnnnnnnnnnnnnnnnnnnnnnnnnnnnnnnnnnnnnnnnnnnnnnnnnnnnnnnnnnnnnnnnnnnnnnnnnnnnnnnnnnnnnnnnnnnnnnnnnnatgc

SEQ ID NO: 581 - DNA, 652 bp, Macaca Fascicularis
  misc_feature (1)...(652): n = A,T,C or G
attacaggcataagccaccacgtccagctggtcatattcttaagcaggttcttcccagtccgcaaacgcagtgaaagggcttactctttccccattactgtggggaaaaaatcctgtagaggctttccataggccctatgccctgaatcaatcgttacaaccaaggagatgcagagactgcgtgccctttcctggagctaggagctaggtgagtnnnnnnnnnnnnnnnnnnnnnnggcctgcaaaggcaagcaagaagattccccaaagtgaaatcagggtgccgttaccaaaagaagctatgaaggcaggcaaaaaacaacagctgtttcccacgggacaaaacccgaaacacccaattccattgtttgcttcaaaattaaattttatttgaccccaactagttccagtcaagtttttgctcgatggaccaggtgaagaaaaggataaaaagaatatctctatataatgcatgatcaggtggtttatgaagatgtcaaaagcactgaacaaaatccaaatgctcacataaaatgggattaggtttcataagccacccaagaaaatcagtctcattttttatataataatgtattactgtgcccagagctaacctgtagnnnnnnnnnnnnnnnnnnnnnnnnnattattc

SEQ ID NO: 582 - DNA, 337 bp, Macaca Fascicularis
  misc_feature (1)...(337): n = A,T,C or G
cccccccaccccctgcctcccaaactaaccagtggcacactcagacccagctctgggcctgggccaggctcagcacagacctgctttctcacggggtgaggtggggaggaattaatgaggccccaggaagtgggacagagagaggcctccggaaggaggcaacgtgaggtgcatccccagcagnnncagggagggtctgagctgggggcagctgagccctgagggagccccaggaagggcccccttcccnnnnnnnnnnnnnnnnnnnnnnnnnnnnctctctgtcaatgccctgnnnnnnnnnnnnnnnnnnnnnnnnnnnnnnngccctgttggg

SEQ ID NO: 583 - DNA, 751 bp, Macaca Fascicularis
  misc_feature (1)...(751): n = A,T,C or G
atnnnnnnnnnnnnnnnnnnnnnnnnnnnngcctcacaggcccccacaggagcccagatggacaagcctcagcatannnngcaggcttcttcctgtgaggaatgccagcatcacagatctcagccagcaccgtcagaannnnnnnnnnnnnnnnnnnnnnnagggtggaaagctcagccacaggcagaagtgtgggaagggcctnnnnnnnnnnnnnnnnnnnnnnnnnnnnnnnnnnnnnnnnnnnnnnnnnnnnnnnnnnnnnnnnnnnnnnnnnnnnnnnnnnnnnnnnnnnnnnnnnnnnnngctgtccttctatgccagatcccagatagactctggcccttacctccccacctgagactagggtgagtgtgtttnnnctggctgagagnnnnnnnnnnnnnnnnnnnnnnnnnnnnnnngtggannnnnnnnnnnnnnnnnaaccatacatcctcttgtttggccacctcctgaaactgctccacctttgaagtttgaacgtcggtccctnnnnnnnnnnnnnnnnnnnnnnnnnnnnnnngctctctcactgagttatcttcactgtacctgttccagcctatctacaccatctctctttctcctgatctgtgctgtcttattctcctccttaggcctcctattacctgggattccatgattcattccttcagaccctctcctgccagtatgctaaaccctccctctctctttcttatcctgctgtccnnnnnnnnnnncctgg

SEQ ID NO: 584 - DNA, 757 bp, Macaca Fascicularis
caggggagaaagaaaggtttacgagaactgatgaccccccctggcctttccagggagcatcagctatcctcatcctttctccaggtgggagctgggctcttcctttccggaaatactccagataccccttcactttgctggatgaccttgggcaagttcctgtccctctctgagccttcacttcttcgtctgtcaaatgaagaccttgtttcctgcccgggcggttctgggactggagggcaggggtgacgtggacaatcttgggcctccgtggagatgaggtgcttggctttcttcccaggacccacaggctgccgtgggattgaaagcatgtggaggcgggaaaggtgacagagtagcatgcctcgaaggcccccttcatcccagtcctgctgtggggaaagtgggctttgaacgggatccaagtctaagatgtttccggtgagctgccagggacaaagggctctcagacatcttgggtccccagtggctggggtgggcaggggctgattcagccaaaggaggcattagcccagaacagaggaagccagagcccctgccccattcctgagcctcacagagcttgtccccagcttgattgactgtgcaacacaggcttcagattcatgtatttgaaaggtatgcatgatgttgttctcttatcacctctgcccctcacctctgtgagttatcatgaagagttctttaagagtataacagaagacaaagaaagatgctattaatgttattttgccaa

SEQ ID NO: 585 - DNA, 2821 bp, Macaca Fascicularis
atggaggtgcagttagggctggggagggtctaccctcggccgccgtccaagacctaccgaggagctttccagaatctgttccagagcgtgcgcgaagtgatccagaacccgggccccaggcacccagaggccgcgagcgcagcacctcccggcgccagtttgcagcagcagcagcagcagcagcaagaaactagcccccggcaacagcagcagcagcagcagggtgaggatggttctccccaagcccatcgtagaggccccacaggctacctggtcctggatgaggaacagcagccttcacagcctcagtcagccccggagtgccaccccgagagaggttgcgtcccagagcctggagccgccgtggccgccggcaaggggctgccgcagcagctgccagcacctccggacgaggatgactcagctgccccatccacgttgtctctgctgggccccactttccccggcttaagcagctgctccaccgaccttaaagacatcctgagcgaggccagcaccatgcaactccttcagcaacagcagcaggaagcagtatccgaaggcagcagcagcgggagagccagggaggcctcgggggctcccacttcctccaaggacaattacttagggggcacttcgaccatttctgacagcgccaaggagctgtgtaaggcagtgtcggtgtccatgggcttgggtgtggaggcgttggagcatctgagtccaggggaacagcttcggggggattgcatgtacgccccagttttgggagttccacccgctgtgcgtcccactccgtgtgccccattggccgaatgcaaaggttctctgctagacgacagcgcaggcaagagcactgaagatactgctgagtattcccctttcaagggaggttacaccaaagggctagaaggcgagagcctaggctgctctggcagcgctgcagcagggagctccgggacacttgaactgccgtccaccctgtctctctacaagtccggagcactggacgaggcagctgcgtaccagagtcgcgactactacaactttccactggctctggccgggccgccgccccctccaccgcctccccatccccacgctcgcatcaagctggagaacccgctggactatggcagcgcctgggcggctgcggcggcgcagtgccgctatggggacctggcgagcctgcatggcgcgggtgcagcgggacccggctctgggtcaccctcagcggccgcttcctcatcctggcacactctcttcacagccgaagaaggccagttgtatggaccgtgtggtggtgggggcggcggcggtggcggcggcggcggcggcgcaggcgaggcgggagctgtagccccctacggctacactcggccacctcaggggctggcgggccaggaaggcgacttcaccgcacctgatgtgtggtaccctggcggcatggtgagcagagtgccctatcccagtcccacttgtgtcaaaagcgagatgggcccctggatggatagctactccggaccttacggggacatgcggttggagactgccagggaccatgttttgccaattgactattactttccaccccagaagacctgcctgatctgtggagatgaagcttctgggtgtcactatggagctctcacatgtggaagctgcaaggtcttcttcaaaagagccgctgaagggaaacagaagtacctgtgtgccagcagaaatgattgcactattgataaattccgaaggaaaaattgtccatcttgccgtcttcggaaatgttatgaagcagggatgactctgggagcccggaagctgaagaaacttggtaatctgaaactacaggaggaaggagaggcttccagcaccaccagccccactgaggagacagcccagaagctgacagtgtcacacattgaaggctatgaatgtcagcccatctttctgaatgtcctggaagccattgagccaggtgtggtgtgtgctggacatgacaacaaccagcccgactccttcgcagccttgctctctagcctcaatgaactgggagagagacagcttgtacatgtggtcaagtgggccaaggccttgcctggcttccgcaacttacacgtggacgaccagatggctgtcattcagtactcctggatggggctcatggtgtttgccatgggctggcgatccttcaccaatgtcaactccaggatgctctactttgcccctgatctggttttcaatgagtaccgcatgcacaagtcccggatgtacagccagtgtgtccgaatgaggcacctctctcaagagtttggatggctccaaatcaccccccaggaattcctgtgcatgaaagcgctgctactcttcagcattattccagtggatgggctgaaaaatcaaaaattctttgatgaacttcgaatgaactacatcaaggaactcgatcgtatcattgcatgcaaaagaaaaaatcccacatcctgctcaaggcgtttctaccagctcaccaagctcctggactccgtgcagcctattgcgagagagctgcatcagttcacttttgacctgctaatcaagtcacacatggtgagcgtggactttccggaaatgatggcagagatcatctctgtgcaagtgcccaaaatcctttctgggaaagtcaagcccatctatttccacacccagtgaagcattggaaatccctatttcctcaccccagctcatgccccctttcagatgtcttctgcctgttataactctgcactactcctctgcagtgccttggggaatttcctctattgatgtacagtctgtcatgaac

SEQ ID NO: 586 - DNA, 778 bp, Macaca Fascicularis
  misc_feature (1)...(778): n = A,T,C or G
tagcacagtnccatgannntnnnccatgaggactgagagggagagtngnanncagggctggtgctgctcttcnnncagctctgctggggatctaaggtccctctatttatttcttaagcttggctggcctctcaaccaggagtttaggctgaatgccttccaagtgatggaggaaaaggccaactttgtcctggtcttgctgtggcaccccatcaccccacagctcctatctcatcagattcccctgaatccaaactcatggtgcaaacctctacctttttacaaaaagatcttattgttaatttattgtttctggcacttgggcaaaccctgtagttaatactccttccacactagacactgggtttcaggaggagggagactgccctgccttgatcccagagaggccttctccagataggcgtggcccctcttcagaggaccctgaagtggagagacccataaagccttgaccacnnnnnnnnnnnnnnnnnnnnnnnnnnnnnnnaccttctcctctcttcatggggcccttctgcagccctaggcctcatctgtgggaagggagtccctggcccatactgcccccaccannnnnnnnnnnnnnnnnnnnnnnnnnnnnnnnnnnnnnncaggccatatgatcttaggccaagaaggccctaagggggatgggagggcaggttttccaggctggagtcggttccacccactctgctgtccatatgcttccttgtaagcaagtcagcagcacannnnnnnnnnnnnnnnattttat

SEQ ID NO: 587 - DNA, 2863 bp, Macaca Fascicularis
  misc_feature (1)...(2863): n = A,T,C or G
aacttttttataccgacctctgcaggctttggtagctcatactgtagacctgtatgtggctgtgtccagctgcagcatgtgaggtagccagagagctatttcaggaacaaacagagctatttcatgtttcctctaatttgtaataagcacttaggtctgcctgactcttgagatgtatcacagagttcatcacatgccacctattgtagtactaaaaggtactaaaattcatgcttgtggtgttttaaaattagcgattctgctccctctgttgaagctatgtatatttgttaaatagtgtcttttaaacccataaattctgggctagaattgacgaacattcagattaaagcaagcaagaaaaaacttaataaaaacaaaattcctttcatggagtttgaggttcccagtgatttagtggggcatgtgttttccattaaggatatagttcccatgcagttaataatgtacaacactgtgggttctctctgctttattaatctttgcctccttcctccctgctgtcccctcttccatctccctcaatttggggaggggaaaatccctgtgcatctttctgctctttctagaatttgtcccttggtagtttcttcatcaacttgagtcacctcagacctagaggaggaatggattagctgaattcgctgacttgttgctacccagctctgctgatagggacatttgtagggtggggatgacaggggattaccaagcagttgctgagtgataaactgaactgaggcaaccacaagcaggatacataaaaaagaaccactggcacgcactgacccattgctctgaaccagctgtctgtgctgggccctggtgggaaatggggggaaaaaaaatctagagctttctcttgaacaaagttacacacaacatgagtcaggaacatactttttgaaggtttggggcagtacagattttgttggggggtggggagtgttacacattttatgatgattgacttactggaaattcaccatcatggaaacagaaatttagggaagaattctgaatgtattctgggaaacctctccttcatgacactggcttggcagacaaatggcttccaggaatgcctacccagggcattgctttttatggcaagatgtggatggttgataaccccttgacctggtggttactggagactgcccacccagggcagagacctctgtatacccctccacctccttcatgttgacttagcatgatggccagcaaggagtttctctaattcttgtctgggcatattctttctctttcccttttcttttttaatgcaactaataaaaagattgctaacagttgttacataggaaacttgagatgtatacagagttctagaaagtgggatgagagctgttttgttttttcctagatcagagtaactttgtgagagcaagctgtttttttattccctgtcctccaccttcctttcactcggttgttattgctgttaataagtaaatgacccttctgaattgaaacagggttgggactgctctttaaaaacataacctttttattgggattttctttaagatgggctaatttattaaaattaaaaaatcttgctaggtattaactttgttgctcatctaggaccaagaaataatattaatttttatacatctcagctaatgtctagaatgttgtatatgtgtgtagtttgtggatttaggttttgaatactttatttcttatttgaatggtgctcaacattgtatttaggaagcagcatagttgaagatgattggctttttgtaatgcttctcgtaatgacgcctcgctcagtatgtgccttgccctgggctcagtccgagtgtcgtgtttccacaaacatgcttcttcatggtcttttccctcatggtcagccacagaggctttccccggttcagcgtgccaacttcggactgcacatggtctcattttctaaagtctttctccccgttctcctttaagaaaaaaatcttagttgttaaaaatctgcctcacacacttagaaatgcctcagagtaagtatctgagaagcaagcccaccccacatccatcatatatcattgtttctgttaagggccatcccatttcttcagacaaattctgtcgtcttcctcccgtctcactcacttttgactttgaaggtggattgtcccatctcagatttccttacagaatagaaccacatttcagcaaaatattgggtggctggttcttttcttcaagacccccctgcatctgtgttggtcctctgtgtgagaagatctgaagggtaggcaggttttatggactaagatttttttttttgtatgtataaggagggtgggaggagaattttagaaaactagatccattggcctgcagttagaagttgaacactgaacttgggaaagcttctgtggctgactgcgaggaaaaagactactttagtgactactgacataacctggtttgtattacctgtgaggactaacttcacacaaattgatgttccacagatacaagcctttacaattttatttcctcccattataaaactatgtgtgggctgggtatggtgactcacacctgtaatcccagcgctttgggaggccgaagtgggcagatcacccgaggtcaggaattacgagaccagnnnnnnnnnnnnnnnnnnnnnnnnnnnnnnnnnnnnnnnnnnnnnnnnnnnnnnnnnnnnnnnnnnnnnnnnnnnnnnnncagctgctccagagactgaggcaggagaggtgcttggactggggaggcgagggtgcagtgagccaagattccagtctaggtgacagagcaagtctctatctcaaaaaaaaaaaaaaaaaaa

SEQ ID NO: 588 - DNA, 718 bp, Macaca Fascicularis
  misc_feature (1)...(718): n = A,T,C or G
cccaaagctccatcataaatgtaattcttagtgttttaaatgattgcattttaaggtatataaatatgggttatccaatatnnnnnnnnnnnnnnnnnnntgaaacaaaacaagcacaaaggtataaatgcctaaactggaggaaacttgaaaccctcatgttaaatcttaaatgtagtatttctaacttgtgaagacagattggtaggcagccatttttttgtgtcttaaaataactgggggcatagttaaaattttatacatcaagtgattgctattattgaatgttgcaggtgagatgtggttatttttagtttatttgaaatgtttgactggaaaggggggagggggaagcaaatatttgaaatttggaaaaccctaaaccttttggtaagaaattgtaattttcacttaaaattttctttaagaatataaaaggtttataattgatgtagttaaattgaacnnnnnnnnnnnnnnnnnnnnnnnnnnnnnnnnnnnnnncagaaaaaattataatctaagaattgaaaaaataagatcctgaagttgtttaattgcatcagtttctgtatttgtgaatttataaactgcagtaagttttgaatgaggttaatcttgtttaatataagtaaatgagtctgtagactgtgatctccccaaactaaaaagtacagtacttggaattgtgtttatggttgtagtgtnnnaaagcact

SEQ ID NO: 589 - DNA, 694 bp, Macaca Fascicularis
  misc_feature (1)...(694): n = A,T,C or G
tttttgtgatctgtgtaaaaacctgcattgccaacattgcagctcgaacttaaacttgttattcaaataaatatttaattttttaaattgctcttgtataatcagatgccccttttagtattattttagaagcattgggagggttttgcctaaagtacaatttatcgggaaaaactagattttagttttataaaacttttaagtctttcatgggacctatattttcttgaattaaattttgtagttctagaataaataggcaatctaaaaaggtgttatctgtgtgtcgtaaagtggaggcttccttatatnnnnnnnnnnnnnnnnnnnnnnnnnnnnncctgtcattaagcacaagggcactggatcctcaagtgcccaccttcatgagagaaaaagcagcacatcctgcatgtttctggtgcttcctgctcacaggcatcaaagccgcacatgtnnnnnnnnnnnnnnnnnaaggaaatgacccctgggaagatcaagctcttggaagaggctttaactcggacgcgacctccgggaaccagcgggcagggcagcctttannnnnnnnnnnnnggacctccaaccataagcatggtgtgcagttcggaagagcctgctacggaactgaaattgatgggacattttataggaattgatatacagatgttggtcctcaaaagctgcaaaccag

SEQ ID NO: 590 - DNA, 284 bp, Macaca Fascicularis
cctctgcagagatgggagacattgttcttgcaagaccacccgatttttttgatataaagagggaagtgtttatatctaatacatcttttaaaataagtgaacattttatttcttaccaccagatggataagggcactttaatcacgtaaatgtttataattttatgtgagtttgtgaaaatgggaggctttcaattggttttcacgagaaagataatacctctgcattttttggtggaaaacgcatgatatccttaatgagatatacgtgttacaggaaaaaaa

SEQ ID NO: 591 - DNA, 1378 bp, Macaca Fascicularis
atttaatgactctgtctaccccaggtaatcacagacattgcagcaatgatctttagaagataatggtcccttatagcacctttggtggagtcaatcagttagtattaggagtaccaggaatcttcaaattgtattgtataagtcacagcctgtcgtggctagacctggcaaagcaggtaccagaagactggggcaggctgatatatgtggactcaggctagccagcctggattcacatcacctctaccatctccttgttattgaactcggggaaatcttttaactggtctgtgcctgggttctctcattcattaaacagagataataatggtacctatatataatagaactgttacagaatgaaataaaataatattaaagcagacagcagagttcccaggtacagactaactacttgatgcatgttacatatctcttcttattttttcttaccagagctgctgctctcttttccttccttggactacatggctctgtcatgtttctgtctttagaatcaacaaagagaatagcaggagtcatagaatatcagggtgttagccctggaggaaatcttggaaatcccactgcgctgattttccggctgagctctatggtatcctgagggctctgcaggggcacctgggagggcagagcaggtcccagcaacacagggactttctttaaccccagcagcacccctccccttaaactgtctgacatattgggtatccatggcatatttctttttaaagaaaggatttctccatggaatctcaaagaggtgaaaaaaaaaaagattgaaaaccactgaattacagttccatcttctcaccacacccacgaaaggtataatgactcactagtcattagcctcctgattctgggggttttgtgaagcaagcagttttaaatcagcctcccaaaatggaaagccacttccttgtccaccaagttcaccttccattcgcagtactttgctctatcttactggctcctatgcctttggttgagtaggaaactgacacccccagctcccaagaatacatgacttagaacactgcttaatggcttctgactcgctcagggataatttgccttgccaggtcacataacctttatggctagcctaatgctcacccaaatgcagggaagcccgggctctgacatcaatagttgactgacacatctcacctccgacagaggtcacaccaatcggactctatgtcacagactcaattacagtgaatctttttaaaagcactttccttctaaggtggacttccctgagatccattgttaaggctgagagatttaaaaaaaaaaaaaaaaaaaaaaaaaaaaaaaaaaaaaaaaaaaaaaaaaaaaaaaaaaaaaa

SEQ ID NO: 592 - DNA, 751 bp, Macaca Fascicularis
  misc_feature (1)...(751): n = A,T,C or G
ttcatgcaattttgtttatctaccatagaatttccttatactgtggcttggtattnnnnnngattannnnnnnnnnnnnnnnnnnnnnnnnnnnnaagcctattataatatggttagcctataaggcagtgttggtccccttctaatgtcggcctcataaaggggttccaccgtactttccgcatactactttgttgttgttttcctttatggatatataagcaaattgagcttgggtgatttttatggagacaataattagacaatactgtatgattagttttacttaatagattatcatcttgtgagaagagatgtttaaacgtggtaaatgacttcatattacaaaacagttttacacttaatatgttaacattgggtgcaataatttagtagcattagctttagttataaataactggatctttctgctgacaacttaggttgtatgagttacgcttaaaagctttaaatctgatgtttcgtgtacctgccacactatgttagaatgtgtccttcaaacatatcctcctgcaacttctcaaactgtactaaattgatatttcttgaagtctaactctgtgctaacagatctccattttaaatagaatacggttttaatttttgataagctgctgaattttaaagagagttttttggggccaccaaatattttggatcatgcagagaatatcctcccctccgcngataccttgtagtttgcgcatgttttcttctgggtgggttcaga

SEQ ID NO: 593 - DNA, 701 bp, Macaca Fascicularis
  misc_feature (1)...(701): n = A,T,C or G
gctacgtgtcctcactcgcttttctcaatgantatnnngatgttgcctttatcaccactgtggcnnnnnnnnnnnnnnnnnnnnnnnnnnnnnnnnnnnnnnnnctcccgctgtatgtcctcnnnnnnnnnnnnnnnaagctgtctccgccaagctactgcaagctggcctcctaaggggttgtgcacccccagcgggctggtcccagcaccttctgccctttccagtgaacacagnnnnnnnnnnnnnnnnnnnnngagcaccacgagaaagggagggtatgccaggcgagcccagggcaccgatgccgggacggcctgtccctctcagtgcagggacgtcagccctgccaggcgagcccagggcacggatgccaggacggcctctccctctcagtgcgaggcttcacccctgctaggcgagcccagggcacagatgccaggacggcctctccctctcagtgtggggcttcacccctgcttttctttcttcttttgtgtttgtcaaaatcctatttccatattgaagcagcttgagtttctactgaaaannnnnnnnnnnnattttactgttactgtaaagggtttatcttactctggcattctaagaattagaatgaaagtttaatttctgcaattccctaacattcacattctttctttgatgttataatacacagtcattcctactcacaatgtaat

SEQ ID NO: 594 - DNA, 646 bp, Macaca Fascicularis
  misc_feature (1)...(646): n = A,T,C or G
tggtaatttttgtattcttagtagagacggggttttgccatgnnnnnnnnggtggtctcaaacttcttagctgaaagtgatccgcccacattgggctcccaaagtgctgggattacaggtgtgagccactgcttctgacccctcctgaattattttaataactgagtgggcaacgggnnnatgagtcacatactcggaaaagaggggattctttccaaaggaggtggagactctcttttctctagataccctcggctttcatttttctgtatctgttttccagttcacttggttttctggatctaagtggaaattagaacaacaaaacaaatactctgaattgcattttatgcttgatactttaaaaatggatagcatattaaccctgtttttgccttgaatnnnnnnnnnnnnnnnnnntacattaattttagtcttcagtgctttccttggttctttcagtttaaagaggaaaagcggctcccaaggaaatatttgtcgactgaagaggctcttctgtgttgtcctgcagtaaccttctctccttttctgttaattttaatggattattattattattattattgtatgaggtcttggatgcctggccttatnnnnnncacttcaantnnntcaactcatgtag

SEQ ID NO: 595 - DNA, 809 bp, Macaca Fascicularis
  misc_feature (1)...(809): n = A,T,C or G
ttgannngntatggannntcccnngcgatgctcagtnnccaggaagctgagttgnnnntgaaaatcattcatgtttcccatctgaatgcgaatattaaaagctcttctagatatttgagaaataaggctgttggagagaannnnnnnnnnnnnnnnnnnnnnnnnnnnattatcataaagccgtcnnnnnnnnnnnnnnnnnnnnnnnnnttccttaattattttgcacatctgcgtcagtttgttcttacaccccttggatctttgagcnnnnnnnnnnnnnnncaacctgtatatgtcgtagatgtgtccaaaggaattgttaacatagttaaggatcccgatgccagcgggaaaacctttgctttcgttggtccaaataggtacctcctctttnnnnnnnnnnnnnnnnnnnnnnnnnnngctcacagattgttcctcccattacccttgccactttttgtctatcgatgggtagcaagagtctttgaaataaacccatnnnnnnnnnnnnnnncaagggataaagtggagcggatgcacatcacagacannnnnnnnnnnnnnnnnnnnnnnnnnnnnnnnnnnnnnnnnnnnnnnnnnnnnnnnnnnnnnnnnnnnnnnnnnnnnnnnnnnnnnnnnnnnnnnnnnnnnnnnnnnnnnnnnnnnnttgaggatgtgaagccggccaagactgttgacttttagtgcctcctgagcagctcttggttttggtgtcttcggggtcagcccatgtggtttgagcacccagnnnnnnnnnctctttagaggatcctgtacacagtcca

SEQ ID NO: 596 - DNA, 730 bp, Macaca Fascicularis
  misc_feature (1)...(730): n = A,T,C or G
atgaantttaaaagggaagtgtttatttacagtgtcacgacagaaaaggaggtctttgtcatcatagtcattgagggatctacataaaatctggggcacagctacaagaaatagccaatatttagttaccagaccatgtttagtagtgtccgggttcagatcatgctgccgagaggtatctccccctcgggcaggtcattgctgggctctggaattggagattcgtacttgcccagcacaatgctatgggcagagaggccgacatctatgattaactagaagccataaagaaaagctgctaagtggccactaggtgccacttttccgtttttataatgctttgttttcattagcagatcttttttttccaagctccttggggcctatgagaggcatttatgatttttgcgcctacaataagtcagcctgtctggtgagagttgttttatgagaaatgctttccaagggaggtctaggaagatcctgacacataagaactttggcttagggagctttccaggtgtggtgccaataaaaactgacctggaaagaaacctgtccagcatggaatatgctttctgaactcactcgagagtatgtggtgtacgtcactgctcatatattcttgagtttagatttgtcttttataaaatttttagctcttttccagttcacttgcgcttgtctgtatattggtatttttaaatttttgtagtaaataatgaaaaga

SEQ ID NO: 597 - DNA, 2089 bp, Macaca Fascicularis
  misc_feature (1)...(2089): n = A,T,C or G
catcttgatgcaccatgtagaagagtaatgttgggaatctcataactcattttagatgaactatctggtatcttcaaagggcggtaaactgccagttataatgcaaaagctgtctgagccacactctaataatggaggcatcccagtactgacagtcaaacttctgcttaatggttatagaaacttttcatatccaaagaacatgtcttctctcctctgttattaccagtgtctaacaacatccagaatggatcactcaatgagggtttgttcaagataataattagcttaaaaacttgataatggaaggcaacacataataatggctaaagtgtggtctctaaacttagattccctgtattcaaaatccaacccaaccacttacttaattaactaatctttgattcatttacttaacctctataatcttaggcttcttcatcagtaaaatggaaataacaaagcctctggtccagggctattgccaggatacaatttaggtaaagttctaggataatgtctgacacatggtaagcactgaatagattctaatgtattgattgatattcatctttttctaagatgctagaaattgcacaccttttaccattcactattaaatgtgacacattcacagtttaatagtcaatgtgaaagaatgggttacatgtggtttaaccaaaaaataacaacatcatccctgatgttgtccatacgccatcacattcatctaataagtatcaaaggttggtcattgcattgagaagcaggaacccctgttttgacacagggtgaccatctccacagtcacggctcttcctcagcctggcagttaagcacacaatcacgcctttctgtttgctcctgtccttgttcatgcttaccaggtacaaagacaggagactggcccagcacaagtcggaaatagagtgtttcacccccaaagggagtatggggaatggtgggagagcaacaatgagcaggtaagcaaacgatgagtggcctgaggtggtgtgaaataaatgtatgcaagctagaggaacaggtggctccctggtctgggtcctcactcaactgtgcaacccatacagtgtgtccaacctgggctactactggttttctgtgtgtatttgatttgcaaaacctatgatgtcctcatgtgtagtaatgggagcctcctgtcccagatgctgctgtttcccagggttgtgcgctttgcatgtctgaagccttagctcacagtcagtcctcctctggattttaacttattggtcaaacggttctggagtttgcaaagtggaagagattggaggaaattcatatttcagggctatccaatcacttaataaaataaatgcaaaagcttagaactggttttaaggaaaggactacaattgagggaagactccagcccctgatcctggacaagcctagaaattaatatgacttactttgaatgtaacatcatctcacagccaagggcaaatgcctttccaaactagtggactgtagagataagtggcttttctcgaactgaaatcaggaaagctaatcctcctctagctaccatagctttgcatctcctttacttccttgtgtttggtgatgaacattctctgttgctgtgctgtgcatgttcctttatactaggcactcccgattgagttgtacctagtaaaccagagtatttggaactataagcattaactaagctgtgttgcatgaaataaacgtgctttattgcatgggacttggttttaagaaaagggccctggggcnnnnnnnnnnnnnnnnnnnnnnnnnnnnnnnnnnnnnnnnnnnnnnnnnnnnnnnnnnnnnnnnnnnnnnnnnnnnnnnnnnnnnnnnnnnnnnnnnnnnnnnnnnnnnnnnnnnnnnnnnnnnnnnnnnnnnnnnnnnnnnnnnnnnnnnnnnnnnnnattccagctattcaggagactgagtccagaggactgcttgaacccgggaggcagaggttgcagtgagttgatatcgcgctattgcactcctgcctgggcaacaagagtgaaaaacctatgtctcaaaaaaaaaaaaaaaaaaaaaaaaaaaa

SEQ ID NO: 598 - DNA, 778 bp, Macaca Fascicularis
  misc_feature (1)...(778): n = A,T,C or G
aaggaaactggaccagaagacagccatgtcactctggtggaagtcctatccccttgtttacattgctaaggaactgattccagaagccactgagaaatacttaggaggaacagatgaccctgtcaaaaagaaagacctgttcctggacttgttagcagatgtgatgttttctgtcccgtctgtgattgtggcccggcaccacagagatgctggagcgcccacctacatgtatgagtttcagtatcgtccaagcttctcatcagacatgaaacccaagacggtgataggagaccacggggacgagctgttctctgtctttggggctccatttttaaaagagggtgcctctgaagaggagatcagacttagcaagatggtgatgaaattatggtccaactttgcttgcaatggaaaccccaatggggaagggctgccccgctggccagagtacaaccaggaggaagggtacctgcagattggtgccaacacccaggcggcccagaagctgaaggacaaggaagtggctttctggaccacactctttgccaagaaggcagtggagaagccannnnnnnnnnnnnnnnnnnagctgtgaatggaagatccaaccagcctcgggggcctggaagagcaaagactggggtatcttgtgaaagggattgcaggttcagaaggcatcttactgtggctggggaattgtctggtggtggggggcagggggcagaggccatgaagaaggaagttttgtatttgtgacctcagctttgagaaaaagtat

SEQ ID NO: 599 - DNA, 672 bp, Macaca Fascicularis
  misc_feature (1)...(672): n = A,T,C or G
cttaaagagcagagnnnnngtcagtagcaaggcagtcattttttaaaagcagtaagtaacnnnnnnnnnnnnnnngnntacttnnnnnnnnnnnnaaccaagtcagtgacaactgctctctgtattatagcaatcttgaatgnnnnnnnnnnnnnnnagttgtaagttttaaaagagtaaagtgttttggttagtaatgatgtggagaaaaatacagtattgcaagtgttagtgtgtacagattgtggttggaggattgggagggctctgagaagcagagtactacatcaaaattgttttaagtattttttgccaataaaaaattaattttaaggaaatggcttgtgctttgagaagcccagttttattctgtcttatgaaactaatttccactttgaaaattgttcttctgttgttcatggtataaatgaatggaatataatgataccctccttctaggaaacaaagcatttccttaaaacatttgctaggttaagctgtgctgttctactgatggttgttttaaattaataatgagaactataatttaaataatatttctttgttagacattataatgctaaactgaaagactaaattctgcaagtactatataatatttttggcttataatgctacatttttattannnnnnnnnnnnnnnnnnngatt

SEQ ID NO: 600 - DNA, 2558 bp, Macaca Fascicularis
aagtgcatgttttgaaacaggtttttaatgatgtgccccaaaaggccagctgattctggtactagattgtcagagttttctaccaactggcatctgtgatgtcagaaatcattataaaactggcttatagatgtgaaacagggtttccaacccaattgtatgacttcaacaacgtcaaggagggcattgaatttagaatctgagcacatcacaccagcaccagctccctgtctcttctagccacttaatggagacaaaatggagaggtaagacagaccacaaactagttcttatagtgtactccaccttttacttttttcctgagacaaatctacccttattctttcttcctcttccttacctcttgcagtagagaggtattaaggagcataattaaacttgtcaatatggaaagttgttttttctaacgaaacaaagcgggaccatctctattcccatctaagctactcaaattgctgagtgctattagaacacagcttattacatggatatggagacaggagagattaaagcagatgcaaatacacatgaactgcagatgtcataggcctcaatcagctataattccaggaggcatgtgttgatctagttctctagcattgttgttacaagaaaatgagttcgactgtatttttcaatccagattcttgaaattgtctaacatgttggtcctatgtcatcacagaatctctcagtaaggctatatgtgatcctcattttacctcttgggaaattagcagatagtcgttgctctaaatgatatccgagtaaatagacttgaggaatacctctacacagtgtccctgaaaccacatgcattgttcagggagccttcacgctatgactattcagtctccctgaatatgctttctctatagaaccattaacatatggctattgctctatgatttttttttttttatattaggaggcagtgatattgtggaggatggaaatccacagataattcatgaccctcatcttatcactttactccatctttttatcctattaaatcatttttgacaagatgtcctggtagactaaagataaacagatttgttcttgctcatcttctggtggatattttaatttgctattcacaatcaggacaaccaaagtcaaggacccagacaaaccacaaggcagctagtcagctacttagagttggctacattcaaataaaaagtaatcagggaatgggggaggtggggagtactaggcagttgggatatgatccatttttttttaaacaacttttttgtagatcccttgtaaaaaaataataataatgttgtgaatctccatgccacgtgaaaaaggcctaaagatgagttgaatttatggtaccatgagtaaggcatggaagaactcttgaatgtgtggtatatgtggtcccctatattagatagaaggctttgctacatgtaattcaaaagcatctcgcttttctcaggaaccaaaggcttatgatatagaacaaagaaatcatcttagaactgtcaagcatattttcacaataccatatcaagatcaggaaaacacccttttgctagtgtgcttaacttatttatttcctctaggaaacaatagataaacagcatgaaaatgtaaatcatctgacatcactgatagaatttctgaaagagagagtagatggtcaaccagtcacaagttggttggcatggggtggtgtgcagaggaaatctgcattcactgttgagtaaaaacttgtagaaagcacattatagagcttatgttagaatccatcttggaggatttttgttttaaaccatcctaagcattttccctcttcccttctaattggaattataattgtttcatctactctgtgatttttctggttggaaaaacaatgttctccttttccaaattggaataaagactcagaattacccattcttcataatgatgtctgattggtacatgcactccaggaagtctcaacctagaaacgttgccaacctaagcatttagaggaaaactggctcatcttctgacccaaactcaaaacatatgagtacttgcatacctccatttctgcatggaagatgttaaaacagatttcattttgttccatttattttgggaaggtgcgtgggggtgttctttcaagtgattcacatctcaaacccataccactctcaacttttatttgatgtgttcaaagccaaaaaataaaataaaataaagcagggctgaacacttaatttgacatgaagctgaaggagtgagcaagccagaggagagaggttgaatgaagcatagccttggcttcataccacactttttgtgccttgtattatcaatgtaaattctgaatgttgtacagtaaatacttggatggacttcttagaaaaggctgcactggcttctttttcagcacatgtacatatctataaatatatatacatatatatttggtaatgccaaacagctgtgttatattgtattgaacaaaatggatggtttggatgttttatgtagagtttgcaaaaaaaaaaaaaaaaaaaaaa

SEQ ID NO: 601 - DNA, 727 bp, Macaca Fascicularis
  misc_feature (1)...(727): n = A,T,C or G
atacatatatatcaaaatttacaagggtgtctatgtatatataganagtgtgtccacacaaaaaatagatatagctatcagtnnnnnnnnnnnnnnnnnnnnnntttttttaaatgtagaaaagctannntaaacatctctttccatttattcttaattttttgacatattggtatttcttaatatcacaaaactttaattttttaaagggaaatgaggaatgcacatcagtgattgtcaaacatcaccccctaatttcctacccaatctccccccacctacccaatcatattcactaattctgttttgtcaggcttccaacaaagttcaatatttctaacactctagtgcaataaaaattattaaatagctaagaggtgtgcatnnnnnnnnnnnnnnnnnnnnnnnnnnnnnnnnnnnngaatgttgtaatatatnnnnnnnnnnnnnnnttaaaaaaagtgtattcaatcgtatattgtctatagtatgtgctatgaaatttgcatttatgatatgtaacaggggcaaagccaaattcatgttactctgttcagtcagaaacattttgtggcatacagcattcctgggaagtgctgtaccttgtttcgttttggttttagttttgcatttagagtgccttataattgatgcctattttaatagcatttctttttagcttttggttcgtatttnnnnnnnnnnnnnnnnnnnnttactctttcta

SEQ ID NO: 602 - DNA, 2032 bp, Macaca Fascicularis
ttcgacaatattggaatactttggaattttttatcctggttgttggaatcattgatatcttttgtgtatactttgtgaaattgagacgacacaacttggctcttattcagcttacagtaataatgggatatttaagaataattagatttcttcctctcttcaagataatagtaccaatactggtaaatattgcagatgtgcagatcaaaaagcgcctcagcttgatgtatagtattacaaaaggctatatcaaaagtcaagaagatgccaaacttctaataaaacaaatatctgtccatgaatcaatatatcagaaactatatgaaattttggaaaccaacaaacaggatgctgtcaaagaattaggactcatagagcatgaaggtcgtgatgttgtcattgctttgaagactaaacaggcaatccggaatgtgattgctaaagctctaaaaaatctcaccttcctttgttcaagaggcattattgataagcatgacagcactgagataaataaggtacttcttaaaaaattaaaagcactaaataactttccaaaggcaatcccacccccaactcctgacaaataccttcgcaacatcatttggctggaaggtaaagatgttctcattgacttcttcaaggaaagagccaaacttgcctgttttgactacggagatatcatttgtaaagcaggtgaaatgccacaaggaatctacttaattatttcaggaatggcaattttgcatagtttatctcctacctttggaatagagagtagccaaaggcctgatagaaagtccagtgacatgtttacagagttctgtactgctggggacataattggagagctaaactgtctgcttaagtgtgaaattgaatatactgtcatctgtgaaactagtttacaggcctgctttatctccctggaggatttatatgaaggctttgatgccttctggccatctctggaatacaaaatatggctaaagcttgctctcagtactgcctaccagtattttgaaccaagtcttattgacgaggacttaaagtttcagaagtgtgtgatgttcaatcaagcatatgtggaaactttatcaagctataatgaaatgagtattgataatatgaccatgaaatttgttatccttgtgtatggcagtgtaattgatactaagacagaggaaccatattttgcaccttgcattatacctacaacctgtgagcaggttcagggaacttctgatttaagcaagctgctaatagtccaagcatcagagcttacccaaaggaatagtaacaccaatgtcatggatttggttaacctcagtcgacactggtcttcaaacaacagggagggaatatgactggaagacaagagatgagttgaaaactggataccattttagaaaagggtattaatgatacaaatatgatgtgtggagtcaggttaaagaccaagctactttcctcactcaaatgctaaaggattatctccaaggagtttacttagaagctactgaaacaggttactgctgcatttattttataagcaatggatggactgctgtaaaaattcttaattttaagtagttgcattatatttgaaatgttaaaaaattcttcgggataatataaaatacactgaaacatatgtcttatcaaacgaaaccctgcttccagctaagagcaaattttaacatagtgcattataaaaagtattgtataaccgatatgttactatctaaagtatagaatctgtaattttcatttgtgaaattgttataattagtgcctccctaatattttccagagtgtagctgttctccccttcccaatttggtaaatattgaaaaactgaattatattccacaatcttagtaactttcagtaagtaacttttgctttcagtaaaatttaggagaaattaatattctcatattgcatagtactgtttgatgtcacctttcattttatttttaaaaatcaaataaagttgagttttatggttgactgttaaaaaaaaaaaaaaaaa

SEQ ID NO: 603 - DNA, 2788 bp, Macaca Fascicularis
gaattccagcggcgccgccagagtctgaacaagcgctggggtggagggggcggggaccctgggagctcggcgggtcgctccattggggggtactagtggcgccgccgccactgacaccaacaccgccaccacctctgtatccatgatggactcggtgttggaagaggacgtcaccctccttgggacgctcagcggctgcagtggccttgttcccaatgtaccagatgacctggatggcatcaaccctgatgctaggttgggaaatggtgtgctctcaaatgtgtcagaagaaacagtgtctcccacccgagcacggaacatgaaggactttgaaaatcaaatcactgaattgaagaaagaaaactttaacctaaagctgcgcatctatttccttgaggaaagaatgcaacaggaatttcatggccccgccgaacatatctacaaaactaacattgagctcaaggtggaagtagaaagtctgaagcgggaactccaggagagagagcggctgctcatcagagcctccaaagcagttgagagcttagctgaagctggtggctctgaaatccagcgggtaaaagaagatgctcgaaagaaggtgcagcaggtggaagatctcctaaccaaaagaatactccttttagaaaaggatgtgaaagccgcccaagcagaactggaaaaggcctttgcagggacagaaacggagaaggctcttcggttgagtttggaaagcaagctttcagagatgaagaagatgcacaagggggacttggcgatggctctggtcctggatgagaaagacagactgattgaggagttgaagctgtctttgaagagcaaagaagctttaattcagtgccttaaagaggagaaatctcagatggcatctcctgatgagaatgtgtcgtctggagagctccgaggactttgtgctgctccaagggaagaaaaggagagagaaactgaggctgcacaaatggagcatcagaaggagagaaacagctttgaagagaggatccaggcacttgaggaggacctgagagagaaggaaagagaaattgctacagagaagaaaaatagtttaaagagggataaagccattcagggtttaaccatggcattaaaatcaaaggaaaaaaaggttgaagaacttaactctgaaattgaaaagctcagtgctgcctttgctaaagccagagaggccctgcagaaagcacagacccaggaattccaggggtctgaaaactatgaggctgctctatcaggaaaggaagcccttttgactgagctgcgctcacaaaacctcaccaagagtgcagagaaccacagactgcgtagaagcattaagaagatcacccaggagctgagtgacttgcagcaggagagggagagactggagaaggacctggaggaagcccatcgagagaagagcagaggagattgcaccatccgtgatcttagaaatgaggttgaaaagttacgcaatgaagtgaatgaaagaaaaaaagcaatggaaaatcgttacaagaatcttttgagtgaaagcagtaaaaaattgcacaatcaagagcaagtgatcaaacatctaacagaaaggaccaatcacaaggacatgttacttcagaaattcaatgaaaaagatttggaagtaatacaacagaaccactatttaatgactgcagaggatctcgagctcaggagtgaaggcttaataacagaaaagtgcccttctcaacagtcaccaggcagcaaaaccatcttctctaaggaagagaaacaatcatcagactatcaagagctgattcaggtcttaaagaaagagcaggacatctatacccatctggtcaaatctctgcaggaatcagacagtatcaacaacctgcaggctgagttaaacaacatttttgccctgcggaagcaactggagcgggatgtgctttcatatcagaatttgcggaggaccttggaggagcagatcagcgaaattcggaggcgggaagaagaatcattttcattttatagtgatcaaacatcttatctaagtatttgccttgaagaaaacaatcggtttcaagtggaacatttttctcaagaagaacttaagaaaaaggtcagtgacctcatacagctagtgaaggagctgtatacagacgaccagcatctgaagaaaaccatttttgatctctcctgcatgggtttccagggaaatgggtttccagatagacttgtgtctacagaacaaacagagattatgaaagacctttccaaaggaggctgcaaaaatggatacttaaggcacacggagcctaagattttagaatccgatggggcccacacacctggctgcctagaagaaggcgtgttcataaacctgcttgcccctttgttcaatgagaaggccacgttgttactggaatccaggccagaccttctgaaagtggtacgagaactgcttctgggacatctgtgcttggcagagcaggatgtttctggagaacaccttggtggtaaaacagagaagacacccaaactacataaaaaattgtttgaacaagaaaagaagttgcaaaacaccatgaagcttttgcagctgagcaagcgccaggaaaaagtcatctttgatcagttggtcgtaacccacaaaatccttcggaaggccagaggaaacctggagcttaggcccgggggagcccatccaggaacatgcagtcccagcagaccaggctcctgagaagaacttgcagccaataaagcttgtgcttccccactgaaaaaaaaaaaaaaaaaa

SEQ ID NO: 604 - DNA, 749 bp, Macaca Fascicularis
  misc_feature (1)...(749): n = A,T,C or G
gatgttgggccatgggcgtgacactatactgctnnnnnnnnnnnnnnnnnnnnnnnnnnnnnnnnnnnnnnnnnnnnnacacagtaagatcaagagtcaggccctggaatttccagannnnnnnnnnnnnnnnnnnnnnnnnnnnnnnnnnnnnnnnnnnnnnnnnnnnnnnnnnnnnnnnnnnnnnnnnnnnnnnnnnagaaatcaagctgcacccctgggtcacgaggcacggggnnnnnnnnnnnnnnnnnnnnnnnnnnnnnnnnnnnnnnnnnnnnnnnnnnnnnnnnnnnnnnnnnnnnnnnnnnnnnnnnnnnnnnnnnnnnnnnnnnnnnnnnnnnnnnnnnnnnnnnnnnnnnnnnnnnnnnnnnnnnnnnnnnnnnnnnnnnnnnnnnnnnnnnnnnnnnnnnnnnnnnnnnnnnnnnnnaacctgctcacgaagcaaggcagcgaagacaacctccagggcaccgacccgccccccgtgggggaggaggaagtgctcttgtnnnnnnnnnnnnnnnnnnnnnnnnnnnnnnngcccccgcccccggctcccccgcacgcatgcatccaccgcggcaggaggaggcgatggagcccgagtagctgcctggatcgctcgacctcgcatgcgcgccgcatcgcctcttgggggctgctgcaccgcgtttccatagcagcatgtcctnnnnnnnnnnnnnnnnnnnnnnnnnnnnnnnnnnnnnnnnnnggttatctgtttt

SEQ ID NO: 605 - DNA, 733 bp, Macaca Fascicularis
  misc_feature (1)...(733): n = A,T,C or G
atannnnnnnnnnnnnnncaaggaacactacnnnncagcattgtactggaagtgctatctaatgcagtgataaaaaaataaaataaaataaaatgcacatagatttggaaggatgaaatacaactgtctttgttcacaagtaacatgattgtctttgtagagaattctaaataaacaacannnnnnnnnnnnnnnnnnntaagtaattatagcggggttgcaggatatagtnnnnnnnnnnnnnnnnnnnnnnnnnnnnnnnnnnnnnnnnnnnnnctggaggaaccctaaannnnnnnnnnnnnnnnnnnnnnnnnnnnnnnnnnnnnatttttttattgcaattatatgatattctgggagaggcaaaactatcgagccagtgaaaggaccagtggttgctgagagttgaggggaagggagggatggcaggtagagaggtgatttttagggcagtgaaagtattctctagggtaatgtaatttgtcgaaacgcagagaatggaaaacagtgaatggaaaatgcagagtaaaccctaatgtnnnnnnnnnncttcagttaataataatatatcactattggctcattaattgtaacaaatgaannnnnnnnnnnnnnnnngttaataattggggagcctgtggaggatgggaggggtgaagggttatatgagaattcgctgtactttttcctcaatttttctgtaaccctaaagctactctaaaaaatgaag

SEQ ID NO: 606 - DNA, 702 bp, Macaca Fascicularis
agcgctttcgcagtccagtgtttgccgcagttcccgcatggtcaggccccaggactggcttgcgagccccgggggtctggtcttttcatgtccttttctctctggctaggcagatgtgccgcaaatatttgacgaatagatggatggcagacattaactgcgtgcctggccctatgcgggcggcagcgggatagggtgagcggagaaacggaacggcctccccaccccattcctagggttcctagtcccgggaaggtagctacccaaagacgcctaggttgtcaggttcaatccttgagcctcagccaaggcgcagaggggtgcgggtaaacgaggagtgggcgaggaaacaggacgggaacaagtggccggcccctgtacggcgcgcgctggcggcgcagccttggccgcctgccttgcactaccgacgctgaccactagaggtcagcgctgcaccgcactcgtcactcccatggccatagggcggccgggatgtggagggtgagcgctgtgggcagctcgggggctgaaagctgggaagaggaatctgaagaacagccccatctctttggcctgcacacttggaactcagtaagaagggactgtttctaggtggactgggcgcgagcgggtactgtccccagaggtataggtgaggatggagtgagggaggggacactaggtgctccggggttcacccaa

SEQ ID NO: 607 - DNA, 639 bp, Macaca Fascicularis
gaaaagcagcctcccttctcctctccctctcctccctccctcccttcctcagcccctgtctctgccaggtgcctcctctcattcaggcttcagagcagccctggagacaggagggccatgttaaaagctttttcacagttttaagaagacaaggggagggtgaggatagtggtggggggtctggcaccatctcattgctttaatcccagcaacacaggtggcagcttctcccccttccttcccaccccagtccctcttcccatccctctcttctagcttggtaatgaagtatatttattggtgacggaaacagctgctgctgcttctcctgctgctgggccctgctcccctgtctcttctccgtgacctttctctagccagggagaagggagagcaggagtattgggactgggccctggggcccaagtaccagctgggtcccctttgctttcttgtgttccagccacctgccatttcctccctgcctcccaccctccctccctgcctcctgtcctgcttcccaccccctgcctgcccagcctgggccctgcagtgtggagagacacataagccttactgtcctctgggggcaggagccgagcctttttgttgctccgctcccaggagagtgagggtgac

SEQ ID NO: 608 - DNA, 2567 bp, Macaca Fascicularis
  misc_feature (1)...(2567): n = A,T,C or G
aaaatttgcactgtccttccacaatcagtgggagaaacaaccctaacgtccctttctctcccttgaaatgaactgctagctggctcggagggtgaggcccagagtccaagtctgcggtctgtgtggggctctaggctctaaggaggcgcccaggtccctagaaggcggcgccgggtgaggcaatcctggacgcgggtcgggacctgcccgcagctacgctgggacgaggaacccagagccagtcccgcggcgcggcaagcggccgggcgctaaggactacatttcccacaatgcactccgggggcgggccgggtcgggctgtgcggctggagctgggccttggctgcgagaggccggagaaagctgtcttcctgcactagcggccggctgagggcggtgggagggcgcggtgcctgcgctgtggccatgtctgtgtacgcagggggccggggccccgcgaagctgagccctcaggccgggcccagccggacacccttacccccccggggctctggcagagggcagtgaccggcaccttctgtgcgtcctgggcccctctgagaaacagggtcttactctggcannnnnnnnnnnnnnnnnnnnnnnnnnnnnnnnnnnnnnnnnnnnnnnnnnnnnnnnnnnnnnnnnnnnnnnnnnnnnnnnnnnnnnnnnnnnnnnnnnnnnnnnnnnnnnnnnngacacctaggagaacccaaaggatggctgctgacatgcaaaggaagagaagcagtgaatgccctgatggcacattgactccttctgatggacacagtgtggagagagctgagagccccacaccaggactagcccagggaatggagccaggtgctgggcaggagggtgccatgttcgtccatgcccgttcctacgaggacctgactgagtcagaggatggggcagcttctggggacagccccaaggagggtgccaggggtcccccgccgctgcctgcagacatgcgtcagatcagccaggactttagcgagctaagcacccagctgacgggtgtggcccgggacctgcaggaggagatgctgccaggaagctctgaggattggctggaccccccaggggcagttggccgaccagccacagagccccccagggagggcacagccgagggggatgaggaggatgccacggaggcatggcgcctgcaccagaagcatgtctttgtgctgagtgaggcagggaagcctgtgtactcccgctatgggtctgaggaggcactttccagcactatgggtgttatggtggccctggtgtccttcctggaggcagacaagaacgccatccgctccatccatgcagatggctacaaggtagtattcgtgcgccggagcccgctggtgctagtggcagtggctcgcacacggcagtcggcacaagagctggcgcaggagctgctctacatctactatcagatcctgagccttcttaccggtgcgcagctgagccacatcttccagcagaagcagaactatgacctacggcgcctgctctcgggctcagaacgcatcaccgacaacctgctgcagctcatggcacgagaccccagcttcctgatgggggcggcacggtgcctgcccctcgcagcagccgtgcgcgatactgtgagtgccagcctacagcaggcacgggcgcgcagcctggtcttctccatcctgctggcccgcaaccagctcgtggcacttgtgcgccgaaaggaccaatttctgcaccccatcgacctgcacctgcttttcaacctcattagttcctcctcgtccttccgcgagggcgaggcctggacgcccgtgtgcctgcccaaattcaacgcagccggcttcttccacgcacatatctcttacctagagcctgacactgacctctgcctgctgtttgtctccactgaccgtgaggacttctttgcagtctctgactgccgccgccgcttccaggagcgccttcgcaagcgtggagcccacctagccctgcgagaggcgctgcgcacaccctactacagcgttgcccaagtgggcatccctgacctgcgtcacttcctctataagtcaaagagctcgggactcttcaccagccctgagattgaggccccgtacaccagtgaagaggagcaggagcggctgctgggcctctaccagtacctgcacagccgtgcccacaatgcctctcgcccactcaagaccatttactacacgggccccaacgagaacctcctggcctgggtgacaggcgcctttgagctctacatgtgttacagccccctggggaccaaggcatcagctgtcagtgccatccataagctgatgcgctggatccgcaaagaggaagaccgcctcttcattctcacgcccctcacctattgatgggaatgtgtgcaggctcggccttcccaggcacactgggtgtgggaagccgtaggagcctccagatgggggctggcctctcttgcccagccagcaggcagggactgtgggttggtgagtgcattaaagtgctttggggaaaaaaaaaaaaaaaaaaaaaaaaaaaaaaaaaaaaaaaaa

SEQ ID NO: 609 - DNA, 756 bp, Macaca Fascicularis
  misc_feature (1)...(756): n = A,T,C or G
gctganannnnncatcaggatgcaccagacaaccatcactatgtgatgcaccagacacctatcactatgtggtataaggagcgctacctgttcgtgtacaggcctgaccaggtgtctgtggtggacnnnnnnnnnnnnnnnnnnnnnnnnnnnnnnnnctgtgggaacgacaccttcagccgagagccagccatcgtcaggttctccnnnnnnnnnnnnnnnagtggccgctgcacagaggtcagggagtttgccattgtccccctgcatgcggccccggaggacgcagtagctgagatcgatgctctctatgacgtctacctggatgtccaagagaaatggggtttagaggatnnnnnnnnnnnnnnnnnnnnnnnnnnnngctgcagctatgnnnnnnnnnnnnnnnngtcatccatccgcctgcggacgagccccaccttnnnnnnnnnnnnnnnngacaccgnnnnnnnnnnnnnnnnnnnnnnnnnnnnnnnntacgacaggatcgtggttgcagggacgctgctccaggacgccgttgttcccgactcggctcttccctttaacttccagnnnnnnnnnnnnnnnnnnnnnnnnnnnnnnnnnnnnnnnnnnnnnnnnnnnnnnnnnnnnnnnnnnnnnnnnnnnnnnnnnnnnnnnnnnnnnnnnnnnnnnnnnnnnnnnnnnnnnnnnnnnnnnnnnnnnnnnagacaaacagcccagcactcaggttaagaaataccttttaattta

SEQ ID NO: 610 - DNA, 339 bp, Macaca Fascicularis
  misc_feature (1)...(339): n = A,T,C or G
gcgccatcttccttgagactcctgcgccatgagagcgaagtggcggaagaagagaatgcgcaggctgaagcgcaagagaagaaagatgaggcagaggtccaagtaagccagcccgtgcacctacgacgcctgcaggagcagaagtgagggatgctgagggccgnnnnnnnnnnnnnnnnnnnnnnnnnnnnnnnnnnnnnnnnnnnnnnnnnnnnnnnnnnnnnnctcgccgcgatcgcctggagaaatgaccgcctttcttacaaccaaaacagtccctctgccctggaccccnnnnnnnnnnnnnnnnnnntgttctcttgtggccaagtgtagctc

SEQ ID NO: 611 - DNA, 753 bp, Macaca Fascicularis
  misc_feature (1)...(753): n = A,T,C or G
ctaagtttgtnaaanatgnnnnnnnnntgattgtattgttggctttctctctgagcattgaggttatactagaagtagagctgctcaaacataatatcattacctcataagcattaacaaatcaggcccaaagagtataagtcctagaaatttgtttttaagcagccctagtcatggtgctggtgctactgccttgttttaggagcctgcctcctgtcagtatgaaaccctcacctgaaaaatgacaacctggacaccaaacactgagcaccttcaacaggcacattattttccccgggatcagtaaggggatttggtttctactattgtagaattctgaaaagaggtaaagtagtagtcctttagtcatcctatttttgctttcaattttgatatttcagactgtaaaaggccttgggggatgatagtacatgtggtagcagtaattttttttgaagcaactgcactgacattcatttgggttttctctcattatcagattctattccaaacaagtattctgtagatccaaatggattaccagtgtgctatagacttcttattatagaacagcattctattctacatcaaaaatagtttgtgtaagttagttttggttaccacctaaaatatttttaaatgttctttacataaaaatttatgttgtgttttaaaatccttaggggctttatctatttttctaagtcagttaactgtacttttaaaaaaagtattttgtatctactttgaact

SEQ ID NO: 612 - DNA, 672 bp, Macaca Fascicularis
acggtgcggggcctgttctgccagcaagcaacatcgggaagccactgaggacgagatggcaacagtgggacccacaggagcatggcaggggaggcagggcctgggttacagttgcaggaggagatgaccgtccccctacccgcggaaccgcttcgaccagaaacgtccactgctgtgcccggctggccgcccaggagataatggcttccaaagcaggcctgcaggccactgtggggctcaggacacgaaggcagtgggcctggaccccagcccgtatcaggaccttctcagatggagctgcaggtggtgaagtcgggcaaccatcgcactgtgtggggccagaatccccgtcaggcccttctcctggcagtggagggagggccccacaggtaacacccatgcagccaccatgctcaggacacacgtgtgccctgcaggccagaacccacacggtgggtgggggggggggcgctctgggtgatgggcagcccccattcaattcacgacagcttctcttacagttaaaatacatggaaaactggagcgccggcaccatcattttattataatttaaaatgtaattataaaaggctgatttgaatgtaaatatctctcttaaacacatgaaaggggattctaaatttaagagccccaaatcagcaggtaaatatt

SEQ ID NO: 613 - DNA, 672 bp, Macaca Fascicularis
  misc_feature (1)...(672): n = A,T,C or G
cagcggatgtnnnggcnnngnnnnnnnnnnnnnnnngnnnnagnngtttattgtggcgnnnnaggctacaagtccaagtatcttcagctcaagaagaagttagaagatgagttccccggccgcctggacatctgcggcgagggaactccccaggccaccgggttctttgaagtaatggtagccgggaagttgattcactctaagaagnnnnnnnnnnnnnnnnnnnnnnnnnnnnnnnnnnnnnnnnnnnnnnnnnnnnnnnnnnnnnnnnnnnnnnnnnnnngctaatgcgccctgaaggcagagtccagcgaccttgacccagcccctctcagcannnnnnnnnnnntaggaaggactgaaaagtcttgtggacgcctggtctttccctgatgttctcgtggctgctgttgggggcagagattgacgccgctggtctttgcctctgtgtgggagtctgtgtgtatgtgtcttccnnnnnnnnnnnnnnnccccaccctcctcctgtccnnnnnnnnnnnnntctctctttgcataccccatgtcttccccagttgtcccctggagtttgggnnnnnnnnnnnnnnnnncatccttctcaaggggaagccaagagaggcatcaggatgggtgagtttctgatnnnnnnnnnnnnnnnaccattcacgatca

SEQ ID NO: 614 - DNA, 641 bp, Macaca Fascicularis
  misc_feature (1)...(641): n = A,T,C or G
atacattcaggggagagaggaaataaaaaaccaggatcactgctcaggagactggagaacagctcagagtatgaagctggggagttgtagaaagaatatctatacaacaaaattannnnnnnnnnnnnnnnncagtgaaaaaagtgttatttgtatagattttacattttttttgttaaatttggaaagaatgtagaaactacaccacaaaatcaaaattattaatgcagagaaaaacagaaagtactacaagaaatggaatgtaatctttgaatatatatttgtgcacacgaatgtaagtacagataattcttacaaacaaagtttggaaaaagtgtattttaaggtttttttttctactgatttcctaattgatttaaaaaggtgttattcaaatttacattccacaaacagtgtattaaagtatctatttccctactctctaatcaaaactgtggttatcaattttttatattttccatttcaatataaatgtaatatcattattgtattaatttgcatgtttaaactgaggtaaaacatcttttcttatgcttataagtcattgtatttcttttttatattagatgtattcctttactttgtatattttttctatttgtttattaatctcttacgaa

SEQ ID NO: 615 - DNA, 685 bp, Macaca Fascicularis
  misc_feature (1)...(685): n = A,T,C or G
gcaagataaatggccgatgaaacttgtcggcccctcggccatggcctagaaaccactnttcctcgtccctcgtcaggaaaaagttgcagtgcggatttccagccaaattccagttgtataccttaacattaaactctttgctcgccgccgcatacatcctctgatcctgtggaattccggcaattgatccggcagccggcgaattttcgttcataaatgaatgaagtcctattagaattgcagatacagtccatccgggattccatgattccggatgataatcagaaattgataggcataggcgggtatttgtttggaatcttccattcggtgtaatcatcgtgatagcaggtggactccacgggaaattctccttaaaaatcacttttccccaataataaccaccatagaatggtgtatccggtgatccacgaaggcaataatgccattcaagaatattatcctcatttggaagtgctttaattccatcaacaggatcttgcatcagttttgcgtagtctttttggaggcgtcgaacggctgagctggatgctgtgccagctgctggtacggatacgccgggacccaaattcagcnnnnnnnnnnnnnnnnnnnnnnnnnnnnnnnnnnnnnnnnnnnnnnnnnnnnnnnnnnnnnnnnnnnnnnnnnnnnnnnnnnnnnnnnn

SEQ ID NO: 616 - DNA, 2455 bp, Macaca Fascicularis
caggacttcaagccatgtggcgcgtcctgtttctgctcagcgggctcggcgggctgtggatggacagtaattttgatagtttacctgtgcaaattacagttccggagaaaatacggtcaataataaaggaagaaattgaatcgcaggtatcctacaaaattgtaattgaagggaaaccatacactgcaaatttaatgcaaaaaaattttttatcccataattttagagtttacagttataatggcacaggaattatgaaaccacttgaccaagattttcagaatttctgccactaccaagggtatattgaaggctatccaaaatctgtggcgatggttagcacatgtactggactcaggggcttactacagtttgaaaatgttagttatggaatagaacccctggagtcttcagttggctttgaacatgtaatttaccaagtaaaacataagaaagcagatgtttccttatataatgagaaggatattgaatcaagagatctgtcctttaaattacaaagcatagagccccagaaagattttgcaaagtatatagaaatgcatgttgtagttgaaaaacaattgtataatcatatggggtctggtacaactgttgtcactcaaaagattttccagttgattggattgacgaatgctatttttgtttcacttaatattacagttattctgtcttcattggagctttggatagatgaaaataaaattgcaaccactggagatgctaaagagttattacacacatttttaagatggaaaagatcttatcttgttttacgtcctcatgatgtggcatttttacttgtttacagagaaaagtcaaattatgttggtgccacctttcaagggaagatgtgtgatgcaaactatgcaggaggtgttcttctgcaccccagaaccataagtctggaatctcttgcagttattttagctcaattattgagccttagtatggggatcccttatgatgacattaaccaatgccagtgctcagcagctgtctgcattatgaatccagaagcaattcatttcagtggtgtgaagatctttagtaactgcagcatcgaagactttgcacattttatttcaaaacagaagtcccagtgtcttcacaatcagcctcgattagatccttttttcaaacagcaagcagtgtgtggtaatgcaaagctggaagcaggagaggagtgtgactgtgggacccaacagaattgtttccttcttggagccaaatgctgtgatactgccacatgtagatttaaagccggttcaaattgtgctgaaggaccatgctgtgaaaattgtctatttatgtcacaagaaagagtatgtaggccttcctttgatgaatgcgacctccctgaatattgcaatggaacatctgcgtcatgtccagaaaaccactttattcagactgggcatccgtgtggaccgaatcaatgggtctgtatagatggagtttgtatgaatggggataaacaatgtatggacacatttggcggagaagcagagtttggtcctacagaatgttattcttaccttaattcaaagactgatgtatctggaaactgtggtataggtgattcaggatacacacagtgtgaagctgacaatctgcagtgtggaaaattaatatgtaaatatgcaggtgaatttttattacaaattccaagagccactattatttatgccaacataagtggacatctctgtgttgctgtggaatttgccagtgatcatgaagacagccacaagatgtggataaaagatggaacttcttgtggttcaaataaggtttgcaagaatcaaagatgtgtgagttcttcatacttgggttatgattgtactacagacaaatgcaatcatagaggcgtatgcaataacaaaaagcactgtcactgtagtgcttcatatttacctccagattgctcagttcaatcagatacatcgcctggtgggagtattgacagtggcaattttccacttgtagctgtaccagccaggctccctgaaaggcgccacatggagaacgtttaccattccaaaccaatgagatggccacttttcttattcattcctttctttattattttctgtgtactgattgctataatggtgaaagttcatttccaaaggaaaaaatggagaactgaggactattcaagcgatgagcaacctgaaagtgagagtgaacctaaagggtagtctggacaacagagatgccatgatttcacttcttctggagtaattatctgcgatggatggacacaaaaaagtggaaaaaataaaaaaagaatgtacattacctgctttcctgggactcaaacctgcatattgtgcatttttaatttgaccagaaaatatgatatatatatttgtataatttcacagataatttacttattaaaaatgcatgataatgagttttacattaaaaa

SEQ ID NO: 617 - DNA, 3006 bp, Macaca Fascicularis
  misc_feature (1)...(3006): n = A,T,C or G
aaacatgaggcagctgccagccggcctgggcagtcctgtctgcctcggctgtgaagtggggagactggcaacagttcccttcggcacccaggatgcagccggctaagcaggctcgtttcatcagcgaggaagctgagggccagggagcggcagagccaggacctttctgaacaccagcacacctgccccgaatgcatctaccactgcagggcctcggggaccactggagatggtcgtgtgtgtcccggcctcttacaggacaggtgtcaggagcccaacgtggaggcagctgccctggtccaagcccacagtgagaggacccctgccctgagccgctgtggagactgcgtgtacagcagcgacggtgagctggagctgtccacggtgcgccaccagccggaggggctggaccagctgcaggcccagaccaagttcaccaagaaggagttgcagtctctctacaggggctttaagaatgagtgtcccacgggcctggtggacgaagacaccttcaaactcatttacgcgcagttcttccctcagggagatgccaccacctatgcacacttcctcttcaacgccttcgatgccgacgggaacggggccatccactttgaggactttgtggtcggcctctccatcctgctgcggggcacagtccacgagaagctcaagtgggcgtttaatctctacgacattaacaaggatggctacatcaccaaagaggagatgctggccatcatgaagtccatctatgacatgatgggccgccacacctaccccatcctgcgggaggacacaccggcagagcacgtggagaggttcttccagaaaatggaccggaaccaggatggggtggtgaccattgaagagttcctggagacctgtcagaaggacgagaacatcatgagctccatgcagctgtttgagaatgtcatctaggacacgtccggaggagtgcatggccatggccacctccacccccaagaaatctccatcctgccaggaacagcctccgagaaacttttaaaaaatagatttgcaaaaagtgaacagattgctannnnnnnnnnnnnnnnnnnnnnnnnnnnnnnnnnnnnnnnnnnnnnnnnnnnnnnnnnnnnnnnnnnnnnnnnnnatacagccattcatctgggctggcagggaggggctgagtctggctgggagccgagtccaggagccccaaccagccctccccaggccagcgaggcgaggctgcttctgggtaagcggttgacagagcaggtctgcaggctaccagctgctggatgtcaccaggaaggggctcaagtgcccctgcaggggagggtccaacctccggtgagcccacctcgtcccgttctccattctgctttcttgccacacagtgggtcggctccgggctcccctggcctcgtccccacagccactccctacccactacctacacctctagaaagcctcttacctcaggaccccagagggaccagctggggggcaggggagaggggtgatggaggccgagcctgcagctttctggaaatgctttcctgggggtcccaggaccccctgccactccactgacctggaagagctgggtaccaggccacctactgtggggcaagcctgggtggtgagggccactgggccccattctccctccatggcaggaaggcgggggatttcaagcttggggactggtcgtggtggagaatccgagggcactctgtccctccacagggtgggatgagcctttccttgtcctagtcctggttcagtgggaatgcagtaggtggggctgtacacaccctccagcacagactgttccctccaaggtcctcttaggtcccgggagcaggcacgtggttcagggactggcagccagggagcccagggcagagctcagaggggcctgggaaggggtgcgtccctcctcttcctgcagtgcccctcctgtggcccagcggcttggctgagccccctctcctgaagcagtgtcgccgtccctctgcccaggcttgccccagccttgcacaaaaagcacaagcattccttagcagctcaggcgcagccccggtgggagcccagcacactgcttctcagaggccaggccctcctgctggctgaggctcgggcccaggagccccagtacggtggccctagggaagaggcctggggggtctgccctgtgcctgagatcagcagggccccaaagcccagcccggctgaccaacatttaaaagcacaaaccctggggactctgcttggcggtcccctccatctggggatggagagtgccagcccaaagctggagccagcggtgagggctgaggagcctgcggctgggtggtcagcggaaaccccggaggagagagacgctgctcgcacctgcccgggcctcaccgagaaggaacctggtcccaggccgcacggcccctccaggaacattcccacataatacattccatcgcagccagcccagctccactcagggctggcccggggagtccccgagtgccccaggaggccagccccagggtgagcagggccctcagaggcaaggcggtgtggtggaggcccctcggcattcgggcacagcgtggcctcccccgaggagctgcagggacgccagctccagactccaggctgaccgggggcctctgcctccaggagggcatcagctttccctggctcagggatcttctccctcccctctccccctgcccggccctcccagctggtgtcactctgctaagaccaaggcctcaggagagcgtccccaccacacccctgcccgcattgacctcggggccagactggctgcacagcccaaccgggaggggtctgcctcccgcgctgggaccagaccggccgcatgtctgcatggcagaagcgtctccctcggccacggcctgggagggtggttcctgttctcagcatccactaatactcagtcctgtatattttaataaaataaacttgacaaaggaaaaaaaaaaaaaaaaa

SEQ ID NO: 618 - DNA, 823 bp, Macaca Fascicularis
tcagatgcccagagtttttgaaaactttctgtctgagctcaaatttgatccctcacaagaggattcatacaagtgggaaaccttacaaatgcactgagtgtgagagagctttctagcaatgctcagcccttctcgttacaagagaattcacaccggagaacaactttttaaatgccttcagtgtcagtcgtgctgcagacagtatgaacatctcattggatctcagaaaacccaccctggggagaagccccagcaagtgtggaaaaagcttctaacagaactctgacttacccatcagagaagccatactggtgaaaaattgtatatttgtcttaagtatggcaaaaacattcattggagagccttacttgggtttgcactcccaaaaaaaacccagtctgaggaaagactacaagtgtctgaatgaagagtgcttgttagtgatcaactcttgtggtacatcagggaactcacataagtgaaaaaacccatacttaccttgagtctgaaaaaacctttggtagaagctcctgtcttattgggcccccaaaaacctgttctgcagtgagagatttacttgtgggtgagaatctatatacatataatatgtatgagaagaactgttctcatagttgactcatgtgatagagaggactttacatgaaatcagtatgaaaatagttttttagatacccagaatcttgttctgggagaagctagggcgggtcagagtagacctgatggttaactcaggtaaagatgcttttcttttatctgaaccacttaatgattgctttacttttacttttaaaaattcagaaat

SEQ ID NO: 619 - DNA, 677 bp, Macaca Fascicularis
  misc_feature (1)...(677): n = A,T,C or G
tctatcacgtttaagctttgttagaaaatgtatttaagaaaatcacttccggttttcccatggctaatgggctgcctggatggtagatcagactgaccagtgttatctttaaatgttaaaaccctgtggttgtatccagtagttacaattctgcagagccctgtttccttagaacctgagggacatccatttcttagcacagtactaacaatcctgaaatcctctaaggactagttattttaactatatttcatgggcagcagcagactcaactctaagcctggtaattagattatggttaggtctgtatcaccatactagaccagctactctaaatatgcattattcctgtaggattgggtaaggttgctagttacttgagtttcctatttcccttctacttcgaagtctcatcttcatctgtgcagagttcagaaatctaattttattggttttctgggttaaccagttgatttacaaatctaagtgcatgtgaaagatttatcagtcatattactaccttattattttgtagtgagaaatatcattccaattaaatagaatcgattttatcagctagtcagtgcatactcgtctcaattttgacacagcagaaacttgtttaaattcagaatgtagtgtcttcatctgtntgtactgctgtaacaaaataccat

SEQ ID NO: 620 - DNA, 703 bp, Macaca Fascicularis
  misc_feature (1)...(703): n = A,T,C or G
gggacctttgtaatttaagccaattaaaaatatggactcaaaaaaaaaaaaaattccagcccctcccgctgccttgcctcttgagggaagaggaaggcaggcagcagcttggatgaagagggagacccctcacacaacctctcctgggctcacaggagggcggagcctggggagccagttcctggaacatgcccccccctttcctgacctgttcaactgagcagatgactggtcagaaaaagtgccccgccccctgccaggcctcagctgggcaagttaaagtctctagnnnnnnnnnnnnnnnnnnnnnnnnnnnnnnnnnnnnnnnnnnnnnnnnnnnnnnnntgtgtggcctgaaggtggggcctgagcttcagggtcactgaggcatctctgggatcccagccacctggagccccggacctcccagactccacttacccattgcctctccccccaccacactcacaccaggggtagcctggagccgggatcgcagggcggggccaggccactgccctcctcctccctcctggctggcttgccccctnnnnnnnnnnnnnnnnnnnnnnnnnnnnnnnnnnnttcttcagagccaggtggatcctgtcttggtcctgcctaggtgtgnnnnnnnnnnnnnnnnnnnnnntctcagcttctgcttcctactttatgaaaatgtgactgatgtcacagggtg

SEQ ID NO: 621 - DNA, 770 bp, Macaca Fascicularis
  misc_feature (1)...(770): n = A,T,C or G
tatgttcacaccagtctgtcccacagaaaatccaactttctcttctcatgtcaatgtcagcattctgatcctcagaattggaagcaatgtgtcctcaggagacaggaggggaaatcactagcatgaccttggagtcctggtgccagatccttcttcatctttgtgggaatcaaagacaaagattctgtacctacttgaaagacgttataagcaaattatgatttaatttacaagaatactgtctcacacatatatacacacaggtttttagtatttgtttgctgtcttttacattataatatcttatagtgctttgtatttatttcatgtattagttttattttaatttcacgtaggttcctcattccttcatctgtgtattacatttcgctagaacgatcacatattttannnnnnnnnnnnnnnnnnnnnnnnnnnnnnnnnnnnnnntgaagcaggcagggagagtggaaggagatggttcacactcctgaccctccctgcacagctgtaagttcccaaaagcagaggaccctgctctgcaccttccctgggnnnnnnnnnattattgtnnnnnnnnnnnnnnnnnnnnnnnnnnnnnnnnnttcaggtgtgcaggtccaggtgcagctactgaatccagtgcaggagtggaaataagtttccaaaacacagtgtcacctgagagataagagtccatccctctaggaccatctgaattnnngcttcctggacggagcccnannntcataaaaacatctcatatgtgt

SEQ ID NO: 622 - DNA, 690 bp, Macaca Fascicularis
  misc_feature (1)...(690): n = A,T,C or G
tagaaccaaaccacaggtccccctaagaacaaccactatttctatattttttaccagaaaacaaaactctccatcgctgaaagagattccagtgggacatggtgccgtttttctatttgccttcttgcagcaacagtttctgaattgactttgttttcagacgatgccttctgttgaattctgttattaagggtccatgatgagctgtaacttctcaagaggaagaaacacagtagaaaactagagctggaaggacctcggttgacctgtctgtgattttcaaactgtggtccagagaataggggaagactgggccagacgcannnnnnnnnnnnnnnnnnnnnnnnnnnnnnnnnnnnnnnnnnnnnnnnnnnnnnnnnnnnnnnnnnnnnnnnnnnnnnnnnnnnnnnnnnnnnnnnnnnnnnnnnnnnnnnnnnnnnnnnnnnnnnnnnnnnnnnnnnnnnnnnnnnnnnnnnnnncagcactttgggaggccaaggtgggcggatcttctgaggtcaggagttcaagaccagcctggccaacatggtgaaaccccatctcatacaaaaattagctgggcgtggtggtgcatgcctgtaaacccagctacttgagaggctgaggcaggagaaccacttgagcctgggaggcggaggttgcagtgaaccaagatcatgccactcatcc

SEQ ID NO: 623 - DNA, 632 bp, Macaca Fascicularis
  misc_feature (1)...(632): n = A,T,C or G
agcatagaaaattnttgatgtgcacagagcacttatgatatggcagacagttnnnacaggccacagtggtgttatgccagtcnnngcgttgcacttatcggtnnnnnnnnnnnnngcttcnnnnnnnnnnnnnngtatggaaacaatttacaatagcatctgaagagagagtacataggttggaaatggctattgcatttcactcaaatgctgaaaagattttgcaggactgtccagaagagcctgaagctattaatgatgaggannnnnnnnnnnnnnnnnnnnnnnntgggaaatcactttcggatagattaactgttcctgtagtttatcttgatggaaccgaacaatattnnnnnnnnnnnnnnnnnnnnnnnnnnnnnnnnnnnnnnnncagagacaggatgaaactnnnnnnnnnnnnnnnnnagcagctgagacatcgtgaaatggtgcccacagagagataatagctaccagctaccnnnnnnnnnnnnnnncataatcccgcatgttgtcaacatacnnnnnnnnnnnnnnncacactaagatgcatttcacagccaaaaataannnntacaatatataaggtcgccnntcctccacaggtgatttagtaaacttaggcagta

SEQ ID NO: 624 - DNA, 546 bp, Macaca Fascicularis
ttcaaggtgatgacgtttctctggtaaggttccccttgataatgttcctatttaaccaaactaaaaaagattattttaaaaatttctcagaaaaaataacttggttctttctgctgcattagttgattgttccaaatttgagatttgtaagtttattcttatcactgactagggtacccaaattcttgcatttgtctccttatacacatctaacacatcaccaaagacaaataaagatacactctggcccaatctttgcttaaaaattccaaagcactaggagcactttaagtttggtctcgaaagttgtttataaaatcaaagggctaccgattccctgttcatcctgcactgaagcacatgatgacaatatcaaaccttcatttttgttcattaaaaagtgaatttcattacttacgtgtgtaattatatagtgattagcagtatttgttttcatcatttcacttgggtggccattaattttgaaacttttaccactcattgtagttggtcgtgttgtatggaaaatgtaatttatagctaaag

SEQ ID NO: 625 - DNA, 535 bp, Macaca Fascicularis
aggatggcgctagcggtgctgcgcttggcgctgctgctcctggcagttaccttcgcaggccctctgttccgtcgattttcaaaatataaaacgccattctgcgctcggtatcaattaccaggatgtcccagggactttaaccctgtgtgtggcactgacatgatcacttaccccaatgaatgtactctgtgcatgaaaatcagggaaagtggtcaaaatattaaaatcctccgacgtggaccctgctgatggagcagtttacagaacagaagatggagagaccaccttcactggcagactagataaattgcgtttcccctttttctcttttcctgtatttctttacataaaatttgttaacacacatcttctgagagcaggtatggaagacagccatgtgtagtgatggataatttaaagaaaaaaagaatccttgtttcttggcttttgctcctagagttaagcttgctgcccagataacttgtgcattgctttatttagttgaaataaaatcagcattgaatttagaaaaaaa

SEQ ID NO: 626 - DNA, 443 bp, Macaca Fascicularis
ggtgtcacccccgaggtatgggcgccgtctgacccgaccgtgcactccccactttcggtgagtggccgccatggtggagcggggtcggagccaagtccttcaggggacgtccggggcatttcatgttttgtggttggaaacctccctgacctttcagaaatgaacccaatcatgaggatgactcctgtacagaaaatgagagtggaggaggggggtgagggaatgagtgggaggtgcccgcacctcctcgcccggctcctcaggaagaaaccgcgcgcccttcatgattgtgctggccgagggccacggcctcagcctgatgttgagctttttaatgtcatcatcgtaacattatttatttaaacgtagttattttggtatttaattttttttttttagagaggaaaaaagcctgtattttgcgtggtgggatgaaatggctc

SEQ ID NO: 627 - DNA, 785 bp, Macaca Fascicularis
  misc_feature (1)...(785): n = A,T,C or G
agaccatgaaannnnnnnnnnnnnnnnnnnnnnactnnnnnnnnnnnnnnnnnnnnnnnnnnnnnnnnnnnnnnnnnnnnnnnnnnntgggaataagnnnnnnnnnnnnnnnnnnnnnnnnnnngagaggttgcgagagatgtttggtttatatggtcagacaacaggaaaggggagtgtatnnnnnnnnnnnnnnnnnnnnnnnnnnntagaagttttcatgtgtagtgtgctcaaaagacaagnnnnnnnnnnnggcttccgctggannnnnnnnnnnnnnnnntaacacacacccacgttggttccacgtgtcaacgttnnnnnnnnnnnnnnnnnttgattgctcaacatgcataacttgaattcaatagacttttgctggttataaaacagatgttttttagattattaatgttatatcaacttaatttgagtgagaattgaaaactgattcaagtaagtttgaatatcacgatgttagctttctaattccataaaagtaattggtnnnnnnnnnnnnnnnnnnnnnnnnnnnnnnnnnncatttgtaaannnnnnnnnnnnnnnnnnnnnnnnnnnnnnnnnnnnnnnaagatgaaactataaatataaaccatatttaaaagctcatcatgttaaattttttatgtacttttttggaactagtttttaaattttagattatatgtccacctatcttaagtgtacagttaataattagcttattcaatgattgcatgatgccttacagttttcaataacattttttcnnngcaaacgtc

SEQ ID NO: 628 - DNA, 741 bp, Macaca Fascicularis
  misc_feature (1)...(741): n = A,T,C or G
ttatttaaaaattgccnnnnntttttgtttatttttcagatttaagaaaagtttctcttcttttaagctatgtacagcttttaacaattgagtaaattatactctagtgagcaaaatttaaaacataatttctttacctcatttccccgaaatttggaaattgtttgtaagtattcttaatttatggcaatatagttatttatataagctcaataagaaactgttttcttttataacaggatgtaattggagatactggttagtttaccaatgctttgactggaatgacatannnnnnnnnnnnnnnnnnnnnnnnnnnnnnnnnnnnnnnnnnnnnnnaaaccccttggaaacactggccttataccttgttagttacagggtcctgccctgtggtaagtaaagagtgtcacnnnnnnnnnnnnnnnnnnnncccaaggttttttggagacctcaaaaagaaagtaattcattccatttatacaggtatctgcaggcacagataaatccttgactggacttatggctttaaaaaaaggccttacatcagattccttatggaaaatcttccagcaaagccaaattttttaaaaagagagcctatatnnnnnnnnnnnnnnnnnnnnnnnctttatgtaaataatcaagccaataataagactaaaacttactttacaaatgaattggtcctactatgattttgtctttaattcaatgggggaattggagagagaaaaatca

SEQ ID NO: 629 - DNA, 727 bp, Macaca Fascicularis
  misc_feature (1)...(727): n = A,T,C or G
tgcagtgcatcggctagtgnnnctcaagccaggcctgcatgcttcgactgccctgttcttgctggtcctgggccactctcccctcctacccgggctgacgccccaccctgggccactagggcccctcctcctcccccctgtcctggacgcctgccttgcctgctcccgtcaagtggcttttggactgaattgtttgggaaggggaccaggactctactgcatttcgtatcaagtgcggtagagttcatctggttgcttccggaagcgtagagtgccgctcctgcaggcaggctgagcatcacgcacaggaggctgcagttctcacgctcctagaggacccgtggctgtgggaggcgtgcgtgtaatgatgcttatgggggatgagggcatcattggaagcatctcgnnnnnnnnnnnnnnnnnnnnnnnnnnnnnnnnnnntgggggcgggggcgggggtgggggtgcctgcttaagctccctgacttcccagaatccaaacagctgatcagactcctgccccggggttgacacggatgccgaaagatgttggctctttctgtgggagacagccgacagccgcattccctgcctcctaggttgcttgtctgcaggtaagaaggaggccaaagagaaacagatccaaaaatgggggtggaagagtgacctgatgacagtgttagaccacctagatgtagccgtgcctgacctccaccccatcttcctg

SEQ ID NO: 630 - DNA, 362 bp, Macaca Fascicularis
ggcctcccagggtgctgggattgcaggcgtgagcctctgcacctcgtccagtaccatgttttaacagcccagttttaacaatgttcaattcacgggcaattttgtaaacccacccaactaatcatccttgcatattgggttattttgaagatactttcagatatcatttttcattcataattattttatcacgaaaatctaaagcgtaatgactttctggaaacataacagcaacgccattgccacactaaaattagagaataccttaatctggtcagtgtcagtttttatgatttcctcctatacaatttggttcacatatttctccaccctcttaaaaatgtctagctttctttatctct

SEQ ID NO: 631 - DNA, 691 bp, Macaca Fascicularis
  misc_feature (1)...(691): n = A,T,C or G
gctcgcgcacntgtggctgccgctgtttccgctcccgagagagccgaggtctagagagccggggtcaggcggtggcttcctctcctgcgcctctagactgcaagacacggctgctgcgcaaccnnnnnnnnnnnnnnnnnnnacagggtctacgagtaacccttgcgccaacaccnnnnnnnnnnnnnnnnnnnnnnnnnnnnnnnnnnncannnnnnnnnnnnnnnnnnnnnnnncccgcgttcgcgccgggggacccgcgggnnnnnnnnnnnnnnnnnnagctggaggagggactgcacccaccaccaggtgtgaggcccctcccctacccccgacttgctttcttgctcattggagagactccagagacttttgaccggtggttaaggagaggaactgggactctgtcactaactnnnnnnnnnnnnnnnncagctggggagtggcctcccccgggaactttctttactctgactttgacctccatccctcggaagcccgtggcttttcaacgcgaggaagcagaggcagcttagactacaaatgaggagtggtcaaaattgttttttttttttatggtgccttttctttcttgctgtcttgctctttctttccttctattaaattatgtgatattattttttatttttttagnnnngttatttaaatgtttttaagagctcacctt

SEQ ID NO: 632 - DNA, 704 bp, Macaca Fascicularis
  misc_feature (1)...(704): n = A,T,C or G
ggataagtacaggtggtgcatatgtagatccaggaaagataaatgacattataacatttcaacaacaaaaggaaatttaccgggcctcaaaatgcacaagggggtgatgggacacnnnnnnnnnnnnnnnnnnnnnnnngtgtgctgccctgtgtgaacactgccctgtgtgaacaccgccctgtgtgaacaccgccctgtgtgaacaccgccctgtgtgaacaccgccctgtgtgaacaccgccctgtgtgaacaccgccctgtgtgaacactgccctgtgtgaacactgccctgtgnnnnnnnnnnnnnnnnnnnnnnngtgaggtggctgagccagagaaccaggccctgacttctgtggctttactgannnnnnnnnnnnnnnnncctcatcaccaaggagggtgtccnnnnnnnnnnnnnnnttctgcccttaacccacctcctttacacacgccatccccctgtccccagcacccaaggctgcctaagggattccttctgtggaaccaacatgctgacagttactctgtgtttcctagnnnnnnnnnnnnnnnnnnnnnnnnnnnnntcatctgannnnnnnnnnnnnnnntacatggtaaggtcttctttatgtttctaagatggaaatgttgttgctcttggttcttttttatttgatttgaattgagatataaaaatcttatcatgtacattata

SEQ ID NO: 633 - DNA, 759 bp, Macaca Fascicularis
  misc_feature (1)...(759): n = A,T,C or G
cagcagagagcacnnncatgcaggtagtgacacttcttaatgacctgtatannngctttgatgccataattgacannnnnnnnnnnnnnnaggtggagannnnnnnnnnnnnnnnnnnnnnnnnnnnnnnnnnnnnnnnnnnnnnnnnnnnnnnnnnnnnnnnnnnnnntgctcgtatggccctagcattactagatgcagtttcttcctttcgcatccgccaccgaccccatgaccagctgagnnnnnnnnnnnnnnnccatactgggccagtctnnnnnnnnnnnnnnnnnnnnnnnnnnnnnnnnnnnnnnnnnnnnnnnnnnnnnnnnnnnnnnnnnnnnnnnnnnnnnnnnnatggtcaagcgctgaagatccatgtctcctctaccaccaaggatgccctagatgagcnnnnnnnnnnnnnnnnnnnnntacggggggatgtggaaatgaagggaaaannnnnnnnnnnnnnnnnnnnnnncttaggagagcggaaaggacctcctggactcctgtaaacccccattcttcccaagtcagnnnnnnnnnnnnnnnnnntacctgggnnnnnnnnnnnnnnnnnnnnnnnnnnnnnnnnnnnnnnnnnnnnnnnnntgtaatggaaaacagccacaaaaaacctaccttatatggaagttgtagccctctgcagctcagccctgtacatatacctgtccctctctggcttggtccccttcctccctactttctgtaaatatctgtatctaacca

SEQ ID NO: 634 - DNA, 742 bp, Macaca Fascicularis
  misc_feature (1)...(742): n = A,T,C or G
ttcaaagagctgaagaaaacaaatgatggcaacatcttcntttcccctgtgggnnncttgactgccattggcatgctcctcctggggacccgaggaaccaccgcttcccagttggaggaggttgggcgcagtcggggggtttccgtgttttccatgcacaaattcattctgggggttnnnnnnnnnnnnnnnnnnnnnttaaaaatatgttcatggtggaccaggaaacaaagactttcnnnnnnnnnnnnnnnnnnaggtctatcaggaaagccctcttccctttccaaataccgtctccccacctgctcccagaaacttgaattgttttgagtagggactggttgagtgacctcgtctaaagccattgcactcataattaagacagagcatgaaaannnnnnnnnnnnnnnnngacataatgcccacaagggtaaaaatgacacatccaagatgaacacaggaacacataagctaatacgagctccttagaaaaaaccagaggtatnnnnnnnnnnnnnnnnnnnnnnnnnnnnnnnnnnnnnnnnnnnnnnnnnnnnnnnnnnnnnnnnnnnnnnnnnnnnnnnnnnnnnnnnnnnnnnnnnnnnnnnnnnnnnnnttagctgggtgtggtggcaggtgcttataatctcagctgctcgggaggctgaggcagaagaatcactggaacccaggggacagaggtttcagtgagccaagatcnnnnnnnnnnnnnnnnnng

SEQ ID NO: 635 - DNA, 710 bp, Macaca Fascicularis
  misc_feature (1)...(710): n = A,T,C or G
gcagggacatgagccatcaagtcccgaaagacaaactacaggcctgggacttacttaattgctgagtttgccactatagctcaaaggaggaatttaaacatggagatgcacctcttcccccatggggtggggcagtgagagcggaagaccaaatgcaccttctgtgcagctggtctacgtgttgggccagccccagtctcctgtcatattgactgtcttcaaatattttggtcgggcgtgnnnnnnnnnnnnnnnnnnnnnnnnnnnnnnnnnnnnnnnnnnnnnnnnnnnnnnnnnnnnnnnnnnnnnnnnnnnnnnnnnnnnnnnnnnnnnnnnnnnnnnnnnnnnnnnnnnnnnnnnnnnnnnnnnnnnnnnnnnnnnnnnnnnnnnnnnnnnnnnnnnnnnnnnnnnnnnnnnnnnnnnnnnnnnnnnnnnnnnnnnnnnnnnnnnnnnnnnnnnnnnnnnnnnnnnnnnnnnnnnnnnnnnnnnnnnnnnnnnnnnnnnnnnncaaaaaaaaaaaaaaaaatttttaagttaattgatattaaatattaaacatttattaagtgaatacattcaaatctgtaaacaatacagataggatgtagaagagttaaaaaaaaaaatcccttttttgccaaaccaccacctgtaagcactgacaagcctgctgatgcacgcattatccctgggccaatagaaacacacgt

SEQ ID NO: 636 - DNA, 677 bp, Macaca Fascicularis
  misc_feature (1)...(677): n = A,T,C or G
agaacatccacgtgtgnnngggtnnnnngntcgtnnnnnnnnnnnnnnnnnnnnnnnnnnnnnnnnnnnnggcccaggccaacagctggtccctggaggagcnnnnnnnnnnnnnnnacgtcaccacctcccagggcgccaccctggacgcctgcagctttggagtcacgggtgagtggagtctcacaggaaataccggctcttctctgcaggtgacctcggtggcctgagaccactgttcccagatacacgcacttagggtgacccgctggtgctcgggtggagccgctgtgtttggcagcctctgggagccctgtgacggggtttgtgtggctgtcgtggtcacctcagcctgggttttggcttccgcctcacaggtttgaannnnnnnnnnnnnnnnnnnnnnnnnnnnnnnnnnnnnnnntccagcgccatctccaccgccctccccctgannnnnnnnnnnnnnnnnnagcagaccaacgccgagaagaaggccagtgtnnnnnnnnnnnnnnnnnnnnnnnnnnnnnnnnnnnnnnncctgattttcaccgnnnnnnnnnnnnnnnnnnnnnnnnnnnnnnnnnnnnnnnnnnacgagcggggtgtcgcggtcttgtgcacagagtagaactaaacttttctagctgcccctttctgtaatagtgaaagtt

SEQ ID NO: 637 - DNA, 731 bp, Macaca Fascicularis
  misc_feature (1)...(731): n = A,T,C or G
tggcccaggcccgatgnnncnggtgctgttccnntgcagtcccagccccccgcgtggctcgcgcgtctnnnnnnnnnnnnnnnnnnnnnnnnngggtccccgcacttcctctcgctcctcgctgctcccnnnnnnnnnnnnnnnnnnnnnnnnnnnnnnnnnnnnnnnnnnnnnnnnnnnnnnttccctgctggtgggcggaccccaaggagacnnnnnnnnnnnnnnnnnnnnnntgcctctgcccccgcgcccgacgcccacctcccatttgaaggtggccgaccaggggtgttcttgctggattgacaacacctggagccccgactccctgcttgccactcatggctctgtccaccagggctcagcccggctnnnnnnnnnnnnnnnnnnnnnnnnnnnnnnnnnnnnnnnnnnnnnnnnnnnnnnnnnnnnnnnnnnnnnnnnnnnnnnnnnnnnnnncatggaactgcgagacccaggaccctcctgctctgcaggcctctgagccaccagcagccaggactggagccaccagcagccgggactggagccaccagcagccgggactggagccaccagcagccaggactggaggctgtggggcatggcgtgacttctcgtgcacagggctggtttggttnnnnnnnnnnnnnnnnnnnnnnncccctgcctgtggaaaaccacagggacaaagggagccgccatctcgacccccaaacaggccagcc

SEQ ID NO: 638 - DNA, 2167 bp, Macaca Fascicularis
ctcccctcctgctttcacaaccagagatggccatatgcatatcacagagcccctccccttcctcagtgcccctgttgacaccatcctgtctcccattccctcctcatcgcctacagggatttaatctttctttgattcactggctataggctgatgcggttctccttcctctctgactttttcctttgcgttcccctccccgccagcaccagtatagccaatctttgactccctcctatcttcttttctagttcagataaatgactcacttttgtggctcctctcatctttagacccagattcacctttctagcctcatgtcctacctgagccccaccttcctgtggtaccctccttcaggatgtcttgtaatcccaaactcttttgtgggcaaaatgggctttttcatcttccagtgaaattggctcccctctcgtaacttctgccaggtcctctcatcccacgactgtgtaggcccagcacctaccaggcctgattcttccttgcttgcccatcctgcttatgccatctgaggactgcagactctctgttgaagaatctctttggtcttggcctgttctctgctcattgccaccagccttatccaagtcttaatcacctgtcctttgaaagtactgtttttgcctccttgctggtttctgcctcagatctcttcctgcttcaagacatatttttagatcttcacttcgttctggagtcctacacttgctctaccaggttttgttccaggttcaggagattcagaggcaaaggacacggtcagccccagcccttcaagactccagggatcttgtatgtgactttctacccagcctctcttcagtcatttccactgctctgggcacaaactctctgaagcctaggttgggccagtaaccatctcatataaatatcataagcactcccatccctctgtcctttaggatcctagcctttaatttctctgtgagtccttcctttcttgaggacctcagattatgctcttttcatcagtgtccacggccctttgttggaacctcacagttggaagttgaaatagaatgctgggctcctgggtttggtcatgtggtacttttttgcttactctccagcatgagtgagtaatctgtccacttgtaccattctggacacatggactcagtaaaattcaactccagttggggtggagtaagggtggtttattggatgcctgtgtgcctgagactgggcaacaacaccttttcacccctgtaagggccttagcagcccagcttcagtatctccagagcatgtgccttgccatgcaagcgcctctctctctgtggctctctgccagggctgatacacctttgggtggttttcaggtgcaggtgatcccctgggtattagccgacagtaactttgtccggagcccatctcagaggcttgaccccagcaggacggtgtttgttggtgctctgcatggaatgctaaatgctgaggccctggcagccatcttgaacgacctatttggtggagtggtgtatgctgggattgacacagataagcacaagtatcccattggatctggtcgtgtgactttcaataaccaacggagttacctgaaagcagtcagcgctgcttttgtggagatcaaaaccaccaagttcacaaagaaggttcagattgacccctacctagaagattctctgtgtcatatctgcagttctcagcctggtcctttcttctgtcgagatcaggtctgcttcaaatacttctgccggagctgctggcactggcggcacagcatggagggcctgcgccaccacagccccctgatgcggaaccagaagaaccgagattccagctagaggagctggccttgcccagtggcctgtggcgcctgaagctggcaggtcaggcaagcagcctgcaccaccctgccattggcgaccagggagctggcttcccgaggacaagggaaaattgtagtcacctttgcacttgctgaatctgtctttgtttctgcactaattaatgcacattgagttttgtcgggttttgttttcagggggtatgccaggggcaaggactctctggcttaccctccaagcgactctgtagttttcccagattttagttcctcattttgcagatgaaaagcggggaaaaaaaaaaaaaaaaaaaa

SEQ ID NO: 639 - DNA, 656 bp, Macaca Fascicularis
ggaaaggattgggtttagcactgttaacttttaatacccatttattggctacttaaggcaaattataaaacctaaaattagtatcagtattttagatcctattattttttcaactttctattattttcacagtggaacatttgtgtatagtattaaactattcatttttctgtctgtgcctttatattttgaagtgtggttgtacttatgttagcattaagtgtatttatagaaagtttttcataaagaagaggattaactttccatataaatgaataccaggtatgaaattactgattttagtgcaatatctatatgattatccagaactatcacttcagatgtttctattttgggcaccataactatttgaactcatatttttataattctgattgagaatttaggggcatggtaatttttatcgaaactgaagctgataattttaagtaaagcaactaaatttacacttattagttaaaaggaaaccaaggcatgtaggaaaatgtcggcaccttggaaaatgtgaaaagagctttactttcaaaatgtatgtttaatgagttgaattttggggactgtttcccataatttgggccaatgctatcctgttgatttttatgtctagcttaaaaagtatttgaaaatgttccatt

SEQ ID NO: 640 - DNA, 781 bp, Macaca Fascicularis
  misc_feature (1)...(781): n = A,T,C or G
cagaaaggttggtatcatcagatagcgtcttatacgagtaatgtgctgctatttgaagtgtaattgagaaggaaaatgttagcgtgctcacnnnnnnnnnnnnnnnnnnnnnnnnnnnnnnnnnnnnnnntctctagtnnnnnnnnnnnnnnnnnnnnnnnnnnnnnnnntcagaacagcagattcagctctgacattctgattcgaatgacactgttcaggaatcggaatcctgtcgattagactggacagctnnnnnnnnnnnnnnnnnnnnnnnnnnnnnnnnnnnnnnnnnnnnttatattgtaaatattgtgtgcgtgtgtgtgtgtgtgtgtatatatatatatgtacagttatctaagttaatttaaagttgtttgtgcctttttatttttgtttttaatgctttgatatttcaatgttagcctcaatttctgaacaccataggtagaatgtaaagnnttgtctgatcattcaaagcgtgaaatggatacttatatggaaattctgctcagatagaatgacagtccgtcaaaacagattgtttgcaaaagcgaggcattagtgaccttggaaggctgatttctaggtaggaaatgtggtagcctcacttttaatgcccaaatggcctttattaaaaccgcagcggctctatatagctgatcacttttctacaacgtagaaagcaatctgttnntactatgatatgactgttttccggacagtttatttgttgagagtgtgaccaaaagttacatgtttgcacctttctagtgaa

SEQ ID NO: 641 - DNA, 687 bp, Macaca Fascicularis
  misc_feature (1)...(687): n = A,T,C or G
gaaatgaggtgcatcccaggaagnnnnngtagannnctgaaggctccacgagaaactaatggatcactggtcagcccccatggggagcatcatctcttcaaccctaaagatgtcaaaggcgtgcagcttccaaacggcatccccaggatcactgcgcaacgctggaaagagcaaaagaatatcattggccccgaccacatagatgctgcgcagcctagcaaatgcttggtggtttgacttctccctctgtctcgggggaggcccagcatctgcccactggtctcactaagagcttcagatttccctctgtaggacaggttaccggagccgtggggcacttgtgggtactcattctctgccagtgggaatggaaaggcttcatcctttgtatgcaaccatttggtaaaagtatgcaggaccataaaattggcaatatcctttagctcagaaattctaccttcctaagtcaccacaaaagaaaaaactcaaaatgcagaaaatgtgtggtgcactaagatgatcacgcagcattgtttaaaactaaaaaaaaaacaaaaaacaaaaaactaacatccaaacaacaaggaaatgattaacaaaattgtagtacattaactcaataacatataatgtggccattaaaatatttaagagcggtttagtatgtcttgagaaaangtgtaagct

SEQ ID NO: 642 - DNA, 713 bp, Macaca Fascicularis
  misc_feature (1)...(713): n = A,T,C or G
taatatcattagagtaactcatttnnnnnncaatatannncatctcctaggagaagaggatcgagtatatgtttttattctttttcattaggacattggggtatttaattattgtgaaatgtattgaatatttcatttctttggtttgtgagtctgaccttcactccatagcactgatttttatttggacctccttttacctgatacataggagttatgagtagccgttagtatggatacatttttcccatttatagtatactgtcttttccgaaagtgtctggcttactaaaacttctctgtatttgttccatcctgcgtttacagctgaatacaaataggtaactatatcttctaaacaagcatcaagttggtggaaaaaaggcatataaatagctctttctcacctgactatcaacagtaaattaaacattcttaactgcagcttccttttgtaaaatttataaccatttatcttttgagtatgacatactagatatatgataattgtatattttgtgtattagtatgaacatgatttttaacagacttcttaccaatgaactattataacagatggtccccaaattaattgccagctaacaatttctcnnnctttatgatggtgcaannngtggtatgttgctatagtttggatatttgtcccatccaaatctcatgttgaagtttgatctcagagttggagatggggc

SEQ ID NO: 643 - DNA, 2311 bp, Macaca Fascicularis
gtatgtgctgcctgtggggacgctggctggtgctctcaaaggaggactctaagggaggcctgctgaagcctgccaccaccaccaggctttctgtaatcggatctgcataggggccccaaccaacacactgaacagtctatactcttgctgagaaagacccatgagggactgaaaattctttttctacgtgacactgagaagacagtcacatggtttgggtggctttctagaagatgaccatagaggaccttccagattttccattagaaggaaatcctttgtttggaagatacccatttatattttctgcttctgataccccagttatcttttccatttctgcagcaccaatgccttcagactgtgaatagggtgacttcctgagaagtttcagcaaaggttgctcagcataattggagagttctacacagaaggaggagagctcagattcaaaagagacttactctagaactccatggccgggtgagagagcagccagtgccacggccgtgggtaccagcacctagttactcactggctttggggctttgcaggggtcttcttctgatcctgcttcggacaccaaaaactgtcaagaaaatccagggtgcttttcttaatataaatattaagtgagtaaaaaaactgcaaacagggagactttccaaaccaagaattttctttctttgatcctaatgatgcatcatgccaggaaattctttttgatcccaaaacttcagtttcagaattatttgccattttaagacaatggattcctcaggtccaacaaaacattgacattattggaaatgagattcttaagagaggttgcaatgtgaatgatagagacggactgacagatatgactcttttacattatacctgcaaatctggagctcatggtattggtgatgtggaaacagctgtaaaatttgcaactcagcttattgacctgggagcagacattagtttgcggagtcgctggacaaacatgaatgctttgcattatgctgcttattttgatgtcccagaacttataagagtgattttgaaaacatcgaaaccaaaagatgtggatgccacttgcagcgattttaattttggaacagctttgcatattgcagcatacaacttgtgtgcaggtgctgtgaagtgcctcttggagcagggagcaaatcctgcatttaggaatgacaaaggacggatccctgctgatgttgttccagacccagtagatatgccgttagagatggctgacgccgcagccactgctaaggaaatcaagcagatgctcctagatgcggtgcctctgtcatgtaacatctcaaaggccatgctcccaaattatgatcatgtcactggcaaggcaatgcttacgtcacttggcctgaagttgggagatcgtgtcgttattgcaggacagaaggttggtacattaagattttgtggaacaactgaatttgcaagtgggcagtgggccggcattgaactggatgaaccagaaggaaaaaataatggaagtgttggcaaagtccaatactttaaatgtgcccccaagtatggtatttttgcacctctttcaaagataagtaaagcaaaagatcgaaggaagaatatagcacacactccttctacaaaagctgctgtgcctctcatcaggtcccagaaaattgacatagctcatgtaacgtccaaagtaaatactggattaatgacatctacagcaaataatagccgttgtgagggggagctccgcctcggagagagagtgctagtggtaggacagagactgggcaccattaggttctttgggacaacgaacttcgctccaggatattggtatggtatagagcttgaaaaaccccatggcaagaatgatggttcagttggaggtgtgcagtattttagttgttctccaagatatggaatatttgctcccccatccagggtgcaaagagtaacagattccctggataccctttcagaaatttcttcaaataaacagaatcattcttatcctggttttaggagaagtttcagcacgacttctgcttcttcccaaaaggagattaacagaagaaatgcttttgccaagtaagtattaagaagatttagaaaaacgcctttcaagatgaacatgatgggattctgtgaagaaagaaaagtggagtgctgtatcttttgcatcgcttggtagagttttaacacgtaggagaaaaggtgtgatgagtgtattgagaagagttcttcctccctcctttgcaagcgcaattaaaaatgtcatcagtgactaaaaaaaaaaaaaaaaaaa

SEQ ID NO: 644 - DNA, 650 bp, Macaca Fascicularis
  misc_feature (1)...(650): n = A,T,C or G
catcannnnnnnnnnnnnnnnnnnnnnnnnnnnnnnnnnnnnnnnnnnnnnnnnnnnnnnnnnnnnnnnnnnnnnnnnnnnnnnnnnnnnnnnnnnnnnnnnnnnnnnnnnnnnnnnnnnnnnnnnnnnnnnnnnaggtggtnnnnnnnnnnnnnnnnnnnnnnnnnnnnnnnnnnnnnnnnnnnnntcatcnnnnnnnnnnnnnnnnnnnnnnnnnnnnnctacaacacctggattttccttggtgtggtcctgggctctgcnnnnnnnnnnnnnntagcttacccacttctcagcannnnnnnnnnnnngnnnnnnnnnnnnnnnnncctgacctcttctgtctttgagggacagggaccaagctagatcttttttctnnnnnnnnnnnnnnnnnnnnnnnnnnnnntcnnnnnnnnnnnngatcatgttgacaaactttatttttcccattgannnnnnnnnnnnnnattttnnnnnnncatacaaaaaannnnnnnnnnnnnnnnnnnnnnnnnnnnnnnnnnnnnnnnnnnnnnnnnnnnnnnnnnnnnnnnnnnnnnnnnnnnnnnnnnnnnnnnnnnnnnnnnnnnnnnnnnnnnnnnnnnnnnnnnnnnnnnnnnnnnnnnnnnnnnnnnnnnactgagctc

SEQ ID NO: 645 - DNA, 718 bp, Macaca Fascicularis
  misc_feature (1)...(718): n = A,T,C or G
gatgaggtttcaccatgttggccaggttggtttcaaactcttgacctcaggtnnnnnnnnnnnnnnnnnnnnnnnnnnnnnnnngattacagatgtgagccactnnnnnnnnnnnnnnnntgtatttttttaaatgcttgaccaagtgtctataataggcaagtagtacctttggttctttcattgcaatttgattcagtnnnnnnnnnnnnnnnnnnnnnnnnnnnnnnnncttatggaagtagtnnnnnnnnnnnnnnnnnnnnnnnnnnnnnnnnnnnnnnnnnnnnnnnnnnnnnncaacctgcctgtgacgtgcattttactctttgcagagtatgagctacagtccagtttnnnnnnnnnnngataagtggtctcttagcagaccaaaaaaatacaggataaatacttaaccttttttttttgaaaacttaaatttatgtgtaaaatatttatttgaaggactttaatatgtaaaaataattgtcttgctatgccagccgctacggattttattttaatgtgaattatttttttcatttttaccagtagtgaaaaagtagaaaagcaagtatgatatttttgtaagataatttatttggggattcatgttccctgttagacaatcatgaccttttctccttgtctttttatgtataagtaagtagaatttcacttgtttagggattaagaagatgttctagaatgtacatac

SEQ ID NO: 646 - DNA, 643 bp, Macaca Fascicularis
atatacagacggcagttaaacccgtgaaaaggtgttcaacatcattaatcattagggaaatacaagttaaaaccacaatgaggcatcactgcacacctgtcagagtttaaaatcggacaccatcaaatgccagccagtatgtagagaaactccatctctggtgccttgctgacgggggagtgccagggtgcagccactctgaagccagctccagggtttcttaaaaactgcactgcagctcccatatgaccagcagtcgcattcctgggtgttgattgcagtgaaataaaaccgaggttcggaaaaaaaccgacagaggactcttcctagcagcttttgcgtaatggccaagaactggaaagaattctgatgtccttcggtggtgaatggttaaacaacactaatgcctccgtcacacagaatattactcaggctaagaaggaattaaccgtggataaacataacttgaatagatctccaggagtttagtggagcgaagagcccagtccctaaaggttgtgtgctgcgtgatcccatttgtatgacgtcattaaaaggttgaagttacggaaagcctgtggatggccgccgtgagttaacggagacgcacaggaggaatcatggctgtgaatggacaacctga

SEQ ID NO: 647 - DNA, 1752 bp, Macaca Fascicularis
ttcgtatctcatatatccagcacaagaagataacttggtcatgagtgaagggaatcacagatatttctcttaaagaaaaatccagccttattcagtttgactttaacaaggaagtcactcttttttttctttttggtttgtggccccttgatagaaaaaaaaaaagctatttatcatccttgctaagggggactaattctgtactgtctctaggttgattcttctgtggtatgtacctgctcagattatcacacaatgcaaattggaagtactgagaactctactagaaggaatgcatcttgaactaaaatttcagaaaaaaacacaattctgtaaaaaaaaatctcaaatggtgttttagaagaaagaccctgtaaagtagacagggaaaaaatggaatctcttcaggttagtctggtttttgtttatatagaagagagattaaacatataaatgaaggcatgaggcaccatcctcatcttttcccattttcaggaacaggtttggctctgcccttcccatctcaacttttatctaagtcacgtgctaggcaattagtagatcttttcaaataaaaaatgtttatttgcctttctaatttaccattgtaacactagaactcagagaaagctttttaacttttatagtaaacaataaaaaagcctcataaagcttctcacaacagcttcattcgtttcagaagttaagatatattccttatgaataccaacgttgtgacatttgtgttgccaattattttctctggaatcattcttttaacttcacttcctgttgtttgggaatactttgcagagaacatatttttaataggctataatcacacaggcaacagagatcttggcaagtagctattaacggtatagacagaaacttggagtgtgatggttttagacttcctgtgcttcgtgatgctattttaatgtgctaagagtataaactaaatttagatcctgctgactgttgctggagcgagtgcatgtctcttgcagacaatgctagatttagtttctgtgtatttttgtcaagctgggactgcagtttgaagctcccagcccttgtaagcatttttatagctatacatgtgtatttcatgactgctttgatttgcaactggtcacttaagtttcgttgttcttaaagcagttactgatacttgtggtgttttccttgtgctcattgcattttattttaataaatcctggggttatactaaaagttaatttctgacattaaacccatgttattccctgagtatttctctattccacagtttttcaacctcagcaccatttggcatgtttagcagcatccttggcctctactcattagataccagtaaacgcttctctccacctcaatggtgacaacaaaaatgtctccgacattaccaattgacccctgagggacaaaatcccccccagtggaggagcactttccactctaatctgtccacttctctccaactccttcactactgcaacggtccaggctactgtcatctctcagcagaggatggcaacagctccctgtggggttgttctgtctgtccccccgctgctctccaggtcattctctatattgtagccagaatgttcttttcaaagcccaaatctcctcatgttactgcctttaaaaatactgtcggccgggcgcggtggctcatgcctggaatcccagcactttgggaggccaaggcgagcaaatcacgaggtcaagagttcaagactagcc

SEQ ID NO: 648 - DNA, 680 bp, Macaca Fascicularis
ctcccatcagtgtggatattatctaagagcaaagaagaacttcataaaattatattataatgttcctgctgaattattttgttaaattaaacatcaaatgctgccagaaatctaactataaattcagagctttgcatattaaatatttacactcttacctacggttcttaagtatacatcagggatgattttaattagactggctttttctaaacacactcattacacacaacttgaattgcttcaatactattcaatgtccaactttcattctcacttgtcactttttaatctgatttcatgatgaaagaccagttctggcaaactctcctttaaattaaaagcaaatgcattatgatttgcttatatgaagtttaaagcaaaacaaatctaattttatcagaatagtgcctaccctaagggttgaggattgatcagaaagagataagcggaaattatctgggaagagagaattgttttatatcataataaaaatgtgtcttactccggtgtactcatttgtcaaaattgtaaagctaatatgtatgcatttcaaagtatattttatatatagtgatagatacaggtatatagtgagaaatgagagatataggtgaaaaaagaaagacaaaaataatgatagccattgcagttgtataatgtaggacatgaggattctt

SEQ ID NO: 649 - DNA, 758 bp, Macaca Fascicularis
  misc_feature (1)...(758): n = A,T,C or G
gatacatcagcagagagaatagaggctgccannnnnagactcaaacaaatcatttcccatttttaccctcagaaattggctcttcccgtccannnnnnnnnnnnnnnnnnnnnnnnnnnnnnnnnnnnnnnnnncagaaataataataattaaataaataaatagttatcttgatcctgatcttcacaacctgccttgcctaaaaatttaannnnnnnnnnnnnnnnnnnnnnnnnnnnnnccagcactagctgagaagggtttcacatttttttgnnnnnnnnnnnnnnnnncaaaaacaagactttagaacaagtcttacttggtggttgcacagttcattaaaatattttaggttgagctccactggtagctgatttctaaaataatagaacattttaaaaatatagtatagcaactatttacatagcattttcattaaattaggtatgatcagtaaccttgagatgatttaaaagtatataggaggnnnnnnnnnnnnnnnnnnnnnnnnnnnnnnattttatataagggacttgtgcatgctgaggtgtcctggaaccagtccccaacagataccgaggaacgactatatacagtcagttcacattacttgccgttagttgggtcctataatgttaccacaaacactgaattaatgagtannnnnnnnnnnnnnnnnnnnnnnatggggggttaaattcctgtgagcctgtactcataatattttcatcaatccatatatcatttgcattgta

SEQ ID NO: 650 - DNA, 2432 bp, Macaca Fascicularis
attgctaattactgatttagggaacatcaaaagaagattatatttatcaacggtccataaggaactatcctccacccctcttcatgcaaaaattccactcttcatgatcaaacgtaaaatttggtgcaatctatgcattgacttggtggcattcaccagtgaaatattcaagggggcagttttccagtcattggatggaattgttgtctcagctaactgtaagctacggaagatcttcaccttaaaatcaaagcctcaagacactgctgataaagatgctgtctgtggtgtccccttttcaacagatgagcctacagatattataccacgaagctgtcaactaatgacagatgttccacatgtcacacagctgctaaacatgactaaacttcgacaaactgaaataaaatttggaggccatcctctaagatcagcagaatcagatcagttcattaacagaggaacaggtagtacacggaacagtaagaatcaagatgtttgtcatatcgcctttggatccaaagttcttgggccacctccactctctggcagaaggagtaacatgaggatatccagtgagacagtgagatccgttgggtccaaaaataaccgatcatgccagccgtccactgtagagaagcatgttaatggtacagaaatgtcagccttgctgatacctgagtctgaggagcaaggaaataaagaaaatattcaccacataaagcagactgtacctattcatgcagccaatctacctattatgcatccacatccccctcaagaaccatcagcagataagaataataacagaagaagattacggttaaaaagtaccagcagagaaaggacagagacacccagcggcaactcttcaggaaataacacgaatgaagttaaagcagcaactgtcctcaccactgtgtcccaacaagaagcagggctgttgaactccagcacgctaggaccccagtctcctgatcaatcagatgagtggatctttcctgaaaatgctgatcacgtttcatatctggcatccagcagacagtctctacttctggatgatgactcctgccacccgtcacacctgtggctggaagccagcaaggagagtgaacatgaccagcaggcagaagaatcccagagtgttccaaaggacattttcactttttcatcaagaccacgatcagcacctcatggaaagactcagactatgtccccagaggaggtctcatttattttggatctaaaagaggataacagtgtgacaagcagagacacccaatcagaggatgacttttacggcggcgacagcagtgaagagggtgaccacagtatccagggttctcgaggcccaacaactggtccttcggagttaactcagttaacatcagagagcctgctgggggaggctgcaaagcggacaagtaaggaatatctaaagagcgcctacacagaagcaggagcaacagaaagccaggattcctcggcagagcaaatagatagaaacaactttcaaatgagttcgttgcctacaacatgcttttctccaactggaagaaggtgtggatcctgtcagaaaactccagaccctgtaatcaaagcgaaggacctaccagcccagcaagtgccagcttcactaaacaaaacctccctgaaagaaatctcaggggaaaggctgagctcgatccccgaagcatctgaatatgactggcgaaactatcagccgagccagatgagtgaatccgagttacagatgctggcgagcctacggcggcaacaaaatgaagaactggaggatgctgggacttcccatggcctgagtgcctcccaggtggacaactgtaatgtcagcataagtaccagcagtgacgacacaaccacctggaactcctgcctgccaccccctgtcaaccagggtcaccactatcagaaagaaatgaacccaccttctccttctaacccccgggactggttaaatatgttgagcccaccaattgttcctcccagtcaacagccggctgagcagcgtccagattcctctgaaagtctgagtgttcaaggtgaagaagacctcagtgtggaagaggacgaggaagtactgactttgttgtatgacccttgtctggactgttactttgacccccaaactgggaaatactatgagttggtataatgcctccttccagggcagggaacaggcactcccagctggagcaggatagcagttcagggtccctcaaagagtcaccacaacctgtgtgttgggtgacacagaatcaacagtaactgagagaaacgaattcattttataaataatattcgatgttaagaatcctacattccttttgtagatgagtatgattttgaaactgaagaaattaatacagaggcaagattttaggaaaaaaaaaaaaaaaaaaaaaaaaaaaaaa

SEQ ID NO: 651 - DNA, 703 bp, Macaca Fascicularis
  misc_feature (1)...(703): n = A,T,C or G
ccagtttctcaccccaaccccccctgcccccgccgtgggtnttatatttgcaatttaactttggggtttgggtaagacatttaatgtatataattttgattagtactggccatgtttcaaatggcaagggaacatgggaactgtcatgtggcaatgtagtgagtgttaaactttgtgtttgtccaaatcctgatttattttccagttcatatctttctgggcttgacatggctgatggtgtagctgaaacgctcctaacactaaaagccatttaatcttttctctaataggagcagaaaatagttaatcaccacctagtaatataaaattactctgaatattatcttctatacattaaaacagttctataccatacaagttttatttttaatttcgagttattttcagtgcttacttaaatgtaattctagaattcctccacaacttttaatattttgtatgccagtgattctcaagataaatcatggttgtagtagttgttactgttggcagtttgtcgtaatattcaggtatttggggatgggggaaaacaccaaaaatcagtgtcttttatctggtgatcactttggtgtctacagtattctagtctcctgcacaaaaactgaacccactgggcctatgcatccctcacattttttttctagtataaaagcaatacatatgtgttgtagaacaattaaaa

SEQ ID NO: 652 - DNA, 2742 bp, Macaca Fascicularis
atcttttatttcccctaatctgctctgcctgtgtccacccacgctctccccacctggcaaaattgttcaaaattgctgtggagtttacctcagtttcctctttcagcctgtggtgtgtggtccatcctcttgctgagcacattgaaaggaactggctatctttgatctctacctccagatcagagtcaaggaatgtgtttataatggacacttcatccaaagaaaatatccagttattctgcaaaacttcagtgcaacctgttggaaggccttcttttaaaacagaatatccctcctcagaggaaaagcaaccatgctgtggtgaactaaaggtgttcttgggtgccttgtcttttgtttactttgccaaagcattggcagaaggctatctgaagagcaccatcactcagatagagagaaggtttgatatcccttcttcactggtgggagttattgatggtagttttgaaatcgggaatctcttagttataacatttgttagctactttggagccaaacttcacaggccaaaaataattggagcagggtgtctaataatgggagttggaacattgctcattgcaatgcctcagttcttcatggagcagtacaaatatgaaatatattctccttcctccaattctactctcagcatctctccatgtctcctagagtcaagcagtcaattaccagtttcagtgatggaaaaatcaaaatccaaaataagtcttcttgcagctgtgcctttctggtatttaccaaagagtttaccaagatcccaaagtagagaggattctaattcttcctctgagaaatccaagtttattagagatgatcacacagactaccaaacaccccagggagaaaatgtaaaaataatggaaatggcaagagattttcttccatcactgaagtatcttttcggaaatccagtatacttcctctatttatgtacaagcactgttcagttcaattctctgttcggcatggtgacgtacaaaccaaagtacattgagcagcagtatggacagtcatcctccagggccaactttgtgatcgggctcatcaacattccagcagtggcccttggaatattctctggggggatagctatgaaaaaattcagaatcagtgtgtgtggagctgcaaaactctacttgggatcatctgtctttggttacctcctattcctttccctgtttgcactgggctgtgaaaattctgatgtggcaggactaactgtctcctaccaaggaaccaaacctgtctcttatcatgaacgagctctcttttcagattgcaacccaagatgcaaatgttcagagacaaaatgggaacccatgtgtggtgaaaatggaatcacatatgtatcagcttgtcctgctggttgtcaaacctccaacaggagtggaaaaaatattatattttacaactgcacatgtgtgggaattgcagcttctaaatccggaaattcctcaggcatagtgggaagatgtcagaaagacaatggatgtccccaaatgtttctgtatttccttgtaatttcagtcatcacatcctatactttatccctaggtggcatacctggatacatattacttctgaggtgtattaagccacagcttaagtcttttgccttgggtatctacacattatcaataagagttcttgcaggaatcccagctccagtatattttggagttttgattgatacttcatgcctcaaatggggatttaaaagatgtggaagtagaggatcatgcagattatatgattcaaatgtcttcagacatatatatctgggactaactgtgatactgggcacagtgtcaattttcctaagcattgcagtacttttcattttaaagaaaaattatgtttcaaaacacagaaattttataacgaagagagaaagaacaatggtgtctacaagattccaaaaggaaaattgcactacaagtgatcatctgctacaacccaaatactggccaggcaaggaaactcaactttagaaacatgataactggaagtcatgtgttctaattggtggacaatttgcaaacaaataaattgtaatcaaaagagctctaaatttgtaatttctttctcctttcaaaaaatgtctactttgtttttggccctaggcattagataatataactgataacaaatatactgaaacatataatggaagatgcagatgataaaactaattttgaactttttaatttatatgaattttttatatcatttacttatttcactttattttgcctcgtgcttattgatatatattagctgtacttctagaagaacaattgtctctattgtcacacatggttatattcaaagtaatttctgaactgtgtcatgtgtctagagtaagaaaatactgctaaaaattaactcatactttgggctccttcaagtattacttctatagtattttctcccatagctgtcttcatctgtgtattttaataatgaacttaggatggagcagaacatggagaggaagatttcattttaagcatctccttttctttgaaatacagtaatttatatagaagtgtatagcagcaaattatattgggattagaatttggaattaatagctctcctactattcatttacatgtgctttttgtgtggcgctataagtgactacggttgtaaagtaataaaattgatgttaacatgcaaaaaaaaaaaaaaaaaaaaaaaaaaaaaaaaaaaaaaaaa

SEQ ID NO: 653 - DNA, 703 bp, Macaca Fascicularis
aagttttgtgattaaaacttgcataattaaagaaaaattctgtcaagaatggccaaagtggtgccactgtggtgatagggtaaatgttgtttgtaatttaccttccagtttttaaattatgagattcttgatgagtatttaatgaggagtcccattatttaaaatgtgtgcatatggtgagactttattattaacaataatttttatattgtactatcagatttgtataaaatatcctacttgttttgagtttctgtaagtgccacaaccaaacatcatcagggcctgaaaatacattagggagactaaagggagatttcatagtgttgaggaagaaaggttgggttgagaatgacaacatgtaagttttaatcttggatgccatttgggctgttgtagaccactgaatgtctggttatgccttcctttaaaatttttcaggctaaaattttatgaatcagaatgttgggggcttgatggtgattcccctggtctccaggtggaggtgggatagccttctttgcgttcaggcatccagcattactagatccttctactctaagaagaggatgtcaactattcttgtagcctgtgagtgcccatgagtctgtatttgatgagcacaggataattgcattccaggaatcttccaggggctgtaatgtccgattcttttcattaaaaaaaattattaaaagtttgg

SEQ ID NO: 654 - DNA, 746 bp, Macaca Fascicularis
  misc_feature (1)...(746): n = A,T,C or G
tcctnnnntncagtgtgtcgagtcaaaatgtgtttatgtgagctgtcactgtggggaaccaattgctttgtcatgtagctggttatgaactagtaacatgtttgggaagtcctactgatgttcctttggaagaaaaattctgctggttttaacaactgtgcttttgctatgcatggtatccaagttagttgaatcgcagaccctgagatctgtttgagtttagggtcatttttagaaaggggcagtttaaagcacaatgtctcacatgggacaaagttccaaaatgccaaattcttatttttaaaaaaactagttctagaaaatactggtggggaagaaatagaattgagtcaattggaaagactatccaacttaacatgaaacttgtcaccatgagatagcattaactgcccaggatgctgctaatatatatatatatatatgaatatatatatatatatattttaaaaaaaaagcaaaacaaaaaaaaactcatttatacctgtgtattttttaaagctacaatcagttcaatgtttttacaaatctgtttatatgacattgttaaaataaagttggtcttttgacgagagggaggatgtcacggtcagttgtaattttgccttcacaaggcaactggggtggggggtgggggtagtgtgcctccttgacatttcgttcaagttatagattcagtggagctatgtcctgttttaagttgctttaatgcattgtattagatctca

SEQ ID NO: 655 - DNA, 767 bp, Macaca Fascicularis
  misc_feature (1)...(767): n = A,T,C or G
gtggtgccatcttggctcaccatgacctccgcctcccaggttcaagcaattctcttgcctcagcctcctgagtagctgggactacagtcacacgccactatacccagctaattttttttnnnnnnnnnnnnnnnnnnnnnnnnnnnnnnnnnnnnnnnnnnnnnnnnnnnnnnnnnnnnnnnnnnnnnnnnnnnnnnnnnnnnnnnnnnnnnnnnnnnnnnnnnnnnnnnnnnnnnnnnnnnnnnnnnnggcaatagttgacttcttaacacagccctttgggtgcaacataaccttatggatgtaagttcagcctaatataatggttctttaacagtggaaaccatttttaaaattaaattttgtgtggagccccaatctacaaataagataaaagtggaattactttggttgaactttaatggttcaagttatgtgtagagcccaggaccgctggtatctggcagtgccctttctctttacattaacctctaagatactcctatggtatcctggggctctgtggaacctagtttgaattttgaaacccactggtgcagtattttggaatctgtgaaccttttttaacatgtagaaaacaccacacaactcttctgttagcaagatgcatatagagactctgataattaattttggtttcctgatattggctgcctctgagaaaatagagaagaggtctacatgtcaagagactcttttttgtattctaattgttttaagggaagcaatgctatagcacatgtgtg

SEQ ID NO: 656 - DNA, 356 bp, Macaca Fascicularis
attgtaaactccgaattccatatgtaataggatgcaagtctaagcgtttcatgtggacataaatgtatctaaataaaactttccctagcactgtggctgacctcacccttacttttatactttagtatgaaactgatgagaactttggtagtgagtattttttttatatatatacatatatatgtatctatctatatatatatctcaagcatctttcaggtctttgtgtgtggctttcttaaagccctgttgtaaaaaattactatgtggatggcagtctctcacatcacagatgtggaaagtataattttatatttgtattttcaaataaataagtttgtgaaaggtttccatcc

SEQ ID NO: 657 - DNA, 626 bp, Macaca Fascicularis
  misc_feature (1)...(626): n = A,T,C or G
acacctgtgggcacnnnnnngagaaatgggagcacagtgntnngaaatgggagcacagtagtgagaaatgggagcacagtcctaggaaatgggagcacattattgggcaatgggagcacaaagaattgggaaatgggagcatagtactgggaaatgggagcccataatactgggaaatgagagcacagtactgctaaatgggagcacatggtattgggaaataggaacacagtactaggaaacgggagcacagagtactgggaaatgggagcacacattgggaaatgggagcacagtactgggaaatnnnnnnnnnnnnnnnnnnnnnnnnnnnnnnnngtactgggaaatgggagcacagtattgggaaatgggagcacagtactgggaaatgggagcatagtactgggaaatgggagcacagtactgggatatggagtgcagcactgagaaatgggagcacagtactgggaaaccccagacctggattnnnnnnnnnnnnnnntagcccagacttcttatcttagtagacaacaagagtcaagagaagaccagannnnnnnaagcatcctctgtattttaatgaactctgcaatttagtctgcagtcatatttaaaagataatc

SEQ ID NO: 658 - DNA, 3003 bp, Macaca Fascicularis
cggtgcgtgggacgcgcggactgaggtgaccggcggcttttcttagttttagtgaagacgggcgcatgtgggcgctttgctcgctgctgcggtccgcgactggacgcaccatgtcgcagggacgcaccatatcgcagggatccgcccgccgccagcggccgcccaaggacccgctgcggcacctgcgcacgcgagagaagcgcggcccgtcggggtcttccggcggcgcgaacaccgtgtacctgcaggtggtggcagtgggcagccgggacgcgggcgccgcgctctacgtcttctccgagttcaaccgatacctcttcaactgtggagaaggcgttcagagactcatgcaggagcacaagttgaaagttgctcgcctggacaacatattcctgactcgaatgcactggtctaatgttggtggcttaagtggaatgattcttactttaaaggaaaccgggcttcccaagtgtgtactttctggacccccgcaactggaaaaatacctcgaagcaatcaaaatattttctggtccattgaaaggaatagaactggctgtgcggccccactctgcccccgaatacaaggatgaaaccatgacagtttaccagatccccatacacagtgaacagaggagtggaaagcaccaaccatggcagagtccagaaaggcctctcggcaggctcagtccagagcgatcttcagactccgagtcaaatgagagtgagccgcaccttccccgtggtgttagccagagaagaggggtaagggacccttccctggtcgtagctttcatctgtaagcttcacttaaagagaggaagcttcctggtgctcaaagcaaaggagctgggccttccagttgggacagctgccattgctcccatcattgctgctgtcaaggacgggaaaagcatcactcatgaaggaagagagattttggctgaagagctgtgtactcctccagatcctggtgctgcttttgtggtggtagaatgtccagatgaaggcttcattcaacccatctgtgagaatgccacctttcagaggtaccaaggaaaggcagatgcccccgtggccttggtggttcacatggccccagaatctgtgcttgcggacagcaggtaccagcagtggatggagaggtttgggcctgacacccagcacttggtcctgaatgagaactgtgcctcagttcacaaccttcgcagctacaagattcaaacccagctcaacctcatccacccagacatcttccccctgctcaccagtttcccccgtaagaaggagggccccaccctcagcgtgcccgtggttcagggtgaatgcctcctcaagtaccagctccgtcccaggagggagtggcagagggatgccattattacttgcaatcctgaggaattcatagacgaggcgctgcagcttcccaacttccaggagagcatgcaggagtacaggaggagtgcacaggatggcccagccccagcagagaaaagaagtcagtacccagaaatcgtcttccttggaacagggtctgccgtcccgatgaagactcgaaatgtcagtgccacacttgtcaacataagccccgacacgtctctgctactggactgtggtgagggcacgtttgggcagctgtaccgtcattatggagaccaggtggaccgggtcctgggcagcctggctgccgtgtttgtgtcccacctgcacgcagatcaccacacgggcttgctaaatatcttgctgcagagagaacgagccttggcgtctttgggaaagccatttcaccctttgctggttgttgcccccacccagctcaaagcctggctccagcagtaccacaaccagtgccaggaggtcctgcaccacgtcagtatgattcctgccaaataccttcaggtaggggctgagatctccagtcctgcagtggaaagattgatcagttcgctgttgagaacatgtgatttggaagagtttcagacctgtctggtgcggcactgcaggcatgcgtttggctgtgcgctggtgcacacctctggctggaaagtggtctattccggggacaccatgccctgtgaggctctggtccagatggggaaagatgccaccctcctgatacatgaagccaccctggaagatggtttggaagaggaagcagtggaaaagacacacagcacaacgtcccaagccatccgtgtggggatgcggatgaacgcggagttcatcatgctgaaccacttcagccagcgctacgccaaggtccccctctttagccccgacttcaacgagaaagtgggaattgcctttgaccacatgaaggtctcctttggagactttccaacagtgcccaagctgattcccccactgaaagccctgtttgctggcgacattgaggagatggaggagcgcagggagaagcgggagctgcggcaggtgcgggcggccctcctgtccagggctctgacagacgacctggaggatggggagccccagcagaaacgggcccacacagaggagccacagagcaagaaggtcagagcccagtgaagatctgggagtgaccctgaactctgacggctgtgtgtcttctgccccacgcacgcacccgtatctgccctccttgctggtagaagctgaagagcacggtccacgcaggaggcagctcaggataggtggtgtggagttgtgccgaggcttggactcccagataagcactagtttatagacgcctcttaggactggtgcctgcacagccgtggaacaggaggctgctacacggaagcaagcaaatgaactaatttcacttcaaggcagtatttaaagaagtcatggaaacagacggcagcacctttcctctcatccagcaaagtgattccctgcacgccagagacaagcagaggagtcgcaggaacactgggtctaagtgaccgagactcaacgaaaatagtatttcagctgcaataaagattgagtttggaaaaaaaaaaaaaaaaaaaaaaaaaaa

SEQ ID NO: 659 - DNA, 1412 bp, Macaca Fascicularis
  misc_feature (1)...(1412): n = A,T,C or G
agcagcaagagcataaaccccatgacaaatgcgcagtcatgcccagccggctacttcncnnngagactctttgaaaacctcaaggtatgtgtttctcaggactatgagttgggaagcaggtttgcggtcccctttggtgggttctttagctgcgcagttgggaaccccctggtagatcctgctatatccagagatttagaggcaccttccctgaaaaagtgccctgggggcttcagccagcacctagccctcattagcgacggatgccaagtgtcctactgcgtcaaatccgggctttttacaggagggtccctgccccctgccaggctcccacctttcacccggccacccctcatgagtcaggctgccaccaatactgtcatagtgaccaattctgagaatgcgagatcctggattaaagactcccagacccaccagtggaggctgggagagccggtagagctgcggagggccatgaatgtcatccatggggatggtggtggtctgtcaggaggggctgcagctggggtcacagtgggggtcaccaccattctggctcttgctatcaccctggccatctacggcacccggaagttcaagaagaaagcatatcaggaaattggggaaaggcagagtttggttccaggcactgcagcaactggagacacacctcacgaagagcaggggcagagtccagcttaaatctctccccgaaaatggtttctctcatctccagtgtggtcactgctgaccactctgttttccnnnnnnnnnnnnnnnnnnnnnnnnnnnnaagtaggtatatttgtgacttcttgtttaagtctctgggacagaaaattcacactgttacatggataagggtgggattggggagagggaacagttgggagtagannnnnnnnnnnnnnnnnnnnnnnnnnnnnnnnnnnnnnccgtttcccagtgtgtgtccctgtcttcacctaaatgcatttgtgtaaaaatagaggagggagaatgctaacatttggatttggaagccatgaatttactctgaagtttgcagttgtttccaatttgtgagctctaagagtttctgcctgtaacaactaccctccctttattttgattttttaaaagctgtcnnnnnnnnnnnnnnnnnnnnnnnnnnnnnnnnnnnnnnnnnnnnnnnnnnnnnttggttactgctttttaactgtgagggctctatgttgacagannnnnnnnnnnnnnnnnnnacctcaaacatctgaaaagaaagatgttgcctgtgccgattccactttttccagctgccccttgatgaacactcccttacaccagaccactcttggacttctgacttgtgtcatcaagtcctcagaaaatattttaacttgtaaactattagtgggtcaaagaggaaggga

SEQ ID NO: 660 - DNA, 706 bp, Macaca Fascicularis
  misc_feature (1)...(706): n = A,T,C or G
agcttcacactctccatntaaggtgtttattttntaagactcaataaaggagtgttcgtaatcacctcatcaaatctggtcccccattctcacctcctgtattttgggccaggaaactgaggagtcactgcctccacctcctcccctggcgtggttccctttaatttcccctgggttcctggaagaagtccctgcctccagaccctgtcatccaacagccaccagacccattggagaagggtgtgtggctcctgtgctgccagcctgcccagtggcccctctgcttttagcctggcctgataacctaatgcccacttgggagggggatagaatgacttgagggcagccggtgcttaagccttcccccttcttctgcaaacagccactttgtccaggggctgttagcctcgaaggggtggggaaaagccctgacctcctgggccagtcccagccttctacgcctctggctacaggccgagcctgtgcagtcacatgaggtctccactgaactctggctgctgagccttgcgggaagatgtgagcatggagctgcctggggtctgtgtggaaagcaaacctaagaatctttgaagccaaagcaaagcaaacaggaattagaggtcaaggggttgaagaccacctttaagatctgatctggtcacacctgaagtcattaaaatcactgaaatgtttagatacacagccc

SEQ ID NO: 661 - DNA, 210 bp, Macaca Fascicularis
aatgatttttcattacaacacaaactcattagtcattatctgctcagcagtttagggaacaatttggcaattttgtggtttttcgagattatcgttttcttaaagtgccagtattttaaaatgagcgttcattgtaattttacacgcttttgtgatggagtgctgttttgttatacaattttgacttgcgattctttccatttgcatttg

SEQ ID NO: 662 - DNA, 646 bp, Macaca Fascicularis
catgccagtgggcctcaggctggctggagggaggctgggtccctttgagggagaatagcattgatgtgggcttggttctcaggccgtctaaggagtccagcagtagggacccctcaaccctgatagcagccaaccctgagtccaggtttaggctatgaacaccaaggacctcttttacacctattctccctttgtcttaagaactgcatattttgacacattaagtcttaaaatcaggctcattaagggattgttgattttctcttttaaaaaaagcaaactcaagctggacatagtggcctatgcctgtaatcccagccctttggaggctgaggtgggaggattgtttgagcccaggagttcaagactgggcaacctagggaaacccctgtctctacagataattttaaaattagctgggtgtggtggtgcacacctgtagtcccagctattcaggaggctgaggcaggatgattgcctgagcccaggaggtcaaggcggcagtcagccatgatcatgccactgcacttcaacctgggcaacagagcaagaccttgtttcaaaaaaaatcaaactcactgggttcagtggctctcgtctgtcatgccagcactttgagaggctgaggcaggaggatcacttgagg

SEQ ID NO: 663 - DNA, 730 bp, Macaca Fascicularis
  misc_feature (1)...(730): n = A,T,C or G
tgtgtttgcaggcttgcagtatgagaaagtggaacccagcagtccctacagctggtccccagaaagcaggacagaaagaaggagggacaggcaggcagcaggaggggccagccaggaggcaggaggcagtggtctgccagtctgcagaatggtcacactggaggttcaaactaactggcctctagccacattctcatagcaggtaggacttcagccttccagacactgcctttagaatctggaacagaaaacttcagactcaccatccccagctactgctgacaattcccaactcttaaatttgtcgagtgatttttagcctgtgaaaactctatgctggccactgattcctttgagtctcacaacagcctacttaggtcaccagggcaggagttctcacccccattttacagatgagaacactgaggcctggacaggtgaagtgaccagagagcaaaaggcaaaggggtgggggannnnnnnnnnnnnnnnnnnnnnnnnnnnnnnnnnnnnnnnnnnnnnnnnnnnnnnnnnnnnnnnnnnnnnnnnnnnnnnnnnnnnnnnnnnnnnnnnnnnnnnnnnnnnnnnnnnnnnnnnnnnnnnnnnnnnnnnnnnnnnnnnnnnnnnnnnnnnnnnnnnnnnnnnnnnnnnnnnnnnnnnnnnnnnnnnnnnnnnnnnnnnnnaagtcgaggctgtagtgagccctgattacaccacgtactccagcctg

SEQ ID NO: 664 - DNA, 719 bp, Macaca Fascicularis
  misc_feature (1)...(719): n = A,T,C or G
gtttgaggtaggaatataacttaacnnttnctnnnnnnnnnnnnnnnnnnnnnnnnnnnngaaatatgtatcttcaaagaaaccgttatgcatgcttatttgactggtagaaattcttgggattgatgcatcactgtgttacacagggtggaatctacatcagctnnnnnnnnnnnnctgttgctcccttaggggagcccagcagtgttactgatgtcttacacagcacatgtctctgtnnnnnnnnnnnnnnngaggctgcagattctccaacaaaatccaatgctgtatttagaactttgtttcaagtacatataatatcttaaaaagcaaatttttttaaaagggccaattcacagtattgttttatagtatttgaagtatttgtaagttgtttttatatctacnnnnnnnnnnnnnnnnnnnataaaaattgttaataatagctattattatttagnnnnnnnnnnnnnnnnnnnnnnnnnnnnnnnnnnnnnnnnnnnnnnnnnnnnnnnnnnnnnnnnnnnnnnnnnnnnnnnnnnnnnnnnnnnnnnnnnnnnnnnnnnnnnnnnnnnnnnnnnnnnnnnnnnnnnnnnnnnnnnnnnnnnnnnnnnnnnnnnnnnnnnnnnnnnnnnnnnnnnnnnnnnnnnnnnnnnnnnnnnnnnnnnnnnnnnnnnnnnnnnnnnngtggaggttgcagaagtgagattgcacttagc

SEQ ID NO: 665 - DNA, 724 bp, Macaca Fascicularis
  misc_feature (1)...(724): n = A,T,C or G
cagccagtccaagctgaacatggaagatgataaaagaatgtccnnncccnnncaggnnnnnnnnnnnnnnnnnnnnnnnnnnnnnnnnnnnnnnnnnnnnnnnnngaaggagttctccatttcccggagaannnnnnnnnnnnnnnnnnnnnnnnnnnnnnnnnnnnnnnnnnnnnnnnnnnnnnnnnnngccctgccctcctaccccaagnnnnnnnnnnnnnnnnnnnnnnnnnnnnnnctgctcctgcagcgctgctcctccacagcctcctgagtgtctgtcctcgggagcacagcctcgcggacagcgccaaaccctgtgggtnnnnnnnnnnnngggaattgtgttctttcccaagagaatcgaaggaaagaatcaaacttctcgcccggccactggcactccagaagacagtgtgccagaaccagcagctctcaccgtgccgtgattcgttcggaattaacnnnnnnnnnnnnnnnnnnnnnnnnnnnnnnnnnnnnnnnnnnnnnnnnnnnnnnntttgctactatcatttttcacttttnnnnnnnnnnnnnnnnnnnnnnnnnnnnnnnnnnnnnntagtgagtactttccctctcccacctcccttnnnnnnnnnnnnnnnntgtacagcgtttgacacacatggggtctgtctgtgccttctctgcttcagtcaagaaatctgccatttcatgcccttgtgactacctatcg

SEQ ID NO: 666 - DNA, 767 bp, Macaca Fascicularis
  misc_feature (1)...(767): n = A,T,C or G
ctgggccacgtgagcttcatcacggccgcnnnnnnnnnnnnnnnnnnnnnnnnnnnnnnnnnnnnnnnnnnnnnnnnnnnnnnnnnnnnnnnnnnnnnnnnnnnnnnnnnnnnngtcacttgtgcnnnnnnnnnnnnnnnnnnnnnnnnnnnnnnnnnnnnnnnnnnnnnnnnnnnnnnnnnnnnnnnnnnnnnnnnnnnnnnnnnnnnntcgagcgtggcctgtgctctcctctctctgacctgtgcccttggcctcttggcctccatcgccgtgacctttgccacccannnnnnnnnnnnnnnnnnnnnnnnnnnnnnngggagctctgaactactggccctcgcacctgactgtccctttgaccccacacgcatttatagctccagcctgtgcctctggggcattgccctagtgctctgcgtggtggagaatgnnnnnnnnnnnnnnnnnnnnnnnnnnnnnnnnnnnnnnnnnnnnnnnnnnnnnnnnnnnnggaaaagcagcnnnnnnnnnnnnnnngagaacccagagctggtggagggccgtgnnnnnnnnnnnnnnnnnnnnnnnnnnnnnnnnaccctctgagagatgatgtcctgcccaggccccacggccactaggaccnnnnnnncaactctgctctgtgaccaggccaggattcctggagctggcctgagagggctcaatggaccctcggggaccnnnnnnnnnnnnnnnnnnccttcccccaccatccagcccactgcactgaaatgagactt

SEQ ID NO: 667 - DNA, 661 bp, Macaca Fascicularis
agtcaagtgaacacaatagcttaacttttactggattagaaagagagacagaactcaggattggacttgtttgctcaaatcacagaattgtggagttggaaggagacccagggtcacctgaggcccagccactgagcttacagatggggaaactgaggcctggagaggttggatgagttgccccaagccacctggtttgtggaaacagccgggcccatcatcctgaccctcggagtgtctctctggagccttgcctgctgcctgagctgttcggtgacttgtgagtgtgagtggacgcgtgtgaaggtgtgtgcatgacataaacaggtctctcttaatcagccacaggaaggagtgaagccctgagtctatagcatggaagaatctagaaaacatgaggctgcctcaaggaagccaggtgcaggaggccacatgtgatcccctttctgtgagatgttcaggacgggcaaatcggtagcgatagagggtggatccgtggatgccagggactgtggggagggcgacgggactgggaatgggtatggggcttctttttcgggtaatgaaatttctttggagttagtggtgatggttttataactctgtgaatatactaaaaaccactgaattgtacactttaaaagggtgaattgtatgatat

SEQ ID NO: 668 - DNA, 763 bp, Macaca Fascicularis
  misc_feature (1)...(763): n = A,T,C or G
cacagagatggagttttccantnntgcttatatgaaatatgactgaaaataagcaaagatacctnnttaaccaaatacactagaacatannnnnnnnnnnnnnagcataattggagttattttcttgaggtttgcatgtgctaagaacacttacggttcccctttggggttacctttgaagccatgcaaggcaaaaagcctcgcaactttatagtcagaccttgtgttttatccaacccctcctcctgcccaccaaggtaatcctgagcttcatcacccattttatttagcagacttattttctaatgctctttagctgttaaaaaaaaaatcattcctcaaaaaatagannnnnnnnnnnnnnnnaaagatttaccaacactgaagacccttacaagttgacagtttctaaagagggttctagaaatgttctgtgtaaggtcagcnnnnnnnnnnnnnnnatacgtcttcccaaggtgactacttnnnnnnnnnnnnnnnnnnnnnnnnnnnnnnnnttactgtacttattctgccagaaatgtaaaatgtgtataaagttaagctattgcattttttcgtaatacatttaaatagaaattggcttttaaagtattgtagttaaaaccagatctcaccaagtaatagttgtacaattgacnnnnnnnnnnnnnnnnnnnnnggagatgtcacactacacagttgtagtttaaatgcagtccaacataaggtgcatgccnnctgaactgtaaccctagtaatg

SEQ ID NO: 669 - DNA, 2952 bp, Macaca Fascicularis
atcgctcttcagcaccagtgttctggacagcgccccaagcaggcagctgatcgcacgccccttcctctcaatctccgccagcgctgctactgcccctctagtcccccctgctgcagagaaagaatattacactgggatccatgcagccagcaatgatgatgttttccagtaaatactgggcaaggagagggttttccctggattcagcagtgcccgaagagcatcagctactcggcaacttaacactaaataaagctaactctggcaaaaatgacgacaaaggcaacaagggaagcagcaaaaatgaaactgctaccgaaagtggcaagacagcagttgttttctccttgaaaaatgaagtcggtggattggtgaaagcactgaggctctttcaggaaaaacgcgtccacatggttcatattgaatccaggaaatctcggcgaaggagctctgaggttgaaatctttgtggactgtgagtgtgggaaaacagaattcaatgagctcattcagttgctgaaatttcaaaccactattgtgacgctgaatcctccagagaatatttggacagaggaagaagagctagaggatgtgccctggttccctcggaagatctctgagttagacaaatgctctcacagagttctcatgtatggttctgagcttgatgccgaccacccaggatttaaggacaatgtctatcgacagagaagaaaaattagagaaaaaaaaatgacaaaataacttttagcaatttaaaatatttacttgagcaatttccaaagatgttcttttagtaagaaattacatataattttaaactaattcatactcttatatggagcccacgaagggtcagaaatctttgaactaaatatattcaggaagaacatagaaagagctaaaagacacatcagggagagatcaaactaaaatgaaaacccagatgtttgagtgttggttgtcttaactattgaggatcttttatctctgaagcattctcagaacaactgaattttgagaaataatttggtggatagaatgtgagagtcacaaaatataaacgctattctgggtgaagggaatagtgccttgaaaaactggtggtagagaaatgaggaacaagctaaaccaaatttaaaagatctagattgatcaagcagtcataaattttgatagtttcatagatccataaatatatagcttcttatgtcttgctttgctaactttagatgaccctgaataaattacttataaattagaatccagaatcataatccagaatagcatatccacaaattttcagaactggttgctgaattttctcagagaagaaaattgcctaagaaatgctcagtgtctgcctttggtgttattttcataatttggtatcgctttagacacaagtcctagagtcctgtcatatatatattcattaagaaacccctacaagtagccatgaagcttccccctctagtcgcatgagattagagcttcttaattaaatatacttgagagaaaattatgtttaattgtaaacaaattccctcaacaaaaatagcatttgaggtgtcttctgcttggcttgtagtggaatccagttttctaatatgtgcaaaatctatcttgtttcaaaaatagaagagttacaaagtaaatgggctttcccacagagcttatataggtatcatacaaggaagtggaattacttgattctttttagatttgttctccatttggaatagcagtaaccgtggttttccccctgtgaaacaatggaatcacggttttcatttgttgtgagcatttaacatgcaaatgccattacagctaatggtgggaaaaatcctataaaatttaatagccgtcataggaaaagtgttggcagaaaaattccctgtaaggaaatagtgtaacaaaataatcacagccagcttcttgtcatatttgatacctgctcagtgtaaccatttatctcaattacgcttcataacctaaagctaaattaaatagatccaagggcaattataaatttaaagacacttgctcactgtcatctcacggtgagttgttactttattatggctttgctgctgacttctgtaatcagctaatcagaaatcaacacaaaattcctggcaggaccagggtgcttatgcgtcacactttgcaaaagatggccaaaatctgattagtccagttttattcttgaagcattttagtctattatgagttagaataaggcatacggtatattcttgaatgttcattttatttggcataataaaagcataatagactatttataaattataccttttaagagtgggaaaatttgacctgaaatttcttcctctttttttttccacattagtggtgaaagttgtgagactcgggtttctgacttagtctcatttatttactgtgtaatttacaaacgatgctttatgggcatgatatatctgtgcttgtcttgcttgcttatagtaaatgggcctgagcctaatgattgtgaagtattgcaacatttaccaacatgaaaagtctgcaatgagaaacagtgtgttttaacgtgaaatcgaatagaaatacagagtttcattttcaaatggagtcatggctcgcatcacctcattttcttcattcgagaaggaaaacattaacacaagatgtagttgtcctccaattcatttgatctaattttcagcttctaaagaatcaagccctgatgtttattctcacaaacttgcattacttacaatgaagaagaaagcagtccagagttttctggtgtgtctgagtttttttttttctttttggaaaatgattcttatgcaaattgtcatgttctggggagagtcaagggaattaacaatgggagactgcttcttgtaatattagatttgcaaatgtttgaaataaaaccagttctagaacaaaaaaaaaaaaaaaa

SEQ ID NO: 670 - DNA, 691 bp, Macaca Fascicularis
  misc_feature (1)...(691): n = A,T,C or G
ttcatnnnnnnnnnnnnnnnnnnnnnncattgttcnnnnntcnnnnnntggnnnnnnnnggcgatcgaggcgcgccctgcgtgtgctgggagctgccggatgtagggtgaggggagggtgggggcgcccccnnnnnnnnnnacctgcattcacccacccagatgtctgcctgagctgcttaaggagcagtcagattccatcccccaggatgactcatccgaccccagctccccactccccatcctgttcccagggtccttgggtggagagggagagaaagattatgagaggcgtgatggcacaacacaggcannnnnnnnnnnnnnngaaagggagggtccatgggtccagggcttgggatcagcccccacactgcccccagcacccgtgtagccttaggtgattcagcaacgtctgtgggcctcagggagttgtttgtgaaataagaaacaatagannnnnnnnnnnnnnnaatcctgggcgtggaagcttcatatatggggtttgaatcctggctctcccatttgctggnnnnnnnnnnnnnnnnnntcttnnnnnnnnnnnnnnnnnnnnnnngtagaacaatgaaaacaacacaattggtccctgttatttgtggattnnnnnnnnnnnnnnnnnngtacttgctaaaatttatttgtaacccccaaatcaatacttgtggagctgt

SEQ ID NO: 671 - DNA, 523 bp, Macaca Fascicularis
attggagaagccaatgattatagcattttctttaatcttttatagaaaagatgcttattcagaatttaagaatgaaggcaagtgaaatccgcattgttgtagttatttatatttcaaactaaagaaaatgagaaaaatcaggtaaaattgatgaaaaggatgttgtgtttctctttccatcatctggtttttaccatttcactctcagtaggtatttgtagaacacatttatttgagggaagatgcacatttcacatttataaaggaacaaatggggaaagctgaaaacgaaaaatttttaatgtattaaatgccatccctgagcctaaatctagtatttgtagtttatttctaggtctgctagaagctgaaaacctgaatgaaaaaggtgtgctgacactaatgaaggcctgtgaggtttaaattactgacctatccactctacctccattgtacaaaaaatattttacaagcctgggcaagattcaacagcataatagttttgtatccacaggttacttcc

SEQ ID NO: 672 - DNA, 1520 bp, Macaca Fascicularis
atcaggagagttcattagctgtcagttgactgtgaataaggggaggccagggaagatcaggaaatgtaaatcaggaaggataggctgatgttgtcaacctattgtctctccctctccctcaacctattatccctccttcttaattcaacacccaccagtcatcaacagtaccccttgccttccatcaaaagctgagaatggactcagtgaaatgaacatagttgtgtggagcactgtcatgtttgtgaatgacctctagcaaaattcctaatatagttatttgatcactagtcatcactacaagtgttggcattacatggagaaagaagttcaaaagagtgcaaaaaaaaaaaaaaaaaaattccaatctcttctggaatccctagtaaccgttcctagactcctaataacatctgcagaaactcacactagactataagctcctgaagagtgagaactacatcttctttgttttggtatcctaagtacttagtacagtgcctggaataaaattgatgcccaataaatatttgttaaatggaaccgaattcctctatgctttgaatttctgctcatgccttgaaaacctacttattaacaaatgatcatagaatgatggtcaaaaagacaaagaaaatataaaagggatggagggaagaaagtatatatgtacagtctagttgtggtattcaagatctaagaaggtgtccatccagttgttttagtgaaaggttaggacatctaattaaaatacccagtaaggagatacagatgttcctcaacttaggatggggttatatcccaataaacccatcatgagttgaacatatctgagtagaaaatacatttaatacatgtaacctactgaacatcatagcctagcctagtctaccttgaaggtgcttggaacacttacattaggttacagttgggcaaaactatctggcagcacagcacactggaaagtctcatttgttgccgctgcccagcatcataagagaatattgcatgcgtatcactagccagggagaagatcaaagtttaaatttgaagtacaggttttgctgaatgcttattgctttcacaccattgtaaagtagacaaattattcagtgtaatcattgtaagttgggagactgtattgctaatggcagcaaagagggctgctggctaggaatagggctgaaaatttttatattagaacaaaattgtaaaagtacttagctgaagctaggcatgtaatcccagcactttgggaggctgaggggggcagatcactgtaggtaaagacttcgagactagcctggccaacatggtgaaaccccgtctctactaaaaatgccaaaattggctgggcttggtggcatgggcctgtaatcccagctactggggaggccaaggcaggagaatcacttgaacccaggaggctgaggttgtagtcagcatcagccaagatcgcgccactgtactccagcaacacagcaaaactccacctaaaaaaaaaaaaaaaaaaaaaaaaa

SEQ ID NO: 673 - DNA, 707 bp, Macaca Fascicularis
  misc_feature (1)...(707): n = A,T,C or G
annnnnnnnnnnnnnnnnnnnnnnnnnnnnnnnnnnnnnnnnnnnnnnaatggagacagtgtgaccagtcctgagaaggtagccctggaggagggctcagatctggagctgctgtcctcgctgttgccacagttgactggccntgtgttggaactgcctgaggccacccgggcccccttggaggagctcatgatggagggggacctgctcgaggtgaccctggatgagaaccacagcatctggnnnnnnnnnnnnnnnnnnnnnnnnnnnnnnnnnnnnnnnnnnngcacacttctggagcaatgaatgagagttcctgttgctccacatcctcatcagcatttggtattgtcggtgtcctggattttggccatactaagaggaaaccaatcatcaggcctcccagagagaatcaaggatctgaaacctcccatatcaccacatctagacaatgagacacacctgctgcctgttgacaaactcctcttatacctcccgaatttctgttttcctgcatatggttacggtgagacaccagacccctcatccaaccacctgctgcctgttgaccaactcctcctcttccttacctctccctaattcttgttttacattccttgcctactataaaaacccctaactttagtcagttggagagatggatttgagactggtctccnnnnnnnnnnnnnnnnnnnnnnnnntaa

SEQ ID NO: 674 - DNA, 759 bp, Macaca Fascicularis
  misc_feature (1)...(759): n = A,T,C or G
gtagcttaaaaccacagctgggcagggtgagaggctagatgccnnngcagtttggccctggagccagggtagaggaatgtagggcctgcatggagaagggttctgccctgcctgaggaggaggacacagcnnnnnnnnnnnnnnnnnnnnnnnnnnaacatgannnnnnnnnnnnnnnnnnggggatcatgttaaaaatagcagtattatttttcttctcaatggtattgtaactaagttatttactcctcctgctcctcacccttgtagggaaaccttggagtagagccttggagaggagagtggcaggtgggctgcctgctgtgttaagagggcttnnnnnnnnnnnnnnnnnnnnnnnnnnnnntggggggcggggggtggggggaagagaagaaatagcagagcctattttggtgaggttgtttttnnnnnnnnnnnnnnnnnnnntttccctgaggaatgaaaaagcgattgaggagttgcctgcctcctgggtgggtggagtacaggcagttgggtgnnnnnnnnnnnnnnnnnnnnnnnnnnnnnnnnnnnnnnnnnnnnnnnnnccagggatggagatgggaaggttaaaaaggcagcccgcacctcaggacagaggccggggtccaggcccgtgggcgcaaaggtgcctcatagcatagccagcattcagcacacacaaacctactgcccacatttgggctcagggttnnnnnnntgctagttctgctgccctcttaagatctgacgcca

SEQ ID NO: 675 - DNA, 707 bp, Macaca Fascicularis
  misc_feature (1)...(707): n = A,T,C or G
tggannnnnnnnnnnnnntatatgnnnnnnnnnnnnnnnnnnnnnnnnnnnnnnnnnnnttaagcacagtgttagaggtgttgtatctatggctaataatggcccgaacaccaatggatctcagttcttcatcacctatggcnnnnnnnnnnnnnnnnnnnnnnnnnnnnnnnnatttgggaaggtaatagatggtctggaaactctagatgagttggannnnnnnnnnnnnnnnnnnnnnnnnnnnnnnnnnnnnnnnnnnnnnnnnnnnnnnnnnnnnnnnnnnnnnnnnnnnnnnnnnnnnnnnnnnnnnnnnnnnnnnnnnnnnnnnnnnnnnnnnnnnnnnnnnnnnnnacttattgtggtttacccggttttaattatgtacctcctgaatctaaaaattttttagagattcatctctaaatttttcagagattacatcatccttctgcttgtttacaactatgatcttctacgaaatgatgataccaaggggcacccaacagcttttatccccattcttagagcatagtctttattataacgactatccaacatatttctttaattttaatacaaaaaatacatcatttaatttttgttacatataaacannnnnnnnnnnnnnnnnagcctcaagtgcaggcatttttgagcggcctgattacgtagtcctaccacagcaagtccatatnnnnnnnnng

SEQ ID NO: 676 - DNA, 741 bp, Macaca Fascicularis
  misc_feature (1)...(741): n = A,T,C or G
catgggccgaggcacaccgggcagctggtctgagtgcgtttgggccacaggccaccctcacagggttaaatctttaacaagagcctcatgtttgttagaaagtgggaccccagcccaagcacctagcacctccccactgcagcccannnnnnnnnnnnnnnnntttagtggggatcgctcctgcctgagtcctggctgtggtggggactcgggaannnnnnnnnnnnnnnnccattctccttcctccctactaacagaactctagtgcctctgcacagctctgacagtgggcagatgagaaccatgtcctggcctccctcgcagcctggggtgtgcagctgtggcatggaggtggtggtgctaggacagacttgcagggaagctcctgtgaagggggctcagctgccacgtgcagggcccttcccctttgccttcttcctgcnnnnnnnnnnnnnnnnnnnnnnnnnnnnnnnnnngctgtcctgagagcatgaggnnnnnnnnnnnnnnnnnnnnnnnnnnnnnnnnngcacaacgcaggaaggaggaccctgtgcctttgctgacacagaatgcgggaaggacctgtgacnnnnnnnnnnnnnnnnnnnnnnnnnnncctgtgcctttgctgacacagaacgtgggaaggacctgggcctttgctaacacagaacgcgggaaggaccctnnnnnnnnnnnnnnnnnnnnnnnccggactacttaatttcagctttttaa

SEQ ID NO: 677 - DNA, 735 bp, Macaca Fascicularis
  misc_feature (1)...(735): n = A,T,C or G
cacctggcttccccgtcaagattgagattcccnntttccacgtgctcaacgcccgcatcaccttcagcaacctgtgtggctgtgannnnnnnnnnnnnnnnnnnnnnnnnnnngcccccagctctnnnnnnnnnnnnnnnnnnnnnnctttcccgtgcgaggtggaccccaccgtgtttgaggtgcccgaggggtacagtgnnnnnnnnnnnnnnnnnnnnnnnnnnnnnnnnnnnnnnnnnnnnnnnnnnnnnnnnnnnnnnnnnnnnnnnnnnnnnnnnnnnnnnnnnnnnnnnnnnnnnnnnnnnnnnnnnnnnnnnnnnnnnnnnnnnnnnnnnnnnnnnnnnnnccctcctccccaggccnnnnnnnnnnnnnnnnnnnnncagctggagcgggccctccaggaaagcctgcggctgtccacagagcccaggggcccaggatcccctcccaggacgcccccagcccccggcccacccagctttgaagagcaacttcgcctggccctggagttgtcttcacgggagcaggaggagcgagagcggcgcgggcagcaggaggaggaggacttacagcggatcctgcggctgtcactcaccgagcactgagccacagccccgggagggctggccaggccactccctgcccgcttttgtaatttatttatttataaactctctgctgctgggcttggggcctggagccccagggatggtcgggcaggggagacag

SEQ ID NO: 678 - DNA, 658 bp, Macaca Fascicularis
  misc_feature (1)...(658): n = A,T,C or G
annnntnnnnnnnnntacgaaagtgaagtaaaagcaatagaagaaatttctataggatctgggtttagagtgtatatgattaataaatataccttnnnnnnnnnnnnnnnnnnnnnnnnnnnnnnnnnnnnnnnnngttgggaaatgaagattgggttattttgccatatgtagctggaagtgacacttcaaagcaccctgcatcactagtaatagtgtattttgctattctccccttataatcggtgtccctgtaaaacagtccccacagattacaaatagatgtacttctctacataagggccaggtttattttctcctgagatttctagaaaagaaaaatgctgcttgcacatgttggttcttnnnnnnnnnnctagaagagtttcaggtcatgccaacatgtggataggctgtagctgttcagaggtctcccgggggagcttaaaccgggggaaacactggttttcacagatgcttcacatggctgtctttaaaagactcaaaacttgtcctctttgttatgcttggaaacccccccccccccccacagtgtgtcgagtctttgcaaagaaacctttagatgtggttcatagatatatgaatacgtatctgtgtaaaacagtgagtgtgcagtgtgtaaatactttaaattatt

SEQ ID NO: 679 - DNA, 667 bp, Macaca Fascicularis
cgtgccccaccgtgactggccatgcaaccgggtgatttttagaaatagacgtctctagactctgtcttctttcctacaaggcctcatacagatgcttgaggctaatggcccccattctgaggtcatttttgtgtagaactcctttccccaggagagaaccttatctctgccctcctttaccctgaaaccttcaaacagaagataggacctagatctaaacctagatactagcattttgtgggcttgtctagaatttggggaagatttgggttcctaagatgcacaggctttttacaccagtggtgattaactcaactaaaactcactgtaggaagttagcttccctagacagctaatgctaagatcttctaccagcatagagttgacagaagcaggccagcgaggagatgtgggacataatagcctgagtgcttgggttaccatggagactggagtgtgtgaggccatagcctatgctaaagagccatggagccctcccctggccatgtctggggacagatagaacctgtggggggaaatattccctcaccccagggttctttctgcagagcaggggttgtctttgtcctatccctgagcttgctcaacaagagaaacaaggtttcttaactgttttgtttaaagttttcattcttatttgactata

SEQ ID NO: 680 - DNA, 697 bp, Macaca Fascicularis
  misc_feature (1)...(697): n = A,T,C or G
aatatgttcatattttaattcacaatggaaaaatgtgttccgaaactggaaactcatagtactcgtgtaaactgtggaagattttaaatgtgatgttattttgacaatgttttaaatttttgagtcacattctgatcagaatttttatcgagatgttgagcttttgtttttgaaactagtttgtcataacattgtgcataatcacagtatttattttctaggacaattgtgaatgtgtagacttatgtttactgctaagggaacaattatttataaaataatattaaatccagtattagctgcctatttcagacacttaatacttnnnnnnnnnnnnnnnnnatttaccacactgaagttttttttgttgttttttgtttgtttgtttttaaagaatcaccctcattgttgaaagtaaatgtactcttagggtgcgaatattagtgttccaataagcatgtgattatattaaggtggtggtagcgggaagataatcttgattccattgggaatcttaggttttcgtaaatttattgggaaaatagtttttcctgtactgctgaagtttctttttggtaaacagtatctttctaaaagaaaaaagcatgaaggagaaattgaggtgtgtnnnnnnnnnnnnnnnnnnnnnnnnnnnnnnnnnnnnnnnntnnnnnnnnnnnnnnnnnnngtgggaagc

SEQ ID NO: 681 - DNA, 751 bp, Macaca Fascicularis
  misc_feature (1)...(751): n = A,T,C or G
atatggatggttnnnacccgaatgcagctagaacagaaagtgagggnctctaagcagatgaatacactccagtgtgctcgttacgtnnnnnnnnnnnnnnnnnnnnnnngcttctatagaggattaactgcctcttatgctggaatttccgaaactataatctgctttgctatttatgaaagtttaaagaagtatctgaaagaagctccattagcctcttctgcaaatgggactgagaaaaatcccacaagcttttatgcacaaattgctagctgctgctctatatagatggctgtaaaacccgcaatgcatatacaacacaaaagtcataaggacaaggctccgggaagagggcaccaagtacaagtcttttgtccagacggcgcgcctggtattccgggaagaaggctatctcgccttttatagaggactctttgcccagcttatccggcagatcccaaatactgccattgtgttgtctacttacgagttaattgtgtacctgttagaagaccgtactcagtaacatgccagaaaattgtgctctagaagaataaaactgaaaaactctagagaatttttcccccattgatgtttagaacgtttgagactgaaacaggaaaggccataaaatatctggctaatatcacctgttggacatttccttttggattcatgctttctggaaggtttaaattcattaacgttaatagttaattataacattttttttaacttaagaggattcagg

SEQ ID NO: 682 - DNA, 709 bp, Macaca Fascicularis
  misc_feature (1)...(709): n = A,T,C or G
tagattaaggcttgcatttccctcnnnnntnnnnnnnnnnnnnnnnnnnnnnnnnnnnnnnnnnnnnnnnnnnnnnnnnnnnnnnnnnnnnnntacccccagctcttctctaatcttgtaacttagtgctagaagtctctccaggctattaccatgggtgtttgttccctattggagctgtaagcagatgaacccaagtagagaagatagatcttggaaggagagatccactgaggccagcagacagttggggccagaagccagaccagcaaatggaggaaccttggannnnnnnnnnnnnnnnnnnnnnngttgcccaaggctgtnnnnnnnnnnnnnnnnnnnnnnnnatnnnnnnnnnnnnnnnnnnnnnnnnnnnnnnnnnnnnnnnnntctgtaggtgagaannnnnnnnnnnnnnngagcaacccttaagagaacttttggcagattttgttggcattattgaaatatatcnnnnnnnnnnnnnnnnnnnnntggttatgggaatgggatttaatgacatttgtaatttattacacttattggtttttattgattatagtattgtctgactttttattttctactatggttcctttagcagaaaagtaatttttgtgcatacattgaagtggttttctagctatgaattctttagggtagaagtttatttagcaaatgtgaattcttttgagaaagtatgaag

SEQ ID NO: 683 - DNA, 2820 bp, Macaca Fascicularis
acatcaatgcttgcaagcgatgatttgtgtaaaaaaacagaaatgaaattgccatggacagacaactgttagtatccctagtaactgaacatttggataatgcacttggttatttttttaatagatgcatctaaatgctattatgcaagaataaaaacactcacagcagtccattcactgacactctatttcactttgcaagttggtttgccattgtattaggctctttgctgtatcaaacaagccttgtgccaactatagaagaaaactatgtaagttgtaaatacccaattataaatgtagattgtgcagcattacttttttgtagcagacatgtagacaatccagcttcccttcaaaccccgaaactctctccctttttctctttacattcttttctgttaatatttcagagtacttggccttttagttttatgtgtgtaaaatgatatttggaaactttcacagggcatcttcctatgcagttaatggtctattgaaaatgataattgtttaatctttttcttgaagggggtgatggttatgacatcttaaggtttcataagacaactacttatttttatttcttaaagtaaacatttgcttagtagacattatatagcctagaagtgtttattaactgtcttatcactacactgttaatgcatgtttgcaaagaagatgctgtaattataattttctgaaaagccttctgagccatcaggggaacaaatatattttagagcttgaaggtttatcttgtgagcactttcagtttacagatgttgaaactgagactcctagagattaagggacttgttcaggtagtttatgaaagtaagatcttctgaggacattctctttactatgctatttgtaaatctcaaatgtacattaaatcatgttagcatattagtgtcagttttactttgttgtcttttatcttcagtcctggattgctctcatcttatgctttctcccctcccactctaggattgcagaggtacctgggagaaaattctgtgacagtaatcacttggcctatggcaaaagtgtgcctattaaatttattttataattgtttgggaattagagaacctatatatagttaattaagagagtattaagcagaaccaaaaatataaggctatgacaacagaaagttgctgtaatgaggaaattcggtaggttggtcaaaatgtgtcagataccaggtaaccatgattgagtccctccatgccctcaagaaatttggagttctagtgttcccagcagagaagtaaacagggcctgaacatagtagatcatgcaggaacccagagcggaggtacccacctggattaggagtcagggatataggggaaggacgcacaaggggctaagcgaacgcctattggaatgccttgcctgtctccttctacttgctgcagattggatctcagttcatgtaacttagcatttttttggctggtttttcttaccctaaggatagggcattcattttggtttttattagattttaatttctgtgtgtggcagtgggtgtagtatttcttgaaagctatttctttgtgtacagttgcagttctttggtagctaaccgtatctagaggaataagtcattaacttaaatgactcataacttgagaacaataggatttcacacctgaccaagaagcaggtttatcgtgctggctttctccaacagctgtttgcattaattaatattaatgtaaatgtactttctgagaatgtctagcttaattatatttttcaacccatagagttccaatcaaaggaatcagaaaatcctcttaatctcaaagggaatatataaccgctgtctctgaacggaataaatctctgatagtatactaagaacagccttttattgaaagcctatatatgccaggccatgggctaggcactgtatatactttctgattttcactacagctttgcaaattgtttctgttaccatgtgatctatttgaaacctgaagatcagataaattaagcagtttgcccaaggacataggtaaagttaaatggtagagatgggattccctggactttgaattcttttttttgtttccttgttttatttttgagaggggtctggtatgttgtgacttgatgataggatcttttgtaatgaaggctggatggaacatttaaagaggaatgtttgaaactgaatctgaattatagtagcagagaaagtagagttctttttgctggaaaaaaaaaaaaaaacagaaaaagcattagccttcatcatcaagagtgatcctggataaaacaggttagcatgctggttatttctctgtgtgttactcttcctcttggaagagaacaatggaaataataggcatcaggagacttaatgtcattattttgaaaagcctaatagaaatcatagggcacatgaagatataggaacagaaaagaaatcataaatttactccctgacaaagctatacagattaactgaaataccacctttcttgacttttggaatatggtcatcctggctatcttttgttaatcggaaggtcagatggatggttttctgtgttttggattagtagaaaattgaacagcaaataatatattcaacagcttggcagacaaaattgttaaaaattgcgtagcttaaaaaaaacatgttttttggtggtgagactgctgggtacccatggctctgcccccaggagctcctagaaaagtaggcacagtgttaccagtagatgaatacattcttaagaaagcagctatcttttctgccatcccccacctcctgccaaaaaaaaaaaaaaa

SEQ ID NO: 684 - DNA, 758 bp, Macaca Fascicularis
  misc_feature (1)...(758): n = A,T,C or G
tcagtacaaggagggatacagggcttaaaatgtccacagtcttggcagtggactnnncagttctcccagtaagcagaagtacttgagctttaattctgaacttcaaaataatattttatacttaattttaggagctttcatttannnnnnnnnnnnnnnnnnnnctgtattcacataaatggtgctcaaaccttgtaccccttataagaactgcagcagtccacagtaatgttggttacttctgagtattttgataaaggaacaaagtcaaaatgaatgtatttaataagcttctttctcatttccattgtttttataaaaatattttggtattgttgcctgcattttagccactactaactttttgtattatgaattcggagaggataacaagccaactttagaccttctgccaggggcaatggtgtttttcttccgtgggtaagccattgtgaatggaggccagcggggcagcacactgtgtgaacctggcagcactcatcttggcttgtttagcagtccctctgtttacaccgtaagatgttcagcatgggtccaaaattccgcctgctctgaaaaacatgcccccgaggctctaggcagtttggggccttggtttccacctgcagatgcggtcagatgcctggcttctgggnnnnnnnnnnnnnnnnnnnnnnnnnnnnnnnnnnnnnnnnnnnnnnnnnnnnnnnnnnnnnnnnnnnnnnnnnnnnnnnnnnnnnnnnngcaaaccttgctgc

SEQ ID NO: 685 - DNA, 736 bp, Macaca Fascicularis
  misc_feature (1)...(736): n = A,T,C or G
gatggggagatatgggacaaataannnnnnnnnnnnnnnnnnnnnnnnnnnnnnnnnnnnnnnnnnnnnctcaatccagtttgctgagatgaaactgagaccaagcaacttcagaaatcttgaaggcaggcgcaaacgggcataaattccagggaccactgggtgagagaggaataaggcccnnnnnnnnnnnnnnnnnnnnnnaaagcatcaatacaaccagcccaaccatcggtccacacctgggcatttggtgagagtcaaagctgnnnnnnnnnccctggggccaacggcgacagcacgggcctcgcctcctctgtgatttctttctttgcaccaaagacatcagtctccaacatatttctgttttgttgtttgattcannnnnnnnnnnnnnnngacaacatcgcaatagttttttacttctcttgggtggctctgggaatgggagaggggtaggatgtacaggggtagtttgttttagaaccagccatattttacatgaagctatataattaattgtcattatttttgttagcaaagattaaatgtgtcattggaagctgtccctttttttacatttcatacaacagaaaccagaaaagcaatactgttttcattttaaggatatgattaatattattaatataataatgatgatggtgatgaaaactaagggtttttcaagagatctttctttccaaaacatttctggacagtacctgattgtattttt

SEQ ID NO: 686 - DNA, 2644 bp, Macaca Fascicularis
  misc_feature (1)...(2644): n = A,T,C or G
attacgccgctggctggcagcggccgggccggttggggctgggccctacgcactttgcgtagcgaggggggttaccaaaggcctagtgcttggcctcgagcaagcctggcctatcccctgtagggggtgggtgaggggcgaggctgagggagaagagaaggagaattggggcgcttgaggggattataatttctttaaaaagaggggaggggagaggccatggccgtcccagccaagaagaggaagatgaacttctcggagcgggaggtagagatcatcgtggaggagctggagctgaagaagcacctgctggtgaaccacttcaacgccggggtccccctggccgccaagagcgcggcctggcacggcatcctgagaagggtcaacgctgtggccacctgccgcagggagctgcctgaggtcaagaagaagtggtctgacctcaagactgaggtccgtcgcaaggttgcccaggtccgggccgccgtggagggtggtgaggcgccggggtccactgaggaggacggagctgggggacctgggacaggcggtggcagtggcggcggtggcccagctgtagccccagtgctgctgacccccatgcaacaacgtatctgcaacctgctgggcgaggccaccatcatcagcctgcccagcaccacagagatccaccctgtggccctcggaccctcggccaccgcagccgcagccacggtcaccctgacacagatccccacagagactacctatcacacgctggaggagggcgtggtggagtactgcacggctgaggcgcccccgccgctgccaccggaggcccctgtggacatgatggcccagcatgcagacacatcggtcaagccgcaagcgctcaagagccgcattgctctcaactccgccaagctgatacaggagcagcgggtcaccaacctgcatgtgaaggagatcgcacagcacctggagcagcaaaacgacctactgcagatgatccgccgctcccaggaagtgcaggcctgtgcccaggagcgccaggcccaggccatggagggcacacaggctgccctgagcgtcctcatccaggtcctccggcccatgatcaaagatttccgccgctacctgcagagcaacacagctaacccggcccccacctctgaccctgggcaggtggcccagaatgggcagccagacagcatcatccagtgagggcaggggtcaggccagccttctgccatgatgggatgaaaactccatggtcttgtaagtgggtcctgtgattggccttggccttaggccggccatgtgcacagctccctctttaataaatgcttaggggttgcactgtttttgagaagaggaatttgttgggctcccgggacccaaactcttactccccctacttgagctgccttgctaagacccagaagattggttagctgggggtcacaggtgcatgtgatgggacacgtgttgtcacgaccccaggcttgtgacatgacccagccttggtcttggacaactgtaaggaacaacacagcgggctgtcactgggggctgtcgcccagcctgggtctctcctgagttgccctaccccaggtgccatcctttcaagtagggtcatgtcactggtgctggcagttgagcaataatatcttcctcccttgggaggcagtgtggctttgcctaaggaggaaaccccacccttttctccttctcactgtgcctcagttctcaggggactccagtgactgttgtgctctcccctgaccccaccccaggcacagcacaggcccttgttaagtactgcgctgggacgcctccgtaatgcatgcagtgtgcagccagtctggctcaggaatactgtgtgtgatgaggacggtttggccactctctggatttccacagcatctctgggtagtcctttggtggtttgcccctagagcttttgactcaggtcaagctttggatgctgtaaattttcgagaaagccaactagtgtggaagcttgctgccccactgcagtgggtctgagtgacctgttggctttgcgcggaggcttgcttctagccagttgtatttgttctgtgtgtgaacccctcctaggaaggcctccaggagggccgccctgtggccacacccttcctcctctgctgactccacatttccaaaattcagcaaaaaaagccctgctgagcatcacacgctggactcttcccctgccacagccctcagtgcctcctgttctcttgagactctctctgagtggctgagcgaatccaaagccattcttgaccctgaatgtaggaggaggaagaggcgaagccaacctaagaagtgggaccctggccnnnnnnnnnnnnnnnnnnnnnnnnnnnnnnnnnnnnnnnnnnnnnnnnnnnnnnnnnnnnnnnnnnnnnnnnnnnnnnnnnnnnnnnnnnnnnnnnnnnnnnnnnnnnnnnnnnnnnnnnnnnnnnnnnnnnnnnnnnnnnnnnnnnnnnnnnnnnnnnnnnnnnnnnnnnnnnnnnnnnnnnnnnnnnnnnnnnnnnnnnnnnnnnnnnnnnnnnnnnnnnnnnnnnnnnnnnnnnnnnnnnnnnnnnnnnnnnnnnnnnnnnnnnnnnnnnncaaaaaaaaaaaaaaaaaaaaaaaa

SEQ ID NO: 687 - DNA, 784 bp, Macaca Fascicularis
  misc_feature (1)...(784): n = A,T,C or G
gatgccaatttgtaaattaanatgtcacctagtggccctntnnnntatgtgtttttttgtataagaaattttctgtgaaatatccttccattgtttaagcttttgttttggtcatctttatttagtttgcatgaagttgaaaattaaggcatttttaaaaattnnnnnnnnnnnnnnnnnnnntggctgggctggggggaggnnnnnnnnnnnnnnngaacatatacttgtaattctaatgcaaaattatacaatttttcctgtaaacaataccaatttnnnnnnnnnnnnnnnnnnnnttctagtctatttcagtctagaagaaaagataatgagtaaaacaaattgcgttgtttaaaggattatagtgctgcattgtctgaagttagcacctnnnnnnnnnnnttgtttgtctagactacatgtattacaaagtctctttnnnnnnnnnnnnnnnagatcatgtgcatatcatcccatnnnnnnnnnnnnncaaaaatatgggaacacagttagttatttttacacagttctttttgtttttgtgtgtgtgtgctgtcgcttgnnnnnnnnnnnnnnnnnnnnnnnnnnnnnnnnnnnnnnnntcatttgtgagccttcattaactcgaagtgaaatggttaaaaatatttatcctgttagaataggctgcatctttttaacaactcattaaaaacaaaacaaaacnnnnnnnnnttttgagatgacttatactaatttacattgtttaccaagctgtagtgctttaannnnactactaaaa

SEQ ID NO: 688 - DNA, 855 bp, Macaca Fascicularis
atggcgcctcccggccgccgcgagcgtcccttttcttccggtcgctttcctgggttgcttctggctaccctcgtgttgcagctatcctccttctccgatgcctgtgaggcgccaccaacatttgaagctatggagctcattggtaaaccaaaaccctactatagggttggggaacgagtagattataagtgtaagaaaggatacttctatatacctcctcttgccacccatactatttgtgatcggaatcatacatggctacctgtctcagatgagggctgttatagagaaatgtgtccacatatacgggatcctttaaatggtgaagcaatccttgcaaatgggtcttacgagtttggtgctgagttacactttatttgtaacgagggttattacttaattggtaaagatattctatattgtgaacttaaagacacagtagcaatttggagcggtaagcccccattatgtgaaaagattttgtgtacaccacctccaaaaataaaaaatggaaaacacacctttagtgaagtagaagtgtttgagtatcttgatgcagtaacttacagttgtgatcctgcacctggaccagatccattttcacttattggagagagcatgatttattgtggtaacaattcaacatggagtcatgctgctccagagtgtaaagtggtcaaatgtcgatttccagtagtcgaaaatggaaaacagatatcaggatttggaaaaaaattttactacaaagcgacagttatgtttgaatgcgataagggttattacctcaacggcagcgacaaaattgtctgtgagagtaacagtacttgggatcccccagttccaaagtgtcttaaa

SEQ ID NO: 689 - DNA, 772 bp, Macaca Fascicularis
  misc_feature (1)...(772): n = A,T,C or G
cagtacataagtatttagtgcagggtatgcattttagtatttatgtgaaagaaagaagacttttaactagattttcaaactaggttaattgaagtatcacagtattcttacattttaatgccatagggttttttcccttatgatatccatgttacataccagctaaggacagataatctaatgaaggtgtaaaaatgtaaaaattagtaatgtttaaagtactaattagtatatagcccatatgtatgtgttggatgtgagtgtagcatttgtaagcttttgaaagtagggctagaactctattnnnnnnnnnnnnnnnnnnnntacctagtacaaacctttgcacatagttaggnnnnnnnctgatacttataaaatttaattgaatttgacacaagaatcatattaagtaaatgtttaaagtagcagcctagcaaatttttggcatggtgtaaacactggtaaaaccagtgtaattttagagactaccaagttgttaaaaaatattaggannnnnnnnnnnnnnnnttatcagcatcaataagacagttcagtttacaattttatacaatattgttaatttttattgccactatacatattactattcttatgaattgtttgagaagtaatcataatttatttacaaagataatttctccaggttgtggtataaattattgagatatgtttgtaatttggataatttgaatgctttacaatacacttaagatagcgtttattttttgttcgttgtcaaatgtattatgat

SEQ ID NO: 690 - DNA, 754 bp, Macaca Fascicularis
tactgcttgttccactcaggcagagtcctgcccctgcacccactcccccattcctggccccagaccatgccccaggtaggtggcaggccactcagccgcctggagaggtcacagtgggggatgaggaggacacctgggtcttcacttccgccttgcccgacagcctcccactgggtgagcctggccaagccggaagcctcctgggtgcccgtttctctttctggtcctggcactgcctaccaaagggaaaagatgttcttcccagtatgcaccttccctagtcactggtccaggggatcaggggcagttagcaaagacaggtccccctctccaacacggcaccaggcccatattctggtgccgctgaaaatccagctccgcagggtccctgactccttcagccagcagatgcctgaaacaagccacctgacccgggtggggcctgatatccagcgctggcctgagtcgtgggggatggactccctgcagaagcaggacctccggaggcccaagatccacggggcagtccgggcatcaccccaccagcctggccctggggacagcaggctctgcagttcctagtgaccctgagatgtaaacagcaagtgggggctgaggcagaggcagggatagctgggtggtgacctcttagcaggtgaatttccctgacccaatccagagattctttatgcaaaagtgagttcagtccatctctataataaaatattcatcatcataaaaaaaaaaaaaaaaa

SEQ ID NO: 691 - DNA, 2686 bp, Macaca Fascicularis
atatattttaacaagcaagaaaactgtattctattgcgtctggataacgagcttggaggtattatagcagaagtgaatttggctgagcattctacagttattacatttttagattatcatgatggagcagctacattcctcttaataaatcacacaaagaatgaacttgttcaatacaatcaaagttctctcagtgaaatagaagattctctccctcctggaaaagcagtgttttatacatgggctgatccagtgggctctagaaggctgaagtggagatgtagaaaaagccatggtgaagtaacacaaaaggatgatatgatgatgcctatagatttggggaaaaagactatttatttagtttcattctttgaaggtttacaacgcattattttattcactgaagatccaaaggtatttaaagtaacatatgaaagtgagaaagcagagttagcagagcaagaaattgcagtggcattacaagatgttggaatttctcttgtcaacaattacacgaagcaagaagtagcctatataggcatcacaagttctgatgtggtttgggagacaaagcccaagaagaaggcaagatggaagccaatgagtgtaaagcacactgagaagttagagagagaatttaaggaatatactgaatcttcaccttcagaagataaggttattgagttggacactaacattccggttcgcttaacacctactggtcataacatgaaaattctgcagccacgtgtaatagctctacgaagaaattatcttccagcattaaaagtggaatataacacatctgcacatcaatcatcatttagaattcaaatctacagaatacagatccaaaatcagatacatggtgctgtatttccctttgtgttttatcctgttaaacctccaaagtcggtcaccatggattcagcaccaaagccctttacagatgtcagtattgtcatgagatctgcaggacattcccagatatcacgtattaagtatttcaaagtattgattcaagaaatggatctcaggttagatcttgggtttatctatgctttaacagaccttatgacagaagctgaggtaactgaaaatacagaggttgagctttttcataaagatatagaagctttcaaagaagaatataaaacagcctcattagtagatcaatcacaagtcagcctctatgaatattttcatatatctcctctcaagttacatttaagtgtttcactgagttcgggcggagaagaagctaaagattcaaaacaaaatggaggactgattccagttcattctttaaatcttttgctgaagagtattggtgccacactgacagatgtacaagatgtagtttttaagcttgcattttttgaactcaactatcagttccatacaacatctgacctacagtctgaagtcataagacactattcaaaacaggccattaagcagatgtatgtactcattcttggacttgatgttttgggaaatccatttggcttaattagagaattttctgaaggtgtagaagcattcttttatgaaccttaccagggagccatccagggtcctgaagagtttgtggagggaatggcactaggacttaaggcactagttggtggagctgttggtggattagcgggtgctgcctccaaaatcaccggtgctatggctaaaggggtagcagctatgaccatggatgaagactaccaacagaagagaagagaagccatgaataagcaaccagctggttttagagaaggcatcactcgtggaggaaaaggcttagtttctggatttgttagtggcataacaggaattgttacaaaaccaatcaaaggagctcaaaaagaaggagcagccggtttctttaaaggtgttgggaaaggtttagtgggagcagtagcaaggccaactggaggcatcatagacatggctagcagtacatttcagggaataaaaagagctacagagacttctgaagtggagagtctgcgacctcctcggttcttcaatgaagatggagttatcagaccgtacaggttgagggatggtactggaaatcagatgttacagaaaattcagttctgcagggagtggattatgactcacagtagcagtagtgatgatgatgatggtgatgatgatgagtcagatctaaaccgttaaaattcatatgttctttattttacttggaatgtttcattaccatgttttgtatgacttataccataatgcccatatgtccatttagagggaggtaaaacacgttttcttttcaaatgttttcctacacatcttcataaagcaaaataattgtattccttaagcacagaaaaaaaatgtatcttacatccaaagtagcacatccaacatattatagatttgcttatagctttgtgttacatagtttgtctttaagatttcaagttagacttaaatataattttgatgttcactggttttattttagattaccttcttatttgttagcaaaatgcctttttttaatggtctctgtaaattttctgggttttaatgtaatgccactgtgtgaaaaaaaaaggaagaaaatagtaatagtcatttaatgttttatatttattattttaaagatatttttgtcaaatttcttttaataataataaacatatgcaatctaaaaaaaaaaaaaaaa

SEQ ID NO: 692 - DNA, 740 bp, Macaca Fascicularis
  misc_feature (1)...(740): n = A,T,C or G
caaggtccacattaaactcccnnnnntcgcccaggcatctctgagtgccngagtccccannnntggagctccttcagaannnnnnnnnnnnnnnngcattggattcttggcacacacctccttccaccatcagtaccttctcttgtgtagatgagtgcgtgtcccttaggagtgtcctctagcacagactgtgttttatctttgggtactcccagagcctagcaatgagccttgcacacaacactgactcttgagaatgctcttaaactctgaaggcatcttagaatcaaaacctaagaccacatccaggaatacagcctcgttcccccgtctcccagtgtccttacacaccaagcacatgcctgaatgtgaagcctctcatttgctctttcctctacctggcatggttcactcccctactccagtgtctctacacaaatgccaccttctcaggctttcctgaccaccctgtttaaaaaatagcattccttatcctgtaatgcctatcctgctgatttttcttcatagcacttactattgatttattttctgttgttatactatattacattacgctnnnnnnnnnnnnnnnnnnnnnnnaaactgtatagatttattgggtacaacatgacattttgatatatgtatacattatggaatggctaaatcaagttatttaacatatgttttatctcacatcattttttgtggtgagaacacttaaaatctctctgagcaat

SEQ ID NO: 693 - DNA, 467 bp, Macaca Fascicularis
tatggacgatagttataagtattttaggttttttaataattgtctattttacaagttctatgagagcgatgcttgattttgcaatgattttatcttttacaacaacaccaatttttgcacttttaaattataagctagtaaaaagtacaaaacttcctgctgatttaagaaatggtaaattcttagaaactttatctattttaggacttatctttttatttggatttttacttttatttatcgtttatagatggtttcctactcttttaggaatataattattcttcatatttagaagtagttaattcaactgcttcatatgaagttgttttaactgcttttaaaatatcttctattttcactttttcttcatcataaacaactgttacttcttttgtatttaatctagcacttactttttttatcccatcaatttcattaatagctttttttattgctgttgtaca

SEQ ID NO: 694 - DNA, 699 bp, Macaca Fascicularis
  misc_feature (1)...(699): n = A,T,C or G
catgtttnnnnnnnnnnnnnnnnnnnnnnnnnntgtataggttaagagcataagccactgtgttcatannntagctaccatgtcctagctatnnnnnnnnnnnnnnnnnnnnnnntttcttcacccataaaatggggaaaacattaacacctacctcttagggttgttgtgaggtactttagagtatagcctgtagtaaaaatttcatgcatgttatcaaatattgttaatttttatcttcctcagacctcaagtttcctcatctgnnnnnnnnnnnnaggggaggggannnnnnnnnnnnnnnnnnnnnnnnnncagttaccaataaagtttttcattctagtatgtctgctctctatttacnnnnnnnnnnnnnnnnnnnnnnnnnnnnnnnnnnnnnnnnnnnnnnnnnnnnnnnnnnnnnnnnnnnnnnnnnnnnaacagcagactannnnnnnnnnnnnnncctgaagaaagaaaactgactgaagcaatgaatttataatcagacaatannnnnnnnnnnnnnnnnnnnnnnnnnnnnnnnnnnnnnnnnnnnnnnnnnnngcatacgttgtgcatgttggcagtattaagtgtatcaccaaataatacaacataactttcattttactaatgtattttttttgtacttaaagcatttttgacaatttgtacaaacattgatgactttatatt

SEQ ID NO: 695 - DNA, 761 bp, Macaca Fascicularis
  misc_feature (1)...(761): n = A,T,C or G
gcgctgcctcgtagatgaataatgtacagtgaactccatgagtctctccagggctgcctgcagcacttcatttccaagtagccgatttgattcccatctcaaatgtcnnnnnnnnnnnnnnnnnnnnctccagagctcggggtgggtcaggtcccctttgggggaccctttcctggccgtcgaggtcggggggctgccgtctgcgggcaggaggacccgaggggcagtcaggaaaggcgatctcttcactgtgaaaagttgcccaggtgcagagccttttccttccactgtgggaaatgcaggctgggccctcggggtgagcccgcagggctctggtgctgtcccccacccccaccagaacgcagttccagtttaggaagccacaaccaagtcacccaggaggaacacaataccaccaatgcggcttttccaaatttccctggaaaataagtcttgctcttgccaaagaaaagtctggcttggagagtctctggagcccaggatgccagcgtatgccaatgactgtcaccttcacctcttcaaaagaaaagccttagccgaggactgccccgcaacaccccgtggagtgcgtctaggtcatgtgattctgttttcatttctcatcccatccaatttgtccttttctcctgtcatttgcttcctctgtggtcccttcaaagttgttataatttgtactgaacttcaaaatatgtcccgttctccccagaccactcttgccacagtatatgcaataaaaaata

SEQ ID NO: 696 - DNA, 2452 bp, Macaca Fascicularis
gtttcgagttcagggagtatattttcttatattcagctagaaaatgccataaaccaatagtggttaggtttttagcaacatgtgttgtaaataaatagtggctagttttctaggtaattctatcccagccaggttgacattactataattgaaatggtatacttttgctaaaaaataataaaagacaatattgtagaatcagattttctttatttcaaaaaccatatcattttcaatatgagatactatcaatgaagttcttgagattattgccctgcctgagagcctcatctcaagagttagaggtagaaagcattgcctactgggtgattgcaagggtcagggaaaggtgaagtgggaagactactgacccctcaaaaagtgagggtcatgatgggatgcagaaactggcagtgtcacgtgggaggaaatgacgtgtctcaagacctagttctgccatttactggttgtgtggccttaggttagtgctttagtctcctgagttagtctcatcattggttaaataaagaagagttaaataatactatttctacaggtttgataagggaatagcatgacacataatgcttccagaagatttctgtggcatatggtgctgagtggtgaatggctttgaaggctaaaagaccaagatgtgcctcacctgtaaaatgggagtagtctaatgtatataaagtacttagcctggtgcccagcacatgatggcaagtggtagctgctgcaagtgacattattacattaccacccttgacttccccaaggaggctgattcccttttgccatgcctacacactgttccattctacaagaaccaagatgctatttctgcttgactcagagaatggaaatgggatggtggagcatggtggccacctcagagaaagcaggtattgaatcaggtcctaaagatgtgaagccacctcaccagccattgagatagaagaagggtgggaatggggaatgaggagttcaggaagtactttatccaaagggtccacaaaagatgaaaagagcgaggaaagcaggaatgcaaggtgatgcatagaggaggggagaggtaagctttatttagaagtctatgttaaggacactacaaactcttgcctgtgtgtattcctacataagagttattcgccagtcaaactgtcaagtcttgtgtagcctaatcatttggccttccctgtctgttacgctgaaatattatgtcagaagtctttcgtggaaaacttactgcatgagctatggaatggtggacggatcacattctccagggactccatctgcctcttctaaaagatctgttgaacttaggccccttctcttgttaaaagatctaacttaggcctcttcccttgtgtttctgtaagctgtaggtttttgtagctattactctgacccctttaaatgagcctcgcatcaggtctcactgtgacagaacacgaacaataccactcacacagccgagcctgggcttcaagtctctgatctgctgctacctggctgggtagtccagggcaaatgacttaacctgagatcctacttcatttttaaattgaaggtgctggactccaggatctcaaaatgtcttcccactttgtcattctacctgcttctctttcatgtaagaaatgtctgatttctagcctttctatttttcttctgcatgattttgtctcccttagagtaataaaggagaggccagaggttaggcaagcagcaaaatttaatactagaaatatgacagtcaattagaatcatttatgttccaagtctcctgaaaactgattaaaatcttcctttggccacgagggtgggtggagactacaagaagcactacaattactgtttggcctctatcaaagaaggctacaggatgtggggagacgaacattggttcttcttctctttcaaggcatattcattttttgaaatacattcatcttttgagtcttatgcatgctttctgaatggcttctcagagctccttcctgagaatagtgagccactacagggtggggttttaaacatgagaactcttggtgctaggccatgtgtccccaggcaaggccctttacctttctggaagtgttgtacacattgccaagggcctgtgcagtgcaaatttaccaaactgattttaccaaatttaccatgtcccttgggacaatatagaaaagtggttaggagaaccagccttgaaagccaggcagatctaggttgaaattccagccctacctctaaatagctctatatgcttgagcaagtagcataacatccctaaccctttattctccacttgtagatggaatagtaagtgttcacacttcagagagttgttgtgaacatcacaactgcctcaacaaaatgaggcagttatgtagcctggcactgtgcctgacacatgtaagtgctcaaaaaaaaaaaaaaaaaa

SEQ ID NO: 697 - DNA, 751 bp, Macaca Fascicularis
  misc_feature (1)...(751): n = A,T,C or G
ggancnngtgctgagatagaanntggcagnctatgtggtagaaatcagcaaaaacgcgactgtgaaagcaaacaagtaattagagaaatcatgtgctgacaggtcttggaatcaattagaaagagatgactagccagatggaattacagcccaatcacgtgaacaggcaaactacaaaaaataaaattaccaataaattatgaaaaattataatgttgttagtagttaaaatgcaaattaaaatacatgctgttttccctacccgacaagcaaagagtaaattaaaatagtagcctgggcttgcctggcagtggcagggaggtgtggctgccggggccttannnnnnnnnnnnnnnnnnnncaccccagtcactgccagagcctcccacctgagtgnnnnnnnnnnnnnnnnnnnncagtggcnnnnnnnnnnnnnnnnnnnnnattgctgtgtatccatctggtggannnnnnnnnnnnnnnnnnnnnnnnnnnnnnnnnnngtttttaaggatgtgtaatgatatttagaaagggtttaagagacagtaaagcttggcagaataaaccatgtatacagaatggatgttagtttgcataaataaatttatataaatatgtctgggggataaaaatatcacaatgctaagacaagcatatggggaatttaaacttttctttgtacttgtccattttttccaatttttaaattcgtaattttttatcagaaaaataatcagaaatatgtaaa

SEQ ID NO: 698 - DNA, 650 bp, Macaca Fascicularis
ggaagccgcccaacccccagaaaactggacagtctccaggcccttctgactttgttgcccagtggccaataccagtgtctgtttccaggagccccaggtcaagccttgccccttcctcctcccagcagcagtcccaacaagcaggcttctgacagctccatggcccgcacaatggccactgtggaaaagcagccttctgcacgggagggggcgcggcatgtggacagaatttgccaagctgttttgctgccccctcctgggcacacccaggtgagggagggttggggctggcaccacgcacagtgcctaaccctagaaaagccatgtcttcacccgcacactgctcaggcaggtcagggaggtcgcctgcccacgcctgggacagagggcttcactgctaatcacatcgtgcatctgtgtgtcctgggagctacctgctcccagtccaccctctaggaggctatggctcaaacagcaatagggttttcctcagtgaccttggaggatgcctgtggccttgtgataaaacgtgggaaatcacagaaacgccagaaaacaacaaatgccagcccagcctggccacaggtgaggtctgtgatttcccagcacgctccaccttgcactcaacttggcctgttgatcgcaagcct

SEQ ID NO: 699 - DNA, 708 bp, Macaca Fascicularis
  misc_feature (1)...(708): n = A,T,C or G
ggtgacagagcaaaactctgtctannnnngaaaaaaaaaaaaattgcagccagaatgatctttcaaaagtgcacatctgggctagacatggtcannnnnnnnnnnnnnnnnnnnnnnnnnnnnnnnnnnnnnnnnnnnnnnnnnnnnnnnnnnnnnnnnnnnnnnnnnnnnnnnnnnnnnnnnnnnnnnnnnnnnnnnnnnnnnnnnnnnnnnnnnnnnnnnnnnnnnncgcgccacctgtaatcccagctactcaggagactgaggcaggagaatcacttgaacccagaaggcagaggttgcagtgagccaagatcacaccattgcactccnnnnnnnnnnnnnnnnnnnnnnnnnnnnnnaaacaaaaaacaaaatcccacaaaagtgcacatctgatcacatccctcccggttaaaaagctttcagtgactaatcaagtgcagactttttaatgaggctaacaaaccctgcatgatttggtcccagctcttttcagtagcgctactgttccagttcccttctggcccctgcttcctcctcatggtacactccagcccaactggaacttctttccgtttgtcacatgcttccactctctcttgcctnnnnnnnnnnnnnnnnnntttctgtagactcagaacaaccttccttcggaggctgaggtgggcgggttgcttcagcctaggagtttgtgaccagcctggc

SEQ ID NO: 700 - DNA, 830 bp, Macaca Fascicularis
  misc_feature (1)...(830): n = A,T,C or G
gttggaagatggggtcactaagcannngacttttggattaaaaacaagtatttctgtggaaagcctgctacacggttttcataaaataaagtgctatgatgtactaaaacctcacattgccttctcgtaattttatttttatcactagaaggaaatataaagtgattcctgaaccagaagaattaaccccatcttccaactgtcacagaattatcatcaacatattcaaaagagaaaaaaataaaaccaaaggttgatgtattgagtgcccttgatttgaagagctcaaagtaagtgttctattcaggatgggacagggccttcctcacagacacctgacaacagatcaaacgtgcatttcctgtttccggtttggtttgctctgtctgcctctcaggtgacttatttttttcatcaagagaccagttttagaataaaaaataacttaagaagattcaagtaaaggacccaaaagctttaagagaatgaaaagcttccttggtatctctgggcccttgctctaggccttccatcatagctgttcctcctcctcgttgtcctcatcctcatcatcatcctccgcctcgtcgtcctcctcatcatcttcatcctcatcttcatccagacttgcccttttgtcatcannnnnnnnnnnnnnnnnctcctcctcctcccgagccaggagcttcttaaaaacctcaaactcctcaacagaagnnnnnnnnnnnnnnnnnnnnnnnnnnnnnnnnnnnnnnnnnnnnnnnnnnnnnnnnnnnnnnnnnnnnnnnnnnnnnnnnnnnttcttgtcnnnnntttggtaccgnnnnagt

SEQ ID NO: 701 - DNA, 486 bp, Macaca Fascicularis
atggttccaaaactgttcacttcccaaatttgtctgcttcttctgttggggcttatgggtgtggagggctcacttcatgccagacccggacagtttacatgggctcagtggtttgaaatccagcatataaatgtgaactctggtcgatgcaccattgcaatgcgggtaattaataattatcaacggcgttgcaaaaatcaaaatacttttcttcttacaacttttgcttatgtagttaatgtttgtggtaacgaaagtatgcgctgccctagtaacagaagtctcaacaattgtcatcgtagtggattccgggtgcctttaatccactgtgacctcataaatccaggtgcagagagtatttcaaattgcaggtatgcagagagaacaggaaggaggttctatgtagttgcatgtgaaagcagagatccagtacgggattctccacggtatccagtggttccagttcacctggatagaatcatctaa

SEQ ID NO: 702 - DNA, 725 bp, Macaca Fascicularis
  misc_feature (1)...(725): n = A,T,C or G
cagatgctaagaagagcagtggggcttttgaattttatnnnnnnnnnnnngtgaaagctgggcttttgccttaataatttttttaagtatgaattgttttgtttttctnnnnnnnnnnnnnnnnnnnnnnnnnntcagcaggctaannnnnnnnnnnnnnnnnnnnnnnnnnnnnnnnnnnnngaggtcactcttttgaactttgccattccaggcattctcagagtggctaggggccnnnnnnnnnnnnnnnnnnnnnnnnnnnnnnnnnnntgtccttcagaaagaataggtgtacagaaaagaaatggcaatcttatgtgtgctgaacaaagttttcaacaatgcctagttgtgccttttaaaccatgcaatattcaggatagtttgaatcaaagaagtaagaagctgcnnnnnnnnnnnnnnnnnnnnnnnnnnnnnnnnnnagggagagtcaccaaacaatctacctccaactctcttctcttttgtctagagacattnnnnnnnnnnnnnnnggctgcccccaacctctgacatttgttcttgcatgtgatgatagaaagtcttcagatggacttatacattctgtgctttggaagcacaagaagaacaaaaaaagtgtatatttcctttaatgtttatacaaagtttatatggagcagtattgttatgtttgtatgaatttgcaaaaattaaagtgtacaaagagattttgacttgca

SEQ ID NO: 703 - DNA, 1608 bp, Macaca Fascicularis
ttaatacctatagattcattgtagtacaattcacacatggaaaataataaaattcagggcatattgtgatgttcacataaaaccagtttatatgtagaaataattatcctgtacccaaatcctttagcaaatggttcatggactacacagatgaaataaaatttgtgaaataaagcccaagtttggagaatatcaaagaatagggtaaaatgataaatcattaataagcaagttgtgtactttttaagaaggcaatgttttatgtaagtaccatttaattattacaaagattaatactatataaaggtttgtatcattgtaagaaattgttttacctactatttggtaattttcctttgaaaaggaagtcttataaacaaaaagtgtgaacaaaatcaaagccaaacaataacatgtccaaaaaaagatataaagccacacaagcagctaacattggtagctatcagtgtatttttaattgctagcaatgtgcatggttctatgaagaatatttttaaaaatcaattatttgaaagttttatttaaattatagaattgtagaaatttcatagaggttttttgttgttatttacctaaaataaccaggccatcaatttcctttttacatattcattaaggggtcaagttgattgcagggagaaaatttgtcctatcatacatatcttgattgtacattttcttgttttctagaaatcaagaaaaaataatgtagttaaatagtttgggtttcattcatattttggaagactagcgaaggtaataatactgtatctgtacataagagaagtgagtctcttcctagggacagaggctgtttttatggtgtacttttaggtgagcctcaattctttggggccaggcactccagttttctaaatggtttagttctctccaacttaacaagtatttattgagtgcctcacagatgcttagctcaatgcgaggcgctgaaggaaggacagataaagcatgacagtttctgttcacaaatctcagttcagctacatacatatcaatcgataaacaatttaattattctctcaccaacctgacaggttgtttcttgattcaaattatctatgtataattgtatgaaatatttaaatagcaaagaagtcaaagaagattgttaaatatccaacaagaatcataaatacctttatatgtatttaaaaactgttgggctgttttgaacatgattatgctggtctgtctgccttttagcctgactccttcactcttgtgtgtggaagtctattagaaactttcaataagctaagcaatgttgtatcttgcaaaaaagcctccactctgagaaacagggccttacagagtagggatgttttcatactgggactattgaaattttgcagatgtgtgcatctgttccatttaaggtgcccttaaatgtgttgaatgtaatgtgttgaatgtttatgtgtaatggctaaagtatctatatgtatgtgcataaaactgtcacaagatgtattctcaggaatactgttacctggagtttgaaaggaataactattaaaaaaaaaaaagttggggaagattaaaaaaaaaaaaaaaaaaaaaaaaaaa

SEQ ID NO: 704 - DNA, 798 bp, Macaca Fascicularis
  misc_feature (1)...(798): n = A,T,C or G
aggctcaaagctcaacagcagggctcccactnnttggtagccttcagttctcctnnccannntcaccttcagaccttttctctccctaatcacannngctttgggctacagcagcnnngcggcatagccgtgggctccagatgtggacatctgactgctcattgggcttatctacagctgtcctgagtataatgacccagccagacgccctgtcaacggtccttgagtcctcccttccctgccaccctaatggtcagtgagtccatgatacctcttgagtctactccctgagtttgcatttgaaaataatttatttttagtacaatttccccccgtttgccctattgacattttgtattagttggtgtatttgttattgttgatgagctaatactgataagttattgtaaactatagcccatggtttacattaggtttcctgtctgtgttgtacagtttctatggggttacacaaatacataaagccatttattccctcaaaataatttcatgcagaatacaaaactgggtggctgtnnnnnnnnnnnnnnnnnnnnnnnnnnnnnnnnnnnnnnnnnnnnnnnnnnnnnnnnnnnnnnnnnnnnnnnnnnnnnnnnnnnnnnnnnnnnnnnnnnnnnnnnnnnnnnnnnnnnnnnnnnnnnnnnnnnnnnnnnnnnnnnnnnnnnnnnnnnnnnnnnnnnnnnnnnnnnnnnnnnnnnnnnnnnnnnnnnnnnnnnnnnnnnnnnngnnnnnnnnnnnnnnnnnnnnnnnnnnnnnnnnnnnggacagagacccgtc

SEQ ID NO: 705 - DNA, 760 bp, Macaca Fascicularis
  misc_feature (1)...(760): n = A,T,C or G
ctctcaaggtcctccagcatctggttgtgtcagctgagatnnnnnnnaaggcctnnnnnnnnnnnnnnnntcaaatcctccccgtcnnnnnnnnnnnnnnnnnnnnnnnnnnnnnnnnnnnnnnnnnnnnnnnnnnnnnnnnnnnnnnnnnnnnnnnnnnnnnnnnnttgatccaggagacgctggaggccttcgagcgctacggaggagaaaatgcctttatcaacattaagtacgtggtccccacctacgagtcttgcttgctaaactaacagtgnnnnnnnnnnnnnnntgaagcctcccgttgnnnnnnnnnnnnnnnnnntctgctgcttttagcatctcattccttgtgacttccacagctttcttttctacagctgctnnnnnnnnnnnnnnnnnnnnnnnnnnnnnnnnnnnnnnnnnnnnnnnnnnnnnnnnnnnnnnnnnatagtgcctgtttcttagattacaatagtgtactgtgcttatttgttctatgagaagaattgcttctttatacagctccgacagaagcaggagtccgagtgaaaccttcagttgtatagacaataaactataattttcatacgcaattcagcaattgctgttctgtgtgtgcctgccctgggggtgatgtcagaggttgtaagggaagagtttatgctgactgcttaataggtgtttgtcatggaagagaagcatagnnnnnnnnnnnnnnnnnnnnnnnnnntgcgnnnnnnnnnnnnnnacatcanna

SEQ ID NO: 706 - DNA, 1750 bp, Macaca Fascicularis
  misc_feature (1)...(1750): n = A,T,C or G
tctaacagctgcgacatcactagatgatagaaatttttcagctccattataatcttttgggaccactgttatacatgcagttcattttgaccacaatgtgactgtatttggaaaaggagaaattccatatgttcacaatttggctacataataacaattcaattacatgtgtatcacggagtgtgctttatgcattcagtccaagaacaaatacttaacgagattatccaggcccaggttgttgcagagcccagcattaggtacagtggacaattagataactaatacttggtttgatatatttttgaaagccagtggaaagtttttggtgatctactcacctccccacaatgcagccctatatttgagaggaattaccccatcttcctgcctacctcctagccaggccattggaatgggccttctagtcccaaccaatctaagcacaaatagggattctggttttggcagcaatggtgagatcacagctttcaggaaaccagggaagtaagacttatatgaaatagaaatcatctgcccattttcatggtgtaaaaatgtattcaaacatttttgcctctactgtgatcgcatagtcacaagtccacttgaactcaggtctcatccttggatactacctttggtactaaccctgagagatgccagtagagcctgcttctgcctcctactgcatcaagcagacattctatttaagggtcccatttgctgcctgggctacttttgacttctgcttccagtcttcttacaacagcttcacacttagtctttttctctttctacagcttctgtaataaacattcattttacacattcaaacacacacagtcttgcagtggaagttttcaaaatgcttgtttttctcaaagattttaacacatagaattagcgtggtcagtatacctttataggaaataccagctgagtgaggagtggtatagattatccaaaagtcaccacacttttctaatcagtatattacaaaagttcatcagattcacacagacaaatctttactcagtttgtcctttctggtcacgtaaatgtaaacccaaaaaaatgctttttaaaggaacagtagatattaaataagggaagccagagtctgagccattctcagtgagcctgtaaccccttggagcaaatgcaagtagtatttctgttgggctagcattataaagagagagtgcttggagttacactatcacccatcagtcccaggcctgaaattcactggacaggatatgaagaaatagaagagaacaaggtgactagggaaaataaaggcagatatgggcaggctctgtggaaatagtttcaggctgtacagctttagtccttctctgtgagattggcttctccattactctttttatagatcacatctttaacatgactacatagcaagggattgtgtcttaagaatagaccaccttggcnnnnnnnnnnnnnnnnnnnnnnnnnnnnnnnnnnnnnnnnnnnnnnnnnnnnnnnnnnnnnnnnnnnnnnnnnnnnnnnnnnnnnnnnnnnnnnnnnnnnnnnnnnnnnnnnnnnnnnnnnnnnnnnnnnnnnnnnnnnnnnnnnnnnnnnnnnnnnnnnnnnnnnnnnnnnnnnnnnnnnnnnnnnnnnnnnnnnnnnnnnnnnnnnnnnnnnnnnnnnnnnnnnnnnnnnnnnnnnnnnnnnnnnnnnnnnnnnnnnnagtgggacactgtatcaaaaaaaaaaaaaaaaa

SEQ ID NO: 707 - DNA, 508 bp, Macaca Fascicularis
  misc_feature (1)...(508): n = A,T,C or G
gtaccagggggcaagaggactctatatatttgttaccgcctggcctgtgggcatccagatatgaagatgggaaacctatttgtgaatgagaagtaagaattcaagtcgactgtccttttttttttttttttttaataaaatgaggtctcaccatgagtcccagtctgttctcaaattcgtggcctcaagcgatccttacgccttggcatcctaaagtgctggattgcaggcgtgagccaccacatcccactgaggttgaccgtctttgatatgttacactttaagaaccttcgttagaaaataaaaactggccgggcgcggtggctcaagcctgtaatcccagcactttgggaggcctagatgggcggatcacgaggtcagnnnnnnnnnnnnnnnnnnnnnnnnnnnnnnnnnnnnnnnnnnnnnnnnnnnnnnnnnnnnnnnnnnnnnnnnnnnnnnnnnnnnnnnnnnnnnnnnnnnnnnnnnnnnnnnnnnnnnnnnnnnnnnn

SEQ ID NO: 708 - DNA, 285 bp, Macaca Fascicularis
  misc_feature (1)...(285): n = A,T,C or G
gtgctggagtcactacgggtcatcatcaccaacnntnntgctgccaagtccttggacatccaggtgcccaacttcnnnnnnnnnnnnnnnnnnnnnnnnnnnnnnnnnnnnnnnnnnnnnnnnnnnnnnnnnnnnnnnnnnnnnnnnnnnnnnnnnnnnnnnnnnnnnnnnnnnnnnnnnnnnnnnnnnnnnnnnnnnnnnnnnnnnnnnnnnnnnnnnnnnnnnnnnnnnnnnnnnnnnntcaagggccccagtggttctnnnnnnnnnnnnnaggtgacctgc

SEQ ID NO: 709 - DNA, 2789 bp, Macaca Fascicularis
ttgagatgcataactttctaaacactttttatctgttgatgtgattgtcagtctttctgtattgatatgtatgtattttataaatgtaatcataccataaatctcataacctcctttttctattgagtatatcttatttccctaagttagcatgtactcattgcatcatgttccgtgtcatgaatattactgatatatgcattggaaagtcagctttttgggttcctgatgaattctttatacatcctgtccagctcccatgtcttgatcaacttccttcagtcctgaacccatgaaggacattctagcttggaccatgacaggtattcctgagaggtaggaatggaaagaggatgatctgatctcctgggcaggactgaatcgtcagatcccaggtccagattcacatcctcagaaccagacactgccagaaacctccctgctgaagaactttggggtttaggtggaagtttggattccataaatggcacgtggggtgtgtagcagaagcaggcatggagaagataagatcttctattagcgtaagtcaggatgggatcactgaggcacgcctggtttaacacttcgttttccttccccagttctggcttttctggattctgtgcttcaccaatagaggaatcccatggagcattaattagttcttgcaattccagaaccatgactgatgggttggtgacattcagggatgtggccatcgacttctctcaggaggagtgggaatgcctggaccctgctcagagggacttgtacgtggatgtgatgttggagaactatagtaacttggtgtcactggatttggagtcaacaacatacgagaccaaaaaaatattttcagaaaaggatatttttgaaataaatttttcccaatgggagatgaaggaaaaaagtaaaacccttggccttgaggcatccatcttcagaaataattggaagtgcaaaagtatattcaagggactaaaaggatgtcaagagggatacttcagtcaaatgataatcagctatgaagaaataccctcttacagaaaaagtaaatctcttactccacatcaaagcattcataatacagagaaaccctatgtttataaggaacgtgtgaatgcttgcagtcatggctcaaaacttgttcaacacaagagaactcatacagctgaaaaacactttgaatgtaaagaatgtgggaagaattatttaagtgcctatcaactcaatgtgcatcagagatttcatactggtgagaaaccctatgagtgtaaggaatgtgggaagacctttagttggggatcaagtcttgttaaacatgagagaatccatactggtgagaaaccctatgaatgtaaagaatgtgggaaggcctttagtcgtggctatcacctcactcaacatcagaaaattcatattggtgtgaaatcttataaatgtaaggaatgtgggaaggcctttttttggggctcaagcctcgctaaacatgagataattcacacaggtgagaaaccttatcaatgtaaagaatgtgggaaggccttcagtcgtggctatcaacttactcagcatcagaaaatccatactggtaagaaaccttatgaatgtaaaatatgtggaaaagctttttgttggggctatcaacttactcgacatcagatatttcatactggtgagaaaccctatgaatgtaaggaatgtgggaaggcttttaattgcggatcaagtcttattcaacatgcaagaattcatactggtgagaaaccttatgaatgtaaagaatgtggaaaggcctttagtcgtggctatcacctttctcaacatcagaaaattcatactggtgagaaaccttttgaatgtaaggaatgtgggaaggcctttagttggggttcaagccttgttaaacatgagagagttcatactggtgagaaatcccatgaatgtaaagaatgtggaaagaacttttgtagtgggtatcaacttactcgacatcaggtatttcatactggtgagaaaccctatgaatgtaaggaatgtgggaaggcttttaattgtggatcaagtcttgttcaacatgagagaatccatacaggggagaaaccttatgaatgtaaagaatgtgggaaggcttttagtcgtggctatcaccttactcaacatcagaaaattcataccggtgagaaaccttttaaatgtaaggaatgtgggaaggccttcagttggggttcaagcctaattaagcatgagagagtgcatactaatgagaagacttatggatgtaaagactgtgggaaggcctttggtagtggctatcaacttagcgttcatcagagatttcatactggtgagaagctttatcaatgtaaggaattcgggaagacctttactcatggctcaaaacttgttcatgagagaacttgtaatgataaaccctacaaatataaagaatgtggggaagcctttctgtggacaacttactcaaatgagaaaattgataccgatgaaaccttatgattgaaagttgtaacagaacattttgtgtgtgtttacagacaactcatcataataagaactcttactcttgagaaaccttgtgaatgtaagggatgtgcaaaagccatttgtttctgtgtatggacaattatcttgctatccagcaattcatactagtgagaaatattctgaatataactaatatgaaaaggcctttagacttctgtacagtcttattggatatcaatttatactgatgtaaaatcatttaaatgtaaaaaaaaaaaaaaaaa

SEQ ID NO: 710 - DNA, 703 bp, Macaca Fascicularis
  misc_feature (1)...(703): n = A,T,C or G
actattaaagagtatcttttgacgtctgcttggaaaatgaatagtacactggtaactcagtctccagtcacctctgtgtctcttaagcaagacattctaaaagattgggaaaacatcctccaacacctgcctttgcctaaccattatttttcaccagattacttcttaagagagggaggtgattctgaagaaggtttctatctcaaaaagcactgggcttctttattcatctgttcttgttgtttttgatggattttttaaaatttatgtgcaatacaatatacacgatgtgaaggacactcttcagcttagtgaaatgctgttttcttttttttttttttgtaggtcagaaacaaacatcaaaatcagttcaagcattttgggtttttttttctttgtccttgccttgatgttatgaatattaaaacaggaggatnnnnnnnnnnnnnnngtttgcttggacaaacctggagatgcaacccagctcacatcattgctaacgatgagctttctgtgcctttatcaaaagtttattgagaagaccatatttcttcgtatctgtttataaactcaaattccaagtatcaaatcgcaggtctcagtgaacatcaaacctacttactacacagaatcaaacctttgtttaggtgagatgtacatcattagtggaggaacaactgacaacataatttcgttttgtttt

SEQ ID NO: 711 - DNA, 102 bp, Macaca Fascicularis
  misc_feature (1)...(102): n = A,T,C or G
ctgggtcttaggtgataagggagagagagaacgcgtgaggcaggaagtcccctaaagtccgtgtcctccnnnggttgatctccatccccatccacctgtacg

SEQ ID NO: 712 - DNA, 1912 bp, Macaca Fascicularis
  misc_feature (1)...(1912): n = A,T,C or G
aaagccccacccaccagggggtgaggtcctgggaaaactctgtccccaggggaggagccataagaacaccacaccctgttggggggggggtctcatgaagtcccgcccatgggtggagccatcaggaagccacacccaccaaggggtgcagtcctgggaaaactttgtcccccgagggtggagccctgaggataccatgtgcttgggggagtggagtcctcccgagacctcctccctggatacagccatgagaagggcacacccaccacatggtagctcctgggaaaaccctgtccgcaggggtggagccctgagaaggccatgcgcccgaggagaaatgggctgagaacccaacctgtctgtgatgcagcctcaaagaaagtcacatccctcattggcagagaatttggaataattctgcccctaaatgatggaatcccgagaaagctcagccctccccccacccgctgatggaaccttagagtctccatggctgggcatggtggctcacgcctgtaatcccaacactttgggaggtcgaggcgggtagatcacctgaggtcagnnnnnnnnnnnnnnnnnnnnnnnnnnnnnnnnnnnnnnnnnnnnnnnnnnnnnnnnnnnnnnnnnnnnnnnnnnnnnnnnnnnnnnnnnnnnnnnnnnnnnnnnnnnnnnnnnnnnnnnnnnnnnnnnnnnnnnnnnnnnnnnnnnnnnnnnnnnnnnnnnnnnnnnnnnnnnnnnnnnnnnnnnnnnnnnnaaagaaagactctgtctccaaaaaacaaaaagtctccacccccgcaagcgtggaacccccccccaaaattgggggccatgcccccaaaagtgtccctcatgtagttgggcggcgctgcagcaagccccctgccccctgcaccaggcacagaaccctgaccccctctcccttccgtccggggcagtgcccagcgcgccggtgatcgacctggccgagtccctggtggcagataactgtgtgaccctggtgtggcgcatgccggatgaggacagcaagattgaccactacgtgctggagtaccggcggaccaacttcgagggcccgccccgtctcaaggaggaccagccctggatggtcatcgagggaatccggcagacagagtacactctgacaggtctcaagtttgacatgaaatacatgaatttccgcgtgaaggcctgtaacaaggcagttgcaggagagttctctgagccggtgactctggagacaccagaacctgcgggtggatgatctctccgtggagtgggacgctatgggcgggaaggtgcaggatatcaaggctcgcgagaaagatggcaaggggcggacggcgtctcccatcaattccccggccagaggtactccatctcccaagaggatgccctcaggtcgtgggggacgggaccgcttcaccgctgagtcctacacagtgctgggggacacgctgatcgacggcggggagcattactgggaggtgcgctacgagccggacagcaaggcattcggtgtgggcgtggcctaccgcagcctgggccgcttcgaacaactgggcaaggcggccgcctcctggtgcctgcatgtcaacaattggctgcaggtcagcttcacggccaagcatgccaacaaggtcaaggtgctggacgcccccgtgcccgactgcctgggtgtgcactgtgacttccaccaaggtgaccccaagccccagctgccgtctctggctgcccctgcctgagtcccctccctcttcccccatcccacttctgaccgttcccactgtcactctgcccccccaccccaggcctcctgtccttttacaacgcccgcaccaaacaagtgttgcacactttcaagaccaaaaaaaaaaaaaaaaaaaaaaaaaaaaaaaaaaaaaaaaaa

SEQ ID NO: 713 - DNA, 727 bp, Macaca Fascicularis
  misc_feature (1)...(727): n = A,T,C or G
agggtagaagagcagaggatggcnctgtcattgactatgaactgattgaccaagnnnnnnnnnnnnnnnnnnnnnnnggagtgaagaggaaannnnnnnnnnnnnccaannnnnnnnnnnnnnnnnnnnnnnnnnnnnnnnnnnnnnnnnnnnnnnnnnnnnnnnnnnnnnnnnnnnnnnnnnnnnnnnnnnnnnnnnnnnnnnnnnnnnnnnnnnnnnnnnnnnnnnnnnnnnnnnnnnnnnnnnnnnnnnnnnnnnnnnnnnnnaacaaacccnnnnnnnnnnnnnnnnnnnnnnnnnnnnnnnnnnnnnnnnnnnnnnnnnnnnnnnnnnnnnnnnnnnnnnnnnnnnnnnnnnnnnnnnnnnnnnnnnnnnnnnnnnttaggtctgaattcaagagaaagtacggcaagtccctgtactattacatccagcaagacnnnnnnnnnnnnnnnnnnnnnnnnnnnnnnnnnnnnnnnnnnngagacgactgaagcccgacacannnnnnnnnnnnnnnnnnnnnnnnnnnnnnnnnnnnnnnnnnnnnnnntagaaaannnnnnnnnnnnnnnnnnnnnnnnnnnnnnnnnnnnnnnnnnnnnnnnnnnnnnnnnnnnagnnnnnnnnnnnnnnnnnnnnnntnnnnnnnnnnnnnnnnnnnnnnnnnnnnnnnnnaacattccaaggagctggaagtgaagtccatgatgtgaaacactttgcc

SEQ ID NO: 714 - DNA, 323 bp, Macaca Fascicularis
gaagcagggagcacgggcggacgccgggcgcacggccatcgccatcttgcagcgcccgcatcctgggccggcccgggccgctccgcggagcctctctatccctcgacccggctgcaaaggcagagcccgcgcgcttgatccccgggccaaagctggagcgttctctggcggcctccaagggcaccggtgtccagaagcccggccggggccagagcccttttgctgtaatctccgcgattgccgggacaaaattcccttccagtggggaaaagggaaggcggtcgcgcccttacaggtgccctgagtggggaggtgaaaccctg

SEQ ID NO: 715 - DNA, 499 bp, Macaca Fascicularis
  misc_feature (1)...(499): n = A,T,C or G
gacagacctgttcctcaccccctttttccaaagaggacggtgcacccacagttttactgtatcatattgggatctcagtcctgaagatggcccactctttgtaaataagttggattttcctcatgatgtgtgtgggttttttttttggcgggggagaggaacggggcagggttccactctgtcatctgccannnnnnnnnnnnnnnnnnnnnnnnnnnnnnnnnnnnnnnnnnnnnnnnnnnnnnnnnnnnnnnnnnnnnnnnnnnnnnnnnnnnnnnnnnnnnnnnnnnnnnnnnnnnnnnnnnnnnnnnnnnnnnnnnnnnnnnnnnnnnnnnnnnntcaaaatgttgggattacaggcatgagccactgcactgggcctttatttttatttttaaccttttgacaagacacgctttctattagagctactttttgtccactggttcggtgtcgtgaggtagaaaggaggggtcccccattcctcagttaaaatgtg

SEQ ID NO: 716 - DNA, 2384 bp, Macaca Fascicularis
agtgagtcatgcttcaggtttgccagggcctgtgtcccgcagaaaggcgagcccttgttcccagcggaagcccaccccggctcgcggcggctttccggtgcgccctgggcggcgtaggtccaaaggaatattgtgaggattgagatgacaggagcgtgtatgtcccagagagttgctcaataaatatatgttgccttccactgtgaagagctgtaaagatgtctgacaagaaccagatagctgccagagcctcccttattgagcaactgttgtccaaaaggaattttgaggatcttggcaaccaccttactgagctagaaacaatttatgtgactaaggaacatctccaggagacagatgtggtgagagctgtatacagagtcctcaaaaactgcccctctgtggctttgaaaaacaaagccaagtgcttgctatcaaagtggaaagctgtttataaagagactcactccaaagcgaggaacagccctaaattatttcctgtgaggggtaatgaagaaaattcaggaccttctcatgacccaagtcaggatgagacactgggcatctgcagctcaaattctctatcttcccaagatgttgcaaaactcagtgaaatgattgtgcctgaaaatagagccattcaattgaaacctaagaaagagcattttggggatggtggccctgaatccactggtaagagattgagtgagttgctggatcccataacacccatgagaactaaatgcatagagcttctttacgcagctttaactagttcttctgcagatcaacccaaagctgatttgtggcaaaactttgcaagagaaattgaagagcatgtttttaccctttattcaaagaatatcaaaaaatataaaacttgcatcagaagcaaagttgccaatttgaagaaccccaaaaattctcacttacaacaaaacttgctctctggtaccatgtctccacgagaatttgctgaaatgactgtcatggagatggcaaacaaggaactgaagcagttgagagcctcctacacagaatcttgtatccaggaacattaccttccccaagtaattgatggcacacagacaaataaaataaaatgcagacgctgtgagaaatacaattgcaaagtcactgtaattgacagaggaacacttttccttcccagctgggtgcggaattcaaacccagatgaacaaatgatgacttatgtaatttgtaacgaatgtggggagcagtggtaccacagcaagtgggtgtgcttttaactgtaatgagtgttctcttaacagataacctgagtgattgataccttttatttgtacaacccttctgtgcttttaaaaatcttgtacacactactctctaaaacagaagaaggaggaaagaaagtcgttcctgaagctgacaccaccatccctaaaagttacagtttggggagagggagtggatgactatttgtattgtgccttgtggccatttaataccttaccgtagacagagtgtgggtgagaacagcccagcataaactgggagcctgtgggaaatgcatcccaggcctcacaccattgaatccgaatctgcattttagcaggatccccaggtaatcttccaggatgggatagtttgagaagaactgctttagcagtaggtctgtgactctcagcagtggctgcatattagagtcatctgggaagctttgaaaacccactggtgctgagaccccaccctagaacaattcagttggaacctacgagatgggactcaggcatcaacatttcttttttcattcctcaagttattttaagatgaggtcagagttgagaactactcagaaatgtattcctggaggttggggatgaaatgaagaatgtgtttagactccaacactgggtgactagatcttcattcttttcccctctcttttcccatttacaggtctcccttcaaccacaaaagtcaccctggaactcatcccacagttagaattttgtttggaaccctcttgcttagttgaaggagttgttttttttttgttgttgttgttgtttttgtttgtttgttttccctgtgaacaggttttcggggatatataaactctaggatgtttagtttctgatgtcaggagtcttcatgttctcaaggacaagtgtccttgagatggacattaatggtcattagtctgtcagaggaagcccatcaccttagcctttgaatgtagaaacaggcaggcatttatctaataaatgaattgaagactaaattacctctttgaggcctttgcaaacagtgtttaaccagtttacataattgtttgaatacaacaagccttctatgtgaaaaaaaaaaaaaaaaaaaaaaaaaaaaaaaaaaaggccaca

SEQ ID NO: 717 - DNA, 749 bp, Macaca Fascicularis
  misc_feature (1)...(749): n = A,T,C or G
agaatttaaataggcatgaactatagtgagaacttttagtaaacatgctacctactctaaaatcaaccattttattttcttaaagaatataggttgcctaaaaacacttttatctctaaatataggttagctgttaattatttcatgatttttttttttttttcctccaatgtaactttttttggtgcagattcatggttcctaagttctgtattcaagtttttggaaatgtttatttaaaaactgttctatacaagtgttcaaaacattgtatctaaagagagtggcctggacttaaaatatttnnnnnnnnnnnnnnnnnnnnntttaattttttttttaagtttcttactgccacatatggtgtgaaatgacagtaagttgcttaatgacatactgcagtatctgcttgctgttggagactcagatgagatgttgaaattgttcctgtgcttggtaactattctctgccaggctataggaaagaggatgtaattgttaatacacacnnnnnnnnnnnnnnnnnnnnnnnnnnnngtagtaatttgtttttttcatttgttcccactgcctttgtgtacatnnnnnnnnnnnnnnnnnnnnnnnnnnnnnnnnnnnnnnagatgttccctaatttattaaatatgcctttattcacaatttgtttttttannnnnnnnnnnnnnnnnnatagaattaactatgactttgtttatttttattacagtatgtagttattgacatattgt

SEQ ID NO: 718 - DNA, 2471 bp, Macaca Fascicularis
agtgctaacaccacgggaatgaagtgcgagcagctagacctctggcctccacccgaaatgggcctcctgcctccggactgactcccgggccatcttcccgcttcctctggcaccgaaggcccacagggtccagctttttaatgggccctttatctgctacagaccgcctcagcgaaccggaatcaaatctgggcgcttgcgaggatgaaggccaaagtctagatcccgacgtaagcccagtaggaagcggcacggtccagacacccgaggccgggtgacctgtctgtactccgagccacgcggcgcgtcgctgggctgaaatcccaccttgcatccaccgcgcggaattccaaacagccagtataaacaatcccctcaccccaccacacccgggaaggtggtgggacccaggcttcggtgcaagtttccagaattgtccctcagggtcccggcggcaaggcctgcacccacctctcgcccggactttcgtttacagccgcgccctccaaaggaaggtttatgaccacagcgcggcagaactgagtcgggtgggcaccatacatggccgtggcgcctgaggccccagctcgctgcctcgggagcgctcgcagggccccatccctctggtgcgctgggctctggagctagaaagtgtacacagaccataaatttcccgccctgctcggcgcagttctccgaggtcaggggccgcccgcctccaaccgcctcagcccgcctaccccttaacttgcgtccgggtaactgcggccgacagcaaaacgcagctggcgcccgctgcagcgcctacccatactgcaacgccgcctccccactgctagagcaccctagccgcgttgggactccgggcgcagcctgcgggaggctccccaccgctgcctacgaggcgggagttggggaatggagcaaagagggaagaaggcgaggcctggggtaggccagagaatcgcctcagactggtagctcggagattggagtaagaaaggcagatttctgtcagagggtggtcatctggaaccaagccaggggagtccagttactcttaaaattctgaacggaatcttgaaaggtaccaggaggaaaggaaagccagggcacaacgagcagagaggaaaaaatgaaaagtgagaaatggtgaggacatacaaagcaagggagcgtgaagaacaatggatatgggaaaattcaaattacagctgcaaaactgtgctattggcctggaagggtggtcagcacaggctgcagggaccctgacagaggcaagaaaagggagacctggcttagatcgctgcagctgacccaaagtgtcctcaaagagacatatcctgggcgctcccgaccggcaaccgactgacgtagagatccgcttgcgggaggtcggggccaaggggcccgggctgaccatggactgaatgaatattcggcgggcaggttggggatccgagaccgcgcaagacccaggaccttcctctgctacacccaaagccattgcgaacggggcgagaccctgtgacccccgaagataggaggctttggagcgagatatgcgccctcgaccaggagagccaggctgcgtcgagtctcagggacacgtctttggagggcgtgcgcggcccgcgattcgccacgcagtgaaattcaaaaatggccggattgcgctgaagaatgcaagtcggaactgccagatagaggatcgtattagctcagtagttcattcttttgatctttcgttcacttgctcatttcttgagcttctaccacgtgttgggtgcactcgtcacccggattctgagaaacaaaaatgaacagccgtgacaaattaaaacgaagctaaaatttgcagactgggaaatctctggtcgaggagagtggggattgagggtggctagggaactccgcgacacaggcactttttctccgcaaagagaggcggcgaggtgcagacgcactgagaccaactcgcctagcattctcactcgctctgcggtgctcttccgtgttccaagagagactcgggtagatcttagcgctccgcaccgccgcctaagtgagggactggagaaagcacagaaagctttggacttctgtcctggttcttgacgtagaccactagggaagtgaccttgagtgagtcattcaacctctctacgagttcgttccacctacaacaatgcccaaatggtacgcagtccaaagtttcggccgcctgtatcgagtcttgcttgtgaacgcgttctcttgtccctctgtgatgaccttagtattggggatcctaatgcgtcctcaaccagatgattcgcagctctaggtccactcctggggttaccacctggtacttctgggtcgtgttgcacagcctcctactgtgtttataatgctacctacgcttattgatgctataaataaccacaagggcaaaaaaaaaaaaaaaaaaaaaaaaaaaaaaaaaaaaa

SEQ ID NO: 719 - DNA, 709 bp, Macaca Fascicularis
  misc_feature (1)...(709): n = A,T,C or G
acggtgagaaacgccgnnnnncccatctgcnnnatttcaccagnntctgctcagcaaggcacagagagggtccagggaggcgggtgggagaagtaaggggggcatttagtcaagccagaggagccagacatagccctgtcttctggcagttcagggcccaaggcgagaccattctgaatgggcggtgatgacccnnnnnnnnnnnnnnntgatgggggaagcccaggggaggtnnnnnnnnnnnnnnngggccctccatctgaaaaaagtgcaaactaagctgggatctgaacaagttcaggctaaaggagggagagggagttccaggcagagggatnnnnnnnnnnnnngcagggcaagagagctgaagagcgcagcacaccaggaagggaagaaacttgagtctggatatgagggaggaggagggggccacagttagaagtttgaccttcaggccgagcacgnnnnnnnnnnnnnnnnnnnnnnnnnnnnnnnnnnnnnnnnnnnnnnnnnnnnnnnnnnnnnnnnnnnnnnnnnnnnnnnnnnnnnnnnnnnnnnnnnnnnnnnnnnnnnnnnnnnnnnnnnnnnnnnnnnnnnnnnnnnnnnnnnnnnnnnnncagctactcaggaagctgaggcaggagaatcacttgaacccagaaggcagaggttgcaatgggccgaaatcgtgccactgtagtccaaccta

SEQ ID NO: 720 - DNA, 708 bp, Macaca Fascicularis
  misc_feature (1)...(708): n = A,T,C or G
ttcagaagttactagtagaaatgtacacaggagtcactggagaccntattaaaatgcagnnctgattcagtgagctggggtggggcctgagagtctgcatttctcccaggctcccccggtgctgccagtgatgctggtctgagtaacaagggggtggggaatgatatggagccatccattgttatcccatctgacaaatgagtcacagagccctaaggtaattgaggtgggatcagtctgattctgtaagctgtgttttcagccacaacatttattgcaaacttggagcaggtgattttgaagctctaacttgccgtagaggttgaatgagctctagagcaaggagtccgcaaccctggtactggtccatggcctgttctgaaccaggccgcacagcaggagttgaaaggtgggcgnnnnnnnnnnnnnnnatctgtatttacagccactccccactgctcacattaccacctgagttctgccttctgtcagatcagtggtggcgttagatgctcataggagcgcaaaccctattgtgaactgcacatgcgagggatctaggttgtgcactccttatgagaatctaatgcctgatgatctgtcactgtctcccgtcacccctggctgggaccatctagttgctggaaaacaaactcagggctcctactgattctacattatggcgagttgtataactatttcattata

SEQ ID NO: 721 - DNA, 660 bp, Macaca Fascicularis
  misc_feature (1)...(660): n = A,T,C or G
gagggaggaggaagagatnnagcccgcagaagnngtccccagccctgcctnnnntngcccagcgggcagaggcgggggagcgcctcaatactttgcaaatgccgaccccgtggcctgctgcccctcacagtggccatacgggcacaggagaccttttgtgggacttcagccctggcaggacccagggcctccagacgtgtgggtggcacatgccttggggacatcctgccttcaggaccgtggggcctggtcagtctgtccatcctcggcaaggacacaacactgccgcagagggtggggccactgcaagctcgagaccttgcttggtgacatgtgccactttggccaccacccacagtctgtcaccaggtggcttgggaacttctggaaccacagcaggcatcacggtgcgaagtgagatgcccgcgccagccccgagcccaccagcggccactgccattccgcccatggtccctcaccctgccctgccgacgagcttgtctctgcagcccaggtacccgcttcctggacgctgctggccccaggagatagctttctggtaacagctgtggaacgggtcagcaggacaaactggacacccggagtcacagtgtgtacacggcagtcccgccacccagccccttgtaaactctagtcgct

SEQ ID NO: 722 - DNA, 721 bp, Macaca Fascicularis
  misc_feature (1)...(721): n = A,T,C or G
agcggagactgnnncgganngaggaagatctccgtgggatcgtgcnngattcggccattcttccnnnctggagggaacgggactgcgggatgctctggtcgagcgaccgtcgtggctcccgcgcggccccgcccgaggcccccaacttcgagggcgttgaccccggcgcccccgttaacccgcgggctcgccggccgccagcaggagcctgtcgccaatatgacaccctcctctcctcgcccgccacgggttctttcagcccagatgccggcggcctcggctgtgagtgtacagagggcagtcacgggaggagaataaaactaaaaggaccgtcaaaagtcaaggcttccattcctaaataatattaaggagagagagagaaaacagtcactgggcgacagggattttctgtagcatattaaagacgaataagtgaggaaaataaaacgttagatgacgaagtaacttcccagaaatttaggacaacaacctaccaacgtgtaaaaccaatgtcacattctggataccaagaacataaatatttttcgaannnnnnnnnnnnnnnnnnnnnnnnnctcttagcttgaaaaattggttcctcaaagaggccgtaagttctgtgtgtcgaagctaaagtaccgtgcagaccagctccatcagccatgtcaaatgaagactttggaaatagatttgttacagaagaaaatatgaaggtgtctgt

SEQ ID NO: 723 - DNA, 716 bp, Macaca Fascicularis
  misc_feature (1)...(716): n = A,T,C or G
ctgctaaggaaatgacgtcagtggttnncnnagagaaatgccccaaaccccgggacactagctgtcaggaaggcagcccttcctcaaccagaaannnnnnnnnnnnnnctctcagcaatctggccccaggagcccccttccctctctggggctctccctctccttctgggccctgccatggagccccagggccggggcagctcctctctgcccagggaaggcaccgtcctcaaagacaaggctctgcagggcagtggccttccctgagctgaggggtggcctgcgcaggacacttcttgcccttactcaaaaatgaaatcaccagtttccagannnnnnnnnnnnnnnnnnnnnnntgttttcagttgtttacctcttcttactttctcccctgcctgggtgggataggccagtggcattcacccttgaggtccctcgaagccctggcccccgggcccgcccacacctctggcttcctctgtgnnnnnnnnnnnnnnnnnnnnnnnnnnnnnnnnnnnnggggtgggctgggtggggtgggggtgagggcccagagctggcccnnnnnnnnnnnnnnnnnnnnnnnnnnnnnnnnncctttctggtctccattctctctgtagatatgtagatctctttgaaacgaagtaaacacccatccctcccagctcactcttctccaccgtggggacctgctgggggagccgctggctccc

SEQ ID NO: 724 - DNA, 1664 bp, Macaca Fascicularis
tgaaagcaggtgcctccaggaaggcactcccatggtaccgcaactggtgggtgcctcctatatgacttgttaggtattttgatatcctctgcttcccaaaatggattccatgacatcaggctgacaagtgaagaaaaccaatatgtagtgagtacttaacctatactctctcatccagtcttcaaaaccaccacaaattgaggtactcttattccacctgacaggtgaagtggagggagatttaaaaggttgctaaaggtactccagagggtaggcaaaggagggttgaagcccaagtccatctggctcccagtcttgaactctctcccctcccttattgtctctcaagcagcaggcggtggtcctgtgctagggttgcacctagcttgcctggccataaataatgaaccttcttccctttgtggatggcattctgtgttttaggagcagcccacacaagagaacaccctggtgtccaaaagccctagcagcagcagcatagggggccagagggatgagttggaggagggagccccttccgaggccatgctgcgactcctacaaagtgctttcagtaaaaactcgccgccaaagcaatcaccaaagaagtccccaagtgcaaagctcaacatcccttatgaaaacttctatgaagccctggaaaagctgaacaaaccttcccagcttaaagactctgaagacagtctctataatgactatgttgatgttttttataacactaaaccttacaagcacagagatgaccggctgcttcaagctctggtggacattctgaatgaggaaaattaaaacaagtgtgtggtcccaattcggaaatattcatgcttcttccttaccctgaaattttgcctgtgtctgaagtggttgttttgtcatgaattcttatgcttataatatcctttgtggtaccttttctttttctccctaaattgtacatgtgaaggggatgagctcaagcaggaagttcaacttccagaattgatcacaggtatttcaaaacacatctttcctgtctgcacaagtgaagtgttttgttctttctggagtcacagttgacaaaaagctcttacactacattagaactgatgtccctccctgcgcatcctgcacattcgcccacaaccacttcccaccgaaacccagatatgttatagtctaaggcttttagaggattaaggaaaggagttggaggtgggttttacttagttcacagaaaagctttctttgggatttttcctcccccttagggcttttaagtctaggtgaagtgaaagttcacgtatgtgtttgtttggttcctctgtaattagctactagtttttatccctagaccttctctgctccaatgtcttgtccatgtgtcctgaccctgtgtccttgaattcccactttgctttgggatttaagttattgtatgttgtcaacaatatttaaagatgaaaaagttctgaaggaaacttatcaggttctttcctttggctttttttttctttcgaggtactgtaaattgttaactagggatgccaagcaggcttggttcaatggctaaacctcttattgtattacagtgtaatgctgatctcagcctggtctcaacgccagagcacacagagacttgaataaaactgttataacgattaaaa

SEQ ID NO: 725 - DNA, 1173 bp, Macaca Fascicularis
gctatgtcgcgctcaccgacttcatagggttccaaattctgtcttttttccccaagcttgccatggctagtcgaggggctcggcagcgcctgaagggcagcgggggcagcagtggggatacggcccccgctgcggacaagctgcgggagctgctgggcagccgagaggcgggcggtgcggagcacaggaccgagttatctgggaacaaagcaggacaagtctgggcacctgaaggatctactgctttcaagtgtctgctttcagcaaggttatgtgctgctctcctgagcaacatctctgactgtgatgaaacattcaactattgggagccaacacactacctcatctatggggaagggtttcagacttgggaatattccccagcatatgccattcgctcctatgcttacctattgcttcatgcctggccagctgcatttcatgcaagaattctacaaactaataagattcttgtgttttactttttgcgatgtcttctggctttcgtgagctgtatttgtgaactttacttttacaaggctgtgtgcaagaagtttgggttgcacgtgagtcgaatgatgctagccttcttggttctcagcactggcatgttttgctcatcatcagtttacccatcgcctttgatttgctggtcatgaaacacaggtggaagagtttctttcattggtcgctggtggccctcatactctttctggtgcctgtggtggtcattgacagctactattatgggaagttggtgattgcaccactcaacattgttttgtataatgtctttactcctcatggacctgatctttatgggacatggatggaactgaaagccattgtcttcagcaaactaagacagaaacagataaccaaacaccacgtttcacttatgaatgggagctgaacgatgagaacacatggacacacggaggggaacaacacatactggggcctgtggagggggacggagggagggagagcgggagagagcataggataatagctgatgcatgctgggcttaatatctaggtgattggttgatctgtgcagcacaccaccatggctcaagtttacctatgtaacaaacctgcacgtcctgcatgtgtaccccagaacttaaaataaaaaaagtttaaaaacaggaaaaaaaaaaaaaaaaaaaa

SEQ ID NO: 726 - DNA, 717 bp, Macaca Fascicularis
  misc_feature (1)...(717): n = A,T,C or G
agaccagagannnnnnnnnnnnnnnnnnnnnnnnnnnnnattttaagtggtggaaaaaatgatgagaatctcctccagatgacagctctggaannnnnnnnnnnnnnnnnnnnnnnnnnnnnnnnnnnnnnnnnnnntgagcggccaggaggccacctgctcggcaggcccgtcctctccgtgtgccagatacagcccagcatgacactgccctcagctcgaaaacaccacagttactctgtgtgcaggaaaaaaannnnnnnnnnnnnnnnnnnnnnnnnnnnnnnnntgtacgttcatactaagctgagacagggcaggttagaagatagggtgtggaagtattcacactgcagagatgaccatcnnnnnnnnnnngctaaggcccnnnnnnnnnnnnnnnnnnnnnnnnnnnnnnnaagaacggtgcactaaccacccccacgggcattttaaataaaacccaaagaaagaaagaggccannnnnnnnnnnnnnnnnnnnnnnnnnnnnnnnnnnnnnnnnnnnnnnngggcagatcacaaggtcaggagatggnnnnnnnnnnnnnnnnnnnnnnnnnnnnnnnnnnnnnnnnnnnnnnnnnnnnnnnnnnnnnnnnnnnnnnnnnnnnnnnnnnnnnnnnnnnnnnnnnnnnnnnnnnnnnnnnnnnnnnnnnnnnnnnnnnnnnnnnnnnnnnnnnnnnnnnnnngtagcg

SEQ ID NO: 727 - DNA, 701 bp, Macaca Fascicularis
  misc_feature (1)...(701): n = A,T,C or G
ctgctgccctnnncagcagcttctgtcctctttnnnnnnnnnnnnnnnnnnnnnnnnnnatccacatccagccgtgctgagcacacaacaggctgtgtgtggaaacggccaccacccttctccttccccacccccccgcgaaaagagaagctgtgtctttagacagccctgaggtgtctgtgttacagtcgctccgtgtttgacatttgtgtaaagtatgcatgcagtcttctactgtggcctaaaannnnnnnnnnnnnnnattagaaaccatgaaaaattagatgctgttttgtgagttttatacagtggtaaatatagaaccatgaattctggacacattccatttctatccaacnnnnnnnnnnnaaaaatgtttttcaatgtgttctttgttccactggatacttggagtcatgagtttgtgagctgatttggtcaccttcctctgcctttnnnnnnnnnnngttctgatgtcttagtgacttagttcgtagaagctcacgccctagtttgaaacattctccnnnnnnnnnnnnnnnnnattgtccgcatattcgtaagaattgagcgctatgggtgttaannnnnnnnnnnnnnnnnnnnnnnnnnnnnnnnnnaaaggagaagaggaacatcgtccaatgagtgtgttttgtatataacttcagatacttgtgaacatgccttatatttgtcca

SEQ ID NO: 728 - DNA, 550 bp, Macaca Fascicularis
  misc_feature (1)...(550): n = A,T,C or G
cgaaggtgcaaccttcttcggtcgtcccgaatccgggttcatccgacaccagccgcctccaccatgccgccgaagttcgaccccaacgagatcaaagtcgtatacctgaggtgcaccggaggtgaagtcggtgccacttctgcgctggcccccaagatcggccccctgggtctgtctccgaaaaaggttnnnnnnnnnnnnnnnnaggcaacgggtgactggaagggcctgaggattacagtgaaactgaccattcagaacagacaggcccagattgaggtggtgccttctgcctctgccctgatcatcaaagccctcaaggaaccaccaagagacagaaagaaacagaaaaacattaaacacagtgggaatatcacttttgannnnnnnnnnnnnnnnnnnngacagatgcggcaccgannnnnnnnnnnnnnnnnnnntggaaccattaaagagatcctggggactgcccagtctgtgggctgtaatgttgatggccgccaccctcatgacatcatagatgacatcaacagnnnnnnnnnnnnnnnnc

SEQ ID NO: 729 - DNA, 747 bp, Macaca Fascicularis
  misc_feature (1)...(747): n = A,T,C or G
tccaaatacagattacatccagctgcttagtgaaattgccaaggaacaaggttttaatataacatatttggatatannnnnnnnnnnnnnnnnnnnnnnnnnnnnnnnnnnnnnnnnnnnnnncannnnnnnnnnnnnnnnnnnnnnnnnnnnnnnnnnnnnnnnnnnnnnnnnnnnnnnnnnnnnnnnnnnnnnnnnnnnnnnnnnnntaaagataatagcagaaagaaagtaaatttggaacaacttaacaaatctttcagtagcacataaaaagttcccctttggccccttcccaagtaaaacttttaccatagtgtttgagtttatgtcttgtttctaaatctcttcatagagtccatcaatactccagatttaattatctcctcgtggttgttattaagctctttttaatggcttcaactttgtatcggcatattgtatttataaactttgtaccacaagacagagtgtagcacccattttacagtgccatgcnnnnnnnnnnnnnnnnnnnnnnnnnnnnnnnnnnnnnnnaaataaaaatgctagcaacagtctttnnnnnnnntgcttaagctctttgcacaaagctttataaagggaattcaaaggaagcccttttgaattagagtcttgagggacagcactaacaggcctttattaagtatgattgtcaaatttcagggaacatgattggtctgctctgtattnnnnnnnnnnnnnnnnnnnnnnnntatgatggga

SEQ ID NO: 730 - DNA, 919 bp, Macaca Fascicularis
  misc_feature (1)...(919): n = A,T,C or G
gcatgaattgaggaacagaagaagcagagcagatgatcggagcagcannngtttctccccaaatctagaaattttagttcatatgtacactagccagtgnngnngacaaccatttacttggtgtaaagaacttaatttcagtataaactgactctggnnnnnnnnnnnnnnnnnnngtcctgagttgtagccgctgtaattgtgaatattaactgagatagnnnnncatggtgtccggttttctattgcattttttcaagtggaaaagttaactaaatggttgacacacacaaattggtggagaaattgtgcatatgccaattttttgttaaaaccttttgttttgaactatactgctttgagatcnnnnnnnnnnnnnnnnnnnnnnnnnnnnnnnnnnnnnnnnnnnnnnnnnnntannnnnnnnnnnnnntgcattcttagggtttttccatccctggggtttgcaagttgttcacttaaaacattcttaaaatggttggcttcttgtctgcaagccagctgatatggtagcaaccaaagattccagtgtttgagcatatgaaagactctgcctgcttaattgtgctagaaataacagcatctaaagtgaagacttaagaaaaacttagtgactactagattatctttaggactctgcattaactctataatgttcttggtattaaaaagaaaaagcatatttgtcacagaaatttagttaacatcttacaactgaacatgtatgtatgttgcttagataaatgtaatcactgtaaacatctatatgatctgggattttgtttttattttgaaatgggagcttttttgtttacaagttcattaaaaactaaaaactgtttctgtaaggaaatgagattttttttaaacaacaaaaaatgccttgctgactcactat

SEQ ID NO: 731 - DNA, 459 bp, Macaca Fascicularis
cgtctcggagagccagcccccgcctgccgtcgcggggaagtgccgcctggcggggtcacggcgcctgaagcccacgtgcgccgccaagcccgaggtggcctcgagcgcggcggctgacagcagagtctgcctgtgctgcctcccgcgctcctccccgaggaaaggattttgatttcaaagaaaggaaggaaggacaactcccagcttccccgtcccgccctcacctctctgagggccgggccaggccatgcccaggaaggcggcggcggcgaaccagcagaagggactttcctggcctcccggagacgaggagcgcggacagtgagtttgctctgccgcggttcatggttcctgcaagccctctaggaggccgaaagctgcagcccctccccttgccccaaagagccttccgcgttctctggccctcgggcccaccccgcgccgcccgggctcccgccg

SEQ ID NO: 732 - DNA, 697 bp, Macaca Fascicularis
  misc_feature (1)...(697): n = A,T,C or G
ctgnnnngacatgtctttccgnttcttaagtagcannnnnnnnnnnnnnntggcagttccacctgnnnnnnnnnnnnnnnnnnattggaattttctctgcttcgctgccttggaaggggccgcattcccctttcctctnnnnnnnnnnnnnnnnnnnnnnnnnnnnnnnnnnncggaaagctgctgtttctcacgtttcagggagggggtgagcggagggagacctgtgtccgtgccgtccggctnnnnnnnnnnnnnnnnnnnnnnnnnnnnnngcccctgacaccacgcctctggccacaccagatgcctctgcggtcctaaaaaacctcttcagcgcccctcctgcggcgatgtcctttctcactgtccccagccggggccggggaccggtgtgtcactgaggacctgcattagaaacattttttaaattgttgtacaggaagagatgcgtctaaaacagcatctcaaagcgagtgtatttctttgcgcaaggggtcatgttgatgaattcttctttcattctgatctttgttcagccaacaggagcatccttttataatgtcttccattcctaccccctacccagaattaaaagaaatatttgtagcttgctatctgtatttgaatttttagcaattttatatttagatatctttgaaaaatgtaaatgactaatttggtcattaaatcttgt

SEQ ID NO: 733 - DNA, 726 bp, Macaca Fascicularis
  misc_feature (1)...(726): n = A,T,C or G
agtgtggagaaatgccattgaaaatttgacaatttgattctcactggtatgtttaaaaactgaataaaaggaatagaaattttcttttgataaaggatcacaaaacaattctaaaacctgtttttaccattgaaatttaaattgtgataataggttttaaatgtctagaatgcaactgataggcttttcttgaactgttgttttttaaagtagttttttcatgtttaatttgtatttgtaaaaaaacaaaaagcaaaaaaattcccaaaacttagacaacaaccagagcaaaactgttgtgccttctatttatctttgatttcagtcttggcaattgtttaaacaaaaataattaaaaaaaaatctagatttgttttattaggtccagagtatgtggggaattacagaatccctctttcatcactttgtgtatgtcttttgttaacgtgtttgttatgccttattctaaaattgagtnnnnnnnnnnnnnnnnnnnnnnnnnnnatgcttctatagaggttctttgacctaaatannnnnnnntttgtatttttattctggtatctaatcagattcctaatcatagcccgtaagaaggaatgttactttaatattggactttgctcatgtgctcgtgtccgcattttttttcttaaaatcatagccatatggtaaattttctattttgttatggttctttnnnnnnnnnnnatgcagtgggtgtta

SEQ ID NO: 734 - DNA, 757 bp, Macaca Fascicularis
  misc_feature (1)...(757): n = A,T,C or G
gcacgagtttcaccgagactgtgtggacccctggctgatgctccagcagannngnccnnnnnnnnnnnnnnnnnnnnnnnnnnnnnnnnnnnnnntcatccaggctggtctcaaactcctgggtnnnnnnnnnnnnnnnnnnnnnnnnnnnnnnnnnnnnnnnnnnnnnnnnnnnnnnnnnnnnnnnntgacannnnnnnnnnnnnnnnnnnaaggcatgaatggctatagaggggatatgggactggaaggcactggatccgtaacatcctcacgccttctggaaatgtgaaaaatgtttcacaaaagcacagcctaagacctcatgtgatgaggtgggctctccacaagnnnnnnnnnnnnnnnnnnnnncatggtctccaagggcccgccctctcaggcccaccttgaggccaccctgctgggccacttcccggattttggacagcattgattggagccgcccgttctcctcctgtaggacctggatgcggatgtcgttggcctgcacttgcctctccatgtgatctgtgacgttgccagagtctgtgggacatgttannnnnnnnnnnnnnnnnnnnnnnnnnnnnnnnntgcccaatgggacaggaccttagaagggaggcacaccagcttgggtgggtggcccggcaggcgcaagggagctgtgtagtgcaccaggcctcccagctcatcttccttctccagaggccttattcccccttccctctcccctcacctgctgggaagatgacca

SEQ ID NO: 735 - DNA, 740 bp, Macaca Fascicularis
  misc_feature (1)...(740): n = A,T,C or G
gtccttgtatattgagataaagagaggagtcacggaagatgacgggagacccatttnnnnnnnnnnnnnnnnnnnnnnnncttcaatttccaaaatggctacggattttgcagagaatgaactggatctgtttagaaaggctnnnnnnnnnattattgnnnnnnnnnnnnnnnnnnnnnnntccacaaacattnnnnnnnnnnnnnnnnaacttaaaggcaagaagatgaggaagaaggaagnnnnnnnnnnnnnnnnnnnnnnnnnnnnnnacaannnnnnnnnnnnnnnnnaaggggagttcaccctgcatggccgggnnnnnnnnnnnntggagcaatacatccgggagacgtaccccgacgcggtgaagatnnnnnnnnnnnnnnncagnnnnnnnnnnnnnnnnnnnnnnnnnnnnnnnnnnnnnnnnnnnnnnnnnnnnnnnnnngtggccaagtacttccagtcaaacgccgaaccgcgctgcccccactgcaacgactactggccccannnnnnnnnnnnnnnnnnnnnnnnnnnnnnnnnnnnnnnnnnnnnnnnctcaaaatcgaacaaaaagtccctgcggtccaggcagnnnnnnnnnnnnnnnnnnnnnnnngggactggctgccttgggtggcctgatcgccgcagcccttctnnnnnnnnnnnnnnnnnnnnnnnnnnnnnnnnnnnnnnnncctctttcttcttaatgtggactgtncacagct

SEQ ID NO: 736 - DNA, 718 bp, Macaca Fascicularis
atcaacagaattgggggcttacctgtgacctctccccattttccctcctgccttctccctggggatgggtgggtttctacttaaagacaagctcccagctctcagacagataatgtgtgagagcaaaacagaagtcacagtccgttggtacttaatcttgaaagtgacatcctaacacttttttttaagacaagggcgtgctctatcgcccaggttggagtagagtggagtagaatggctcactgcagcctcaaactgctgggctcaagcgatcctcctacctcagcctcctgagtcgctgggaccggaggcacacgctaccatgcctggctaactttaatgatttttggtagagatgaggtctcgctgtgttgcctaggttagtctcagactgctgggctcaagtgatcctcctgcctcggcctcccgaagtgctaggattaccggcatgagcctccgcatccagccccatcacttctgtaaattgcagtcaaggggcaatttacccagaagtaggaaccactggaggcaccattatagcagctgtcttcttcaggaggagattatgactctgtcctacaaaatgacatatgcatgtgttttttgacccagcaattccatttctagtagtctaagccaaagagataacactggcaaaaataaagatgtagtacaagactagtcattatagcatactttgtaaatagcaaaagcctgg

SEQ ID NO: 737 - DNA, 1099 bp, Macaca Fascicularis
  misc_feature (1)...(1099): n = A,T,C or G
tcccactgtcacctaaccaggcttgggccctgcgnnncttgggcacnnnnnnnnnnnnnnngaagcagattcctcctgaagcccattctccatggggcgacaaggacacctattctgcccttgtccttccatcgctgccccgtaaagcctcacatgtctcagtttagaatcaggtcccttctcctcagatgaagaggagggtctctgcttctttttctctatctcctcctcagactcaaccaggcccagcagtccccacaagaccattaccctatatcccttctcctccctagtcatgtggccataggcctnnngatggctcacgaaggccatcgcaaggattccccagctatgggagaggaagcacagcacccactgacccctgcaacccctctctttctcccctgagtcctgactggggccacatgcagcctgacttctttgtgcctgttgctgtccctgcagtcttcagagggcagccgnnnnnnnnnnnnnnnggaaggaggctgttccggaatagcccttgtggtaagggccaggagggtccttccatcctccaaggctctgctaaagggcacagcagccaggaggtcccctgagcccccagctgaaggacaggctgctccctctgtctctaccaggaattgccttgtcctgtggaaggcactgacccatcccaaactaatcttggaatccctgtctaaccactcactgtcatgaatgtgtgcttaaaggatgaggttgagtcataccaaatagtgatttttgtagttcaaaatggtgaaattagcaattcaacatgattcaacctaatcaatggataccaactgtttcccacacaagtctcctgttctcttaagcttactcagtgacagcctttcactctccacaaatacattaaagatatgaccgtcaccaagcctcctaggatgacaccagacctgagagtctgaagaccggtatccccctgccagctgtgtgaccttcatgaagtcgccaaacctttctgagccacagccgtggccagtaagacctgcctttgagttggtacgatgttcaagtcagataataaaacaccgttacacctatagagcagaga

SEQ ID NO: 738 - DNA, 652 bp, Macaca Fascicularis
aacagagtgagaccttgtctcaaaaaatatataataaaaataaataaacaaatgtttttaaaaattattactaaactgaagacaatacctgtgattaaagtataatcagtattccattatatatactaagcatttcttagtatataaaatatcaatagattctcttgcatgatggcttttatgttaccatcttttttatggccatattgcttggacatcagatccgcatgtagcaagattcagaagctagcactaagtctatcagtcttctttcctaataaatatacctaatgatacatttctgtatcactcccagttttatatcactaatatcaattctgacccaataactatcctttcttgggcattttggagttctttataataattctaagtaaattactaaaatgtatcatatgaactataaagtttttattttgaggcatattataaaagtacagttatatacagttcttttgaagaggttgagagaatgtggtgtcagctgatactgttcattagtaaatgcattttcatatggctttgcatgatgattaaagattattaacctgctggatataataaggtgccttttgctttaaggatagcatatttacattctttagaaggaagaaaataatccatactgagt

SEQ ID NO: 739 - DNA, 158 bp, Macaca Fascicularis
ggggggacatagagccctctaaaacagtgtgctgggggggagagagcagagacgtgacgcgcccctctaaaatcttcttttgagatgcgctttgcgcacccctcacaaggggaaaaagagtcctctcatatgggggagcccctttttttttcttagag

SEQ ID NO: 740 - DNA, 716 bp, Macaca Fascicularis
  misc_feature (1)...(716): n = A,T,C or G
cttaccaacagatgtcnnngnnnncnggttctcccgaagcctatnnatggtttatagattaagaattgacgaggtagcnnnnnnnnnnnnnnnnnnnnnnnnnnnnnnnnnnnnnnnnnnnnnnnnnnnnnnnnnnnnnnnnnnnnnnnnnnnnnnnnnnnnnnnnnnnnnnnnnnnnnnnnnnnnnnnnnnnnnnnnnnnnnnnnnnnnnnnnnnnnnnnnnnnnnnnnnnnnnnnnnnnnnnnnnnnnnnnnnnnnnnnnnnnnnnnnnnnnnnnnnnnnnnnnnnnnnnnnnnnnnnnnnnnnnnnnnnnnnnnnnngcactccaacctgggcaacagagcgagactccgtctcaaaagggaaaaaaaaaattgctgatgtgacccatgaagggaagtcattttcctcgtaatttctggactgccacacataggtatctttagttcttcgaaggcccacatttttatcatttaagacctatttgttactaagtagagctttatcttcaatgtctccatgaagccttctgtaaccacagtgactacaagtagttctttctctattgaattgtaggtccagaatagaagatgtcattgtatactttacttccctcacactgtgttacactctgatgtgctatgcttagctatctgccagagattagtaaattataaaactcatgtgtactacttaagtttgtatcttagctagtt

SEQ ID NO: 741 - DNA, 1024 bp, Macaca Fascicularis
  misc_feature (1)...(1024): n = A,T,C or G
caccccaccctcctccccgtcggtgagcggaggcctgtcctcccccagccagggtgtcggcgccgagctgatggggctgcaggtggactactggacagcagcacagcccgcggacaggaagagggacgccgagaagaaggacctgcctgtcaccaaaaacacgctcaagtgcactttccnnnnnnnnnnnnncagcaggctgcccagcagcggcgaggctgcggccacgcccaccatgtccatgaccgtggtcaccaaggagaagaacaagaaggtgatgnnnnngcccaagaaagcgaaggacaaagatgtggagtccaagagccagtgcatcgagggcatcagccggctcatctnnnnnnnnnnnnnnnnnnnnnnnnnnnnnnnngtcctcatcgacggggtggagtgcagcgacgtcaagttcttccagctggccgcgcagtggtcctcgcacgtgaagcacttcccnnnnnnnnnnnnnnnacactccaaggccaccttctagccccacccaccgagaggcccacctcccgccccacgctaggaggggcccagctgcatttctgttaacatttcagtttactacagagacagacccttaaaacacaaagagannnnnnnnnnnnnnnnnnnnnnnnnnnnnnnnnnnnnnnnnnnggggagctcctgccaggagcnnnnnnnnnnnnnnnnttattaaccccaacgttcggcccggggctgggaggccagaaggacggtnnnnnnnnnnnnnnnnnagaaggcgtgctctggtctcaggagccacccagagcctccgtgtcctgttcttccggaaagtcaggactctgcttcctcagggagcctggggcaggcggagctcagtggcctcaggccgaggggccatggggccgctcagtcccgttgggggtgtcctgagttaagcctggggggccgtcctgcccgcctgagagatgcccccagcaccgcacactcgtggttcccaataaactcctgcctgcggcggaggttttatagcagc

SEQ ID NO: 742 - DNA, 716 bp, Macaca Fascicularis
  misc_feature (1)...(716): n = A,T,C or G
cannnnntccngtgctccttccccactttggcgacttgaaggccaaggggaccgtacagtgagtgaataacttggcgcctnnnnnnnnnnnnnnnaaatcccagagaacaatgtaggacatgcgggtggaggtagagcaaaactagtgaaaagaatatatgaggaattcacaatcgccttgcctacttgggacaactccttcattcagttgtccgccctaggggactgttaggcttatttgtgtcacatgcgtctcttccctggaatcttatcatcacagaatattaaacatttgaaaaaattttaaagattaaacttgttcgaggtaaaaatggtaaacactgttagggattgcctggcgtgtacgaattaaggaaagaaagaaactgaaaattcagctcggctttgggaagtttagctttgcgatttaaaacccnnnnnnnnnnnnnnnnnnnnnnnnnnnnnnnnnnnnnnnnatgacaatactgaaannnnnnnnnnnnnnnnnnnnnnnnagagaaacgcctcaaaaattatttcaacgataggttgattatgattacaaaacatgatctgacatggacatttattatcattaaaagttatcagacagaatcctggaagctaatgatttgtaaatagaagttagtatatttatacatacatatattttannnnnnnnnnnnnnnnnnntgtgaannnnnnataagatatga

SEQ ID NO: 743 - DNA, 1914 bp, Macaca Fascicularis
  misc_feature (1)...(1914): n = A,T,C or G
ttgctaaacctggaaactctaatgagaagagcattggctcaggagtccagggtgtggactcttcactctctaaatccacccaggctgtgctgagggggcagccccccggcccactggatgagtccccctcattcacagcccactcagcttgaggtgttcctattgccagtcaaagccgcctccagaaaccccaaggggtctgccttgggtgtccccacccctgctatcagccctggtgcagacctagtctccatctcctgcagaggccccgtggcctccctgcctccccactcccaattccaacttcatccagaagctagagggtgttttccatcctgcagcctgcccgtgtcctcccctgcggaagcccttccacggcaccccctcttcattgccacactccccactggaactggaaaggctcagggtccggcttgtgtccccctctccagctgtgtcttaccactccttcccccatcctcctcggtgctgccacactgaacagctttcagttccctgaacaggttctttctcatctctgggctgttctctgtctggaaggctctcctgtgtgtctcgtttgtggagtgatggcgacacatccttcaagtctcagccttgcacatcctcattcccctcagtccagactgggaagtggtccctgacctgcaaatctagggtggagcctcctttcagccccaccacccccgccctccccctctgacagatgttctttctctgtgttatgaccgtccctgtctgtctcagctgccagactgagagcattttggagacaggtgctgtgtctcattgactcattcattcacccatcacgtaattgttaaacacttgttatattctaggcactgcactagttgctgaggatatataaatgaacaagtcatcacattcttgtggggaaggaatgtcttacactgaacagtttaacaaagagacagacaggacaggtggtgacaagtgctgagaagaaaaattaaggagggtgagggaatagagtggccaagagcctgggtttcaacagaaggagctggagaatgaacccaggggcgctggagctgggggcatgggagagtatcagagagctggcatgaactggcttattgtctggaggggagggctggttccgaagccagtcttatagcaattttttccatttggtgatagtgactttggaagagctaggggtggggaagatgaggagttgaatctcctctgagatacaactctctgaggggactgaggtggtcctgggttggggtgcgccctgctactggcaagagagaagcaaactcaatatggaggaaagcttcccttggttaggccaggagggtgcccagagtgagatcaggcaatgggcttcaataccaaacttaccaaatcacaagaaagtaagccactgagtgagagtcagcagaaaagaaggaagtaacagatttagaccccagggatggaatacagaatagccatacatgacatgtttaaagaaacacaagatgcaatcgcaaacttgagcatataaatgaacaggaatgaagagagagaaatatttggggggaaaaaaaggaacttcaagaaataaaatattatctcaagttggatatggtatnnnnnnnnnnnnnnnnnnnnnnnnnnnnnnnnnnnnnnnnnnnnnnnnnnnnnnnnnnnnnnnnnnnnnnnnnnnnnnnnnnnnnnnnnnnnnnnnnnnnnnnnnnnnnnnnnnnnnnnnnnnnnnnnnnnnnnnnnnnnnnnnnnnnnnnnnnnnnnnnnnnnnnnnnnnnnnnnnnnnnnnnnnnnnnnnnnnnnnnnnnnnnnnnnnnnnnnnnnnnnnnnnnnnnnnnnnnnnnnnnnnnnncagcagagactccctctcaaaaaaaaaaaaaaaaaaaaaaa

SEQ ID NO: 744 - DNA, 694 bp, Macaca Fascicularis
ctaagtagtatgtcaaccaaaccagattgtgagacaaggacatgcaatcctttaaattttactgtcttaaagccagagctacatttttggtctacaggacagacagcactattatgagttgatagacaaggggcaggatttggagttccactactgattgtcaaaaagactagaaggactcaaatgtgtccaaccctgcaattccgggtccataagtcattctataagcattttgattagccagtgcctgagctttccccatcaatcaaaaacttatttgctcaagtagctgaaaacatagttggcagcttaggaatttcctcatgctgtgtatgtggaggaactaatatggggggaccagtggccatgggaggcaaaggaattaatgtcacaagataacttcactttgcctaaccctgccagtgaaccaacagcctcagccagtgtttggttgttataaacctccataattggaaagtactgtattgcctggtggggaaaggctttcacagaggcagtaggagaaacaacttgcttagggcaacagtattattatgagactaaaaacaaaactctattggagaaatgctcagaacgactcctgcttaccagatggaaaccctttttcttgattctctactgtaagccacatttggaatcagctagaggcttcaaatgcttggaaagtaccctc

SEQ ID NO: 745 - DNA, 714 bp, Macaca Fascicularis
  misc_feature (1)...(714): n = A,T,C or G
agctgagagtcccgaacagaaatttaccnnnnnnnnttttaacagtaagctagtcattagcattgtttctatagattttaaattaactaaaagtatcccttatgggaaacgaagggatgggctgaattacaggaataggttgggctannnnnnnnnnnnnnnnnnnnnnnnnnnnggcacagatcactcgtgctattgtttgtggcttaagaatgcctttgagcggttttctgtcctgggcgggccaggtcaggtgttccttgctctcattccagtaaacccacaaccttccactatgggctttatggccatcatgaacatgttacagtgctgcagagattttnnnnnnnnnnnnnnnnngggccagtttatggccttactttgggaggcttcttcccaacacgtcccccttccttgatttgcaaattaataaaggcaaaggcagctttgtcacagtgagctacttcttgcaggagtcaagagccacnnnnnnnnnnnnnnnaaagacaaacaacacagattaaannnnnnnnnnnnnnnnaaatcacagagtttccaagtgtttttatccattttaatgggttactannnnnnnnnnnnnntgtaactgctttaagcactccagttccnnnnnnnnnnnnnnnnnnnnnnnnnnnnnnnntaaatatttgttctttgatgtttgcatatccaaagacaagtttgtagagtgcc

SEQ ID NO: 746 - DNA, 1926 bp, Macaca Fascicularis
  misc_feature (1)...(1926): n = A,T,C or G
ctgtaataatcgtcagttcagcactcgcaagaattattagaaactagtccacctaatagcttaaatctgctggttttttggagtttctttggatagccagcttcagacttgaattgaaacatcatccattgaggcttttacttggctaataactaatattagccaataataatattagccagtgtgatgataaggatggacaatatttattttgtgctttctatgccctaggcgtattaagagctttgctttgggacagatactgttatccccattttgacagtgaagaaactaaggcacagggaattttagtattgtaacttgtaccgtgcagggttacatagctaatataattaacacccaagcaggctgaaaaaaaaaaaactccacgctttttaactctgctgctctactactgcctttatctgtggctctttttagtttacaaagccctttcatttcatttatttcaacttcggagacctgagtgtgcttttgtgtacatatacattcattcatacaccattcattcaagttttctgctcttgattatacttaaggtttgtgtctgaacaaaaatccattgactattttaagataaatggagttcataagttttatgtgtgtgttataatttatattttgaattcctttatgtcctttcctgaaagttttgaaagtgttagtcttagcaacttatgtattactttaaaataaaaaattatatgttaaatgttttcacccctaaaacttattgagtggttattctgtgcttgaaatggttatacttaagctaatacctccttgacaaggaataaagttcaaaagcaaaatcacttagtaagaaatcagcagtttacacttatttatagcagagcttttttttttttgagactcccatctcaaaaaaaaaaaaaaaagaaaagaaaagaaaagaaaaaggcttccttggccaactaaacagttgggactcttgaagatgatagtgatgtagagaggctgaagattgccacctccactttgttttctgattttgaaaacgtgttcatagcagactgcttaaacaaggcagaaatggaagtcttttgcctctccagcccatcgtaaaatgtgtatctatctgattgtaggaagacctaactatagattttttgctcctttctgctttttgtctttaccatgttctctctgatgaaccttatattcatcttaagcttctgaccctactgggcattcctctttgttgcattatattctgcataatagcacttaccacgttgcattttgttaacgtcccctaagcacttatctctacccctctataggctaccctaaatcccctaaggtcataagctatatattatctttgagcctgttgcctagaacatagaaggtatggaataaatgtttagcgaatgtgagtaaattaaattgaaagtaaacaaataccaagatgtgaatgtactgtaactatacttatgcaaaataaaacataaacacagatatacattgtattggggcaatgattttcatgcaattttgtctatttttcaagataatcttattacacttttttgtgtgtgtgtgagnnnnnnnnnnnnnnnnnnnnnnnnnnnnnnnnnnnnnnnnnnnnnnnnnnnnnnnnnnnnnnnnnnnnnnnnnnnnnnnnnnnnnnnnnnnnnnnnnnnnnnnnnnnnnnnnnnnnnnnnnnnnnnnnnnnnnnnnnnnnnnnnnnnnnnnnnnnnnnnnnnnnnnnnnnnnnnnnnnnnnnnnnnnnnnnnnnnnnncaaactcctggcctcaggtgatccgcccacctcggccacctaaagtgctacgattacaggcatgagccaccacacccagccgccttattacattttaattaaaaaaaaaaaaaaaaaaaaaaaaaaaaaaaaggccaca

SEQ ID NO: 747 - DNA, 707 bp, Macaca Fascicularis
  misc_feature (1)...(707): n = A,T,C or G
gtggcatgatctcagctcactgcaacctccacctcccaggttcaagtaattctcctgcttcagcctcccaagtagctgggatgataggtgcnnnnnnnnnnnnnnnnnnnnnnnnnnnnnnnnnnnnnnnnnnnnnnnnnnnnnnnnnnnnnnnnnnnnnnnnnnnnnnnnnnnnnnnnnnnnnnnnnnnnnnnnnnnnnnnnnnnnnnnnnnnnnnnnnnnnnnnnnnactactgcgcccggccgatttggggcattttatattcaacagaacttttctaacctttcagctgcttcccacaaatatattggcctgtaggcttcttataatcccagttccaggctagaagtgaacttcctaaaattgnnnnnnnnnnnnnnnnnnnnnnnnnnnnnactcaagggcagtgagcaagataaatgtctaaagnnnnnnnnnnnnncatcgtccaaagtctccactgcctgggttttgttttggctggtttgaactcattttgggtgtatgcatttttctnnnnnnnnnnnnnnnnnnnnnnnnnnnnnggagggagggaaagagcccaggtaggatgtgggacatgcttgggggaannnnnnnnnnnnnnnnnnnnnnnnnnnnnnnnnnctgtgggcatagngtcnnnnnngtggggctttggggtagtgcccaagcctnnnnntattgccaggagtggtgacaagtg

SEQ ID NO: 748 - DNA, 745 bp, Macaca Fascicularis
  misc_feature (1)...(745): n = A,T,C or G
gtcttgaatttnnnnnnnnaaagtgatcctcctgttcttnnntctctcaaagtgctgggattatatgcatgatccaccattgtctctctaaccaatcctcacatttttttttgatatctatgtatgttctnnncttcnnntctctnccatgctggattgcattggcatnnnnnnnnnnnnnnnnnnnntcnnnnctcccatgttcaagatattctcctgcctcnnnctcccaagtatctnnnnnnnnnnnnnnnnnnnnnnnnnnnnnnnnnnnnnnnnnnnnnnnnnnnnnnnnnnnnnnnnnnnnnnnnnnnnnnnnnnnnnnnnnnnnnnnnnnnnnnnnnnnnnnnnnnnnnnnnnnnnnnnnnnnnnnnnnnnnnnnnnnnnnnnnntaccatacctgactgattctcacattctgaaatgacagttaagcccgggactcaagcagggagagaagccaatgacctggttttggtgagaaggttatgcatttgtttctgaacatgttgacgatgagactaagtcttatagtttcttgtgtacctcccttggtgcctagaagaaaggttaaaacaggacaaattccagaaggactatcttgagagaggagtcacctgggctcagaaggcccaggggcccttggtagcagcatgcaagggcagcagtggcttgcctcacttggttctcccgctctttcttctttcccttgtaaaggtaactgaagcttaangntnnnnntgac

SEQ ID NO: 749 - DNA, 659 bp, Macaca Fascicularis
  misc_feature (1)...(659): n = A,T,C or G
ctccccaccccctatcctctgcttccacgcctgcgactcagcccaggtgacccaaacggctgagtcaacttggcgcagtcggagcgtccccattgcgccggccgcccccagcccccttcgcccctcgcttggccccnnnnnnnnnnnnnnngccgcgcctgcagtcaggccggggatttggcgcagggatggggggaatattcgtcagatatttaaaacagagccgagagaacaaagcaggnnnnngtgcagcaaggcggcccgggagctgtgagnnnnnnnnnnnnnnnnnnnnnnnnnggccaggcgaatgcgcatgcgcgtggcgacctgcgagctcgggttccgggccggcttctactcaggacacatggctcaagataaaatgatacaccacttgagaacccaaattttcaatgactggaaagactaagacacttgggtcacgtaaaaatcaagacatttggaaaatacgccatcttcggatgctagaagaagatggaaccttttgataggcgtgggcttcttccggcttgtttatgctgggtgaccaggctctttcatttttgtgttcactgtcacttggaatttggaagacatgctggttgttgtcaaggacctggcttttgttttgggttgtgggctgnnctggatggtgt

SEQ ID NO: 750 - DNA, 757 bp, Macaca Fascicularis
  misc_feature (1)...(757): n = A,T,C or G
gggacatggttaaaatccaaacctgaggacacacattctaaaagaaatgagtctgagatgggaagaatattggatcctaagtatggtaattattctaaaaagaagaaagttgccactgccagcctgggcaacatagagagaccccacctctacaaaaaattnnnnnnnnnnnnnnnnnnnnnnnnnnnnnnnnnnnnnnnnnnnnnnnnnnnnnnnnnnnnnnnnnnnnnnnnnnnnnnnnnnnnnnnnnnnnnnnnnnnnnnnnnnnnnnnnnnnnnnnnnnnnnnnnnnnnnnnnnnnnagtcaaacaaagaaagctgcagctggtggagaatgctaactccaccctcatacaattagaatatatgnnnnnnnnnnnnntactaatagattgtgtattccaagagtgatttagagctacgaaggcatatcaagatttacttttttttaagatgactaaaattttcagagcaagcttgtgatcnnnnnnnnnnatttccacaagatggtgctatagcttctgctaagtacaaaactcacatttcctttaggaactagaaatacaaaatacgtttctaattgagaaccaaatctgcatgcgctctggnnnnnnnnnnnnnnnnnnnnnnnnnnnnnnnnnntcccggtggnnntggaggttgatttgggcctaaagggtgaagattgttccaggtaataataccttccaccacctccacacatacctgnnnttgntgtnnnnnncttcatgcagcct

SEQ ID NO: 751 - DNA, 560 bp, Macaca Fascicularis
ataatgacttagggtgttgtgagaatgtctgccacatttattggttatttctgttgaaatctgaaggaatcaatacatgtgaagattgagaaaggggaaaaggactgtctccgttacagatattctgtaatgcacagaaccttctaaacggaaatgttagtatcatttaaagcacatagtagaccttgagtatttgctgactagtttaacatacagaaaaaatcaaggatgaagcaccagttaagtgtttgaaccaaagaatcacagtcactgggctgcaccccagttccataaagcatgttaaacactcaaaagagcagagagcagggcccgtagacgcttctagtgcaggacacaggaattctaggcagtgggagaaaagggccctgattggtggctgagagtaaaaagaatacaccatttgaatagtgctgttctttttcctcactttatttaaaggtatataattcctagtagttaggacatctaaatagctccgtaaactggtcagaggcggaaggatcgcttgaggccacaagttttgagatcaacctgggtaa

SEQ ID NO: 752 - DNA, 732 bp, Macaca Fascicularis
  misc_feature (1)...(732): n = A,T,C or G
aaagatcaactcttccaattgagaaaacactcttggctttgaatggaaacttacagcagagagtaataggcaacaacaacaacgacaacaacaaacatttggaatattattctcaactcacggtttaataatagatcttattatttttctagtagagaaactacaaatcagcctcttcaacatttacatacagtttaataagcctcttgcaagttacttgttctctcacctgaggtattttttcctccccaccttacccctgtttctccattcctcttctccctttgcaagaggaaatatttaacatatttgggtctaacttcaattatgtaataattaatacatnnnnnnnnnnnnnnnnnntttctagaaaaacgtacaggctaaggcatagacaaaacaaagagaaatgctgagaaatttgccactggagacaagtaagctgaataaatatttgccaaaagttctttctgtgtcatatagtgtcaggatttgaaggagctatcttcttaatgttgcacctagcaactcatcttcagaagacacagccaggagaatgaagtagaagtgaaaggtttataaatccatttgtaagcatttatcccatacattttaaattcaagaacaattgtgtttatctttagaattttgtattcaatactttatgtactatgtgactcatgcttctggataaataaagcaccaaatatgtatcttaaccacaatcacaca

SEQ ID NO: 753 - DNA, 710 bp, Macaca Fascicularis
  misc_feature (1)...(710): n = A,T,C or G
aaagagtaaaaaatatannnanggaattncttcattctgtctaagtattaggagactctgttcctgctcctcaagctagaactagagggcttctcctggagttctctttgtctgtccctgnnnnnnnnnnnnnnnannnnnnnnnnnnnnnnnnnnnnnnnnnnnnnnnnaaagggggaaaaatagtaaaccatctgtctgatattaatgtgaattctcatcttattccccagtctgcctnnnnnnnnnnnnnnnnnnnnnnnnnnnnnnnnnnngattcagtggacaagacaaggtggtgtgtgcttattnnnnnnnnnnnnnnnnnnnnnnnnnnaatatattttgaaataaaagaaaaagttaaaacgtaagaaacaattgtacctctaatgtnnnnnnnnnnnnnnnntctttgattttatgcttcatgtttaagaatacatgcattagactgggcgtgnnnnnnnnnnnnnnnnnnnnnnnnnnnnnnnnnnnnnnnnnnnnnnnnnnnnnnnnnnnnnnnnnnnnnnnnnnnnnnnnnnnnnnnnnnnnnnnnnnnnnnnnnnnnnnnnnnnnnnnnnnnnnnnnnnnnnnnnnnnnnnnnnnnnnnnnnnnnnnnnnnnnnnnnnnnnnnnnnnnnnnnnnnnnnnnnnnnnnnnnnnnnnnggaggttgcggtgagccgagattgcgccattgcactccagc

SEQ ID NO: 754 - DNA, 1281 bp, Macaca Fascicularis
  misc_feature (1)...(1281): n = A,T,C or G
tgtgtgtgtgtgtgtgtgtatgtgtgtgtgtgatggtaaatgccagaatcatcccttggcttcccatgcatattgcatgggcacacagactcaaaccttctctcacacacatgcacatatacactgttagtccacacacaaggcataatccnnnnnnnnnnnnnnnnnncatacacgcacacattcccctcctaggccactgtattggtttcctagggcatcttataaggacaccagtggtatgaggagcccaccccactcatctgagcttatcaaccaattacattaggaaagactatttcctaataaggtcacattcagaagcactgagggttgggacttcaacacagctttttggggatcataattcaacccnnnnnnnnnnnnnnnnnnnnnnnnnctccagagcacaaatgtgtggagttaaaaggaagatacatgtggtatgaggggtgggaaggcaagggtaaaaggggagggaggggattgaactagacacacacagacacatgagcaggactttggggagtgtgttttatatcagatacctagaacagcacctgaaatatgggactcaaccattttagtccccttcttttataaatgtgtttgtgtgcacgtgtgctagatgttcttgctgtgttaggaggtgataaacatttgtccatgttatataggtggaaagggtccgactactaaattgtgaagacataatctctctgcatttattgagaatgtgaatatgaaacaagnnnnnnnnnnnntataaatgtttgctgttattagatattctgtctttgtgtccttttattcatgaattcttgcgcattataaagaaagagtccatgtgatcagtgtcttacccagtgtagggtaaatgcacctgatagcaataacttaagcacacctttataatgaccttgtatggcagatgcacctgaatgtgtgtttcgagctagaaaatctgggagtggccaatcggagattcgtttcttatctataataaacatctgagcccctggcctatcccatgaaacctaggctgtagagaggattgaggccttaagtnnnnnnnnnnnnnnnnnnnnnnnggtgtcggtcattagggaaaggggttaagtgaaaatgctgtataaactgcatgatgtttgcaggcagttgcggttttcctgcccagcctgccaccactgggccatggagatatgttgtccagcccaacactacagggccacttctatccaacccaccatctctggattcttccnnntgtannnagccctc

SEQ ID NO: 755 - DNA, 1889 bp, Macaca Fascicularis
tcgacatgccccactcgtgggtggaacagattgagatctccccggaagcatttgagacccgctgcccgaacgggaagaaggtgattcagtacaagagggcaaagctggagaagtgggccccgtacctcaacagcaacggccttgtgagccgcctcaccacctacgaggacctggagtgtaccaatattttggagataaaggagtggtaccagaaccgggaggacatgctggagctgaaacacataaacaagaccacagacctgaagatagactacttcaaacctggccactcccaggctctgcgcgtgcactcgtacaagtccatgcaacctgagatggaccgtgtcattgagttttatgaaacggcccgtgtggatggcctgataaagcgggaggagacagccaggacaatgacagagtactatcaaggacgcccagacttcctttcctaccgccacgccaacttccgaccccgagtcaagaagctcgctctgagcagtgcagagtcaaacccccggcccattgtgaaaatcacagagcagttcttccgcaacccagcgaagcccgcagaggaggacgtggcagagcgcgtgtttctgctggcggaggagcgcatccagctgcgctaccactgccgcgacgaccacatcacagcctccaagcgcgagttcctgcggcgcaccgaggtggacagcaaaggcaacaagatcatcatgacgcccgacatgtgcatcagcttcgaggtgctggagatcctgaagcttcgagaggaagaggaggcggcgcacacgctgaccatctccatctatgacaccaagcggaatgagaagagcaaggaatatcgggaggccatggagcgcgtgatgcatgaagagcacctgcggcaggtggagacccagctggactacctggccccattcctggcccagctcccgccaggagagaaactaacacgctggcaggcggtgcgcctcaaggatgagtgcctcagtgacttcaagcagcggctcatcaacaaggccaacctcatccaggcccgctttgagaaggagacccaggagctgcaaaagaagcagcagtggtaccaggagaaccaggtgacgctgacacctgaggatgaagacctgtacctgagttactgctctcaggccatgttccgcattcgcatcctggagcagcgcctcaatcgacacaaggaactggccccactgaagtacctggctctggaggaaaagctctacaaggacccacgcctgggggagctccagaaaatattcgcttgatgtctctcctggggcctcagccagaactgccagagaaaggaaacctcttccctggagcctggctcctgtgttccctctacccagccaatgcctgtttacacagacacctggcctcactgccagcccacctctcctacagccctgtttgttcctgcttctcttgattttcctgtaaatagacacactcttaattggccatttgtgcctcgcacttcacaagctccagcagcaggctttctcttcttaagttatctatagcctgggaccacctgcttcctccccttggccctgtcatttacttcctgtccttctctccgttggaatgtcaggtcttcacagcacctctgcagatggtcctgcagccatctgcaaacaactggttagatctcagtgtgactagggtggcccacctcaccaggtgggatggggaaagctaagatgcatgccccaggatttgagggctgaatcccagatcctcttcttaccagataccacttaccaatctgtagaatggggtagcattgttgcattaaataagacttatggccaaaaaaaaaaaaaaaaaaaaaaaaaaaaaaaaaaaaaaaaaaaaaaaaaaaaaaaaaa

SEQ ID NO: 756 - DNA, 3472 bp, Macaca Fascicularis
caaaagactgcaagatgaagatgccagtagtacccagcagaggcgccagatatttagggttaataaagatgcttcagggagatccacaaatagccatcaaagcagcactgagaatgagttgaagtactcggaaccacgaccctggagcagcacagattcagacagctctcttcgaaacctgaaacctgctgtaaccaaagcgagcagcttcagtggaatctcagtcctgacaagaggtgatagttctggaagcagcaaaagcataggcaggctttcaaaaacaggttctgagtcttctggtagtgtagggtcatctacaggctctctttctcacatccagcagcctcttccaggtacagctctcagccagtcttctcatggcgcacctgtcgtctatccaactgtcagcactcatagttctctttcctttgatggtggcctaaatgggcaagtcgcatctcctagcactagcttctttttgcttcccttggaagcggcaggcataccacctggcagtattctgatcaacccacaaacaggtcagcccttcataaacccagatgggagtccagttgtgtataatcctcctatgactcaacaaccagttagaccccaagtgcctggacctccacagccacctctgccagccccacctcaacaaccagcagctaatcacattttctcacagcctgttcgtcctctgcagtcctcttcacagcctgttcagtactctacagccccttacccatccccgctcctgccagtctcacccacccagcaatactccgtgcaggataaccttgggtctcagtttagtcacatgagtcttgctcgccagccatctactgatggttctgaccctcataccaccatgttccagtccactgtggttcttcagtctccacagcagtctggttatatcatgacagcagcccctccaccacatcctcctccaccgccaccaccaccacctcctcctcctcccctaccacctgggcagccagtccctactgctggatattctgcctctggtcatcctgtcagccagcctgtgctccagcagcagggatatattcagcagccatcaccacagatgccagcctgttattgcactccaggccactatcactccagccaacctcagtatcgcccagtcccttctgttcattacaattcacatctaaaccaaccactgccacaacctgcacagcagacaggttttcaagttatacccaaccagcagcaaaactaccaaggaatagttggagttcagcgaccccagagtcagagcctagtcagtggccaacccaacagcattggaaatcagattcaaggagtagtcatcccctatacttcagtgccaacatatcaggtttcactgcctcaaggttctcaaggaattccccatcagacttatcaacagcctgttatgttccctaatcagtctaatcaaggatctatgcccacaacgggaatgcctgtttactatagtgtcattccacctggtcaacaaaataatttaagctcttcagtaggttacctgcaacatccaggatcagaacaagtacggtttcctcgaaccacttcaccatgcaattcccagcagcttcaaggccaccaatgtacagctgggccaccaccgccacctggtggtgggatggtgatgatgcagctcagtgtaccaaacaatccacaatcttgtgcccactcacccccacagtggaaacaaaacaaatactactgtgatcaccagagaggacagaagtgtgtagagtttagcagtgtagacaatatcatccagcacagccctcaactcagtagccccattatttcaccagctcagtcgccagcaccagctcagctatccactctgaaaactgtacgtccttctggattacccactttccatcatgccccaattttctagaccttttgtccccgggcaaggagattccaggtatccattacttggccagccactgcagtacaaccctcctgctgttctgcacggacacattccaaaccaacagggtcagcctggcagcaggcatggaaaccgaggaaggagacaagctaaaaaagctgcatccaccgaccttggagcaggagaaacagttgttgggaaggtcttggaaattactgaactaccagatggaataactcgcatggaagctgaaaagctttttggggaactctttaaaattggcgccaagatccggtggctccgggacccccagtcgcaaccacgtcgtcacctcctctgctgtggcagcggggacaacactgtcaaccctgaacgctctaaacccagtgacttggcctccacctacaccgtcttagccacattcccctccatttcagctgcacagaatgcattgaagaaacaaattaactcagttaacaagcttaagctgagaacaagcaagaagcactatgactttcacattttggaaagggcaagttctcagtaacagccacctttggacccttcgcctttatggttcccctgccctctcccatctttgattggcttggtgtttggagcttctgttaacattatagagactcctaggatgtgtgttcatggcgttatagcttttgaagaaaggccagtgatccagcaaagggggaaaatatatgcatttcaccccacatgactgtaggaatccacgtcagaatgatacagagttagcaggtttttctaaggaaatgccgttcaaatgcctcctaacttttatagttattttgttttatatttctaaattcttgtatcagatccaaagctctattgtacagcaaattattcttcaaaatgattataaccagttgcaacctgtatttctttttgcagccagcacaatgtgacccaacttaaaatttgggggaaaaagaatgcaggagtgaaataaccaagtcaaaaccatgtactatctccttgggggttagggatgctaagaagagcccacaaatagaggattactcttcccccgaatctctctaaactcagaaacagttgccaaaaaatacataactcttccctgtaggaccctttccttattcatttaggtagtgtgaacattaagtataaaataaattatgttcttaatgcctcttaaaccacttacattcagaggggaacagaaatcattctaagcaggaaaatacttccatttttttttttttcaagtatttctctaataactaaatgccacttatttgcattcccctccttgtggattttttgtcacctaaggaaatgcatttgatgagtgctggaaacttcttaagtgctttacagtttgttttcattgtttgcagcggatcactggacatcaaagattcattgcacttatgaacaaggaaccttcttttcaatttctgtgtaatttgcaaggctgtacaatgtgtgctgatgcaagcctttttcagttcaagagaataaatgtttacaaaaaaaaaaaaaaaaaaaaaa

SEQ ID NO: 757 - DNA, 743 bp, Macaca Fascicularis
  misc_feature (1)...(743): n = A,T,C or G
agggcagaagactagannncagggcagcgagggacctgctcatcattttccaccccagctaagactgccatgtaaggttgtgcagggtgtgcactgcacaaagnnnnnnnnnnnnnnnnncactgttcacatcatagataaagctgatttgtgtatttattnnnnnnnnnnnnnnnnnnnntaggtaaagaggaaaaggatccttttcctaattcacacaaagattcctcgtggactggccgtgcccctgatgcagcctgtggcttggagtggccaaataggagggagactgtggtaggggccgggaggcaacactgctgtccacatgacctnnnnnnnnnnnnnnnctctgctccagcaactgcccttccaggtgggtgtgggacacccgggagaaggtctccaagggagggtgcagccctcttgcccgcacccctccctgcttgcacacttccccatcttcgatccttctaagctccgcctctggtggctcctcctaggaaaccagcttgtgggctgggaatgggggagagaagggaagagatccccaagaccccctaggggtggggtctgaactcccacctcccttcccacctactgcactttcccccttcccaccttccaaaacctgcttccttcagtttgtaaagtcggtgattatatttttgggggctttccttttattttttaaatgtaaaatttatttatattccgtatttaaagtgtaaaaaaaaaaaaccaca

SEQ ID NO: 758 - DNA, 518 bp, Macaca Fascicularis
  misc_feature (1)...(518): n = A,T,C or G
cccccgcaccaaagacaggggcagcatagtattcaaaccagtattgtgatggnnnnnnnnnnnnnnnnnnnnnnnnnnnnnnnnnnnnnnnnnnnnnnnnnnnnnnnnnnnnnnnnnnnnnnnnnnnnnnntgatttatataatgtataactatctctttatataaaactatatatatataactatatatatataactatatatatatatatatataactatatatatgtatcccctagtattggatcatgaagagctcttcatgcattctttgcaaaggaggttataaagttacgccctcagaacatttataactataagaatgtgccagttaaagtgctcaacaggaaatatgacagtttaaaagcattgtaaaactcacatagcttacttctctctctaaagtgcaacaaggatgaatagaatgggccaaggtatgacaattaatggttctgcatgacctagccactgctgggggttttcttctataacgttgtccttgtgaaaacttttggaaa

SEQ ID NO: 759 - DNA, 749 bp, Macaca Fascicularis
  misc_feature (1)...(749): n = A,T,C or G
aagcgggccgccgccaaatnngannnnnnnnnnnnnnnnnnnnnnntggaagaagggggtgaggaggatgggggcagcgatgggatgggnnnnnnacggcagcgntnnntgcagcnnnactnntcggagacatacgagcggtaccacacagagagcctacagaacatgagcaagcaggagctcatcaaggagnnnnnnnnnnnnnnnaagtgcctctcgcgcatggaggacgagaacaaccggctgcggctggagagcaagcggctgggcggcgacgacgcgcgtgtgcgggagctggagctggagctggaccggctgcgcgccgagaacctccagctgctgaccgagaacgaactgcaccggcagcaggagcgagcgccgctttccaagtttggagactagactgaaactttttgggggagggggcaaagggnnnnnnnnnnnnnnnnnnnnnnnnnnnnnnnnnnnnnnnnnnnnnnagacagtggacctttttatgacacataatcagaagnnnnnnnnnnnnnnnnntggttggtttcgtaaatttagctatatgtagcttgcgtgctttctcctgttcttttaattatgtgaaactgaagaattgcttttcttgttttcctttttagaagattttttccttaatgtgaaagtaatttgaccaagttataatgcatttttgtttttaacaaatcccctccttaaacggagctataaggtggccnnnnnnnnnacacaannnnnnc

SEQ ID NO: 760 - DNA, 1309 bp, Macaca Fascicularis
ttattgtttatgaagtttataattatctcattgggtgctcacaacaaccctatggtataggcaaggtcgttttttccacatccccttcgcagaagagaaatagaaattcagagacttgtcccctaaattttcataatagtcacggagcataaactagaacccacctctttattcctatccctattcccaacatttcgtgttgtctttcatgaaaaggtctcaagggccctgtgccaaggagtgactgttgagatttaactgctcctctggtaagagtaggaacttggtagacagaagcagttacctgatttttgtgctgatgtttttttagattctgaactcagatgttgggcctctgtggcagcggctgtatctcttctatcagtgccactccctacactggtcacagctacaggaaaggaaaatagaagatttattgcaaatacaaccaggagtaaggtggcctgatgctggtgattgcccctgagctaaaaggcaggaaaggacagccactactaggcacacagttgctgcagaagccagcgatgtgggaagctcaattcctgccaatccctgactcacccccacaggctcttgtaacccagcacttgagctgctacactatcatctttcagaaagcacccctggcagcaggatctgtggggcttgggcaatgttaggaggtttttcctcatcaaatttttttttgttcagtagcctatgctccaaagggcctaatgtccttattttgtctgccagctacacaaagcccccaccatggcacccagggaccctgaacatcgccatctctatcccaaaccaagtgtaggctctcccccagcaccccctctcttcctgtatggctggccatgcccggaggcgctccagccagagaccctggtgtcctcagtggctcccttgctccgtctcacctgctctcatgttcagtcaccaaagtcctgtcagtgccttgcagatgtctttttattctttcaagtatggaaataatccttttatttggaatatattattgtaaaatatttaagcaaatttatcccctccccaacccagggacacccatgattaacactttgctgtagaaggtccttcacactcacgaatttgttaatttgaatgtgtaaagatctctcttgtttgctttaaaggctgcttagtagtatttcactgaatgtaccataacttatgtaaccaatctgctttcagtggacatgacgttgtttccacctttgcactgtaataaacaatgcggcaacaaccaaaaaaaaaaaaaaaaaaaaaaaaaaaaaaa

SEQ ID NO: 761 - DNA, 709 bp, Macaca Fascicularis
  misc_feature (1)...(709): n = A,T,C or G
aaannnnnacagtgttcaagggtctgctgtggtacatcgtccccttggtcgtggtttactttgccgaatnnnncatcaaccagggactttttgaactcctctttttccggaacacttccctgagtcacgctcagcaataccgctgnnnnnnnnnnnnnnnnnnnnnnnnngtctttgcctcccgctcttctctccgctgctgtcacatccgtttcacctgggccctggccctgctgcagtccctcaacctggcattcctgcnnnnnnnnnnnnggttcggctttctgccaagcatctacttcgtcttcctgatcattctgtatgaggggctcctgggaggcgcagcctatgtgaacaccttccacaacatcgccctggagaccagtgatgagcaccgggagtttgcaatggcgaccacctgcnnnnnnnnnnnnnnnnnnnnnnnnctgtcggggctcctggctttgcctctgcacgacttcctctgccagctctcctgatactcaggatccttgggacgcaggtcacactcacccgtgggcagaggggcaggtcacatacccaggcccaccctagagcccctccacgaannnnnnnnnnnnnnnnnnnnnnnnngctgggagtagggaagggctgagaccttgttccccttgcnnnnnnnnnnnnnnnnnnntcccgctcagggagcttcttcctggcatcatgccct

SEQ ID NO: 762 - DNA, 745 bp, Macaca Fascicularis
  misc_feature (1)...(745): n = A,T,C or G
aggaaaataaaagctgacaccnnncaannnntnctttccaagagccctctaaatggggttgggtctcgctcttcatgagtatcctgggttgtggagaagcttagcgtatgctcttgtgttcagatcagggccacagggctgctctaagagtaaagtaattgtaactgaggtcagagctctgaggctggcagagatgagtggccatatatgggggtaaaagaagaaatcctgtcctcttggtgggaggttgccttacctgaagcccatctctcccaagcactatggttctgaggcatgtttttgggggtgaactctatcccctaggtccccagaagggcaaagaccagaaagttgacaagtctgttattaggagtaatccttagccatgtaatggggagaggagcagtcatcattcttccaatttgccccaccaccaccacctcgggcttcattttctctatttagagatggcagagagtggggtagtggcaagaaagctgactccattcatcagatccagtttatgggggttggggtgagcaaggactgtctgcagacatccccatcaagggctgctgaatgaagtgtcccttcccatcagtttgattcaattaaaatgcatcatttgacataaagcacttgttcacaggtctccaaaactgggaattgttctagtaaaactggaaatttatatgagtggggggagttaaatcnnnnnnnnnnnnnnnnnnnnnncattctcccg

SEQ ID NO: 763 - DNA, 643 bp, Macaca Fascicularis
  misc_feature (1)...(643): n = A,T,C or G
tggggatgggganngcagctnncntgangagacctaggctgtgagcncaccgcctcccacattttctctaaannnnnnnnnnnnnnnngggtaggtagtgaagaggacaaggccnntagcggtgacctccacggccttctacctgctgaggaagagttaacccacnncctccccaacacaacaggctatgaagaacctggtgcctcaggacctcctgggagccaagctggtctggcaagggtgctcgggcctgggaaagaagggagcaatggccagtcaccttcaccttctaactggccttcggatgaggtgaccaccaccaggcctgaatgatccccaggagcccagcttccaaaccccaactccaaatcaaacatctccatccccgagtgcagtaatacacaaaaaccaaccactctgccctggggcaggcctggcgcgattctcagtaggactcatacccaccctacctagaagtactgggctggcctgggtattgcatcccgtgcgttttgataagggggtgatgtggccacacccttatctagatttcactttgtatccactgggcacagatattttagagaacttcatcttttactcttgaaaaagccacatatccacatctctttcatttctcagt

SEQ ID NO: 764 - DNA, 1657 bp, Macaca Fascicularis
ttttggatgtagtttgatattttgcactgtgggtagctaacctatagtactttataaaatgctgatttttctggaaaacaatttaaaagtttatacagaccagggagatggatgaatagctcatttgagagcctatgttattagctccctcgtgctgtttgtcatgactatgtagacctgatggcattacatctgaaagataatactgaactacatttcccaaaacaacaacaacaacaacaaaacagttgtaatcgttctatggagaaaaatgtaaatgggttaaatctacctgcaatgtggaaaagacaagattaaccaaagtttttacctaccacacaccagagaaggtatggcttctgaattctggcttacttgtttgccacttttaatttttccttagtaggaagtcttttatattaataagcaaatgtacaacacgtgagcacacagtatatttatcgatttcctctgctgatgatttaattccaggtatgtatctttattcatagaggaggtagaactttcttggaaggaaagccaaaaaggaaaggaaacaattaagcaagagatacagaggtcaaaggaataaggcatatgtcacatcatagctaacacacatgcccctttgtgccatacccatgcatagtggccctgacctatgaggaagaagaaaaactcaagagaacttgttaagtaagaaaaaaggggactccgatgaagatgtcgtaattttgtaatttagtaggtgggtcccgcagaactgtatgaaaggagagcctcaccagactaaggaatgggataatcaggaagaatcaggaagtaggaagaggacaaaagggaaagtgttcctaatagaaacttttccttaatgagagctctatttacagataagcaggtaaaactgaattatgtgtcatatatgtgtttgcaatctgaaaattatgcatactgttcagatttacttattttgtttgtgtataactcagttcacatttatctttacttctctgcctatacctacaaaattccatgttttaggacttcctcaaggcgttcaacctacctgtttctcggtgggtcttagctggaaagaaaaataaatgctaagcgtatgatgttagttcaataaatagcaaaacaatttttacaataagtaagaatccatataacaattaaaatttaacactctttaacttaattttcatttctactttaacaattccaggtaaagaaatactaattataattattttatgagacaattgacttttgatatatacaagttttattaataatttatcagtaccctaaaagaccacacaatgtaaatcattactttatttacagcttcaaccgttacattttgggttcacaaatacagaaaataaatacacaaaaccattttggagaaacagtttgacagtaaaactagacttactcctacccgattactcagcaatcctatatctagctatagaccctccaaaaactggctgctaacctccatccaaagacatgtgcaagaatcttctaagcaacttgattcataataacctgaaactgttaacaacccaaatatccatcaacaggagaactggtaaattgtggtaggttaatacaggggaatactattcagcaaaaaaaaaaaaaaaaa

SEQ ID NO: 765 - DNA, 753 bp, Macaca Fascicularis
  misc_feature (1)...(753): n = A,T,C or G
gccggagccgatgccgcatacatttcgaagagccnnnnnnnnnnnnnnnnnngcagtccnnnnnnnnnnnnnnnnnnggagaaaatgaagaccaccatccagaggggcnnnnnnnnnnnnnnnnnnnnctnnnnnnnnnnnnnnnnnnnnnnnnnnntttaccagctctattcggaagagggcaaaggcgtgttnnnnnnnnnnnngaacgtgctgggccatatgcagcagggtggggcaccctctccatttgatagaaactttggaaccaaaatctctgccagagnnnnnnnnnnnnnnnnnnnnnnnctcaaggaggcccggggcagaggaaaaaaatttaccnnnnnnnnnnnnnnnngcgtgctgggaataagcaaaagaaacnnnnnnnnnnnnnnnnnnnnnnnnnnnnnnnnnnnnnnnnnnnnnnnnnnnnnnnntcccaaagaacagtggtggctcaagctgcggcccctcatgaagatcctggccaagtacaaggccnnnnnnnnnnnnnnnnnnnnnggccagnnnnnnnnnnnnnnnncctggnnnnnnnnnnnnnnnnnnnnnnnnnnnnnnnnnnnnnctggactcnnnnnnnnnnnnnnnnttttgtaacacttaagttatttatcagcactttatgcaagtattattgacattaatacctaatcagcaagcacctgtcaccacccgtgtgccccaacnnttccagtgcgtgctgtctgtggactgtgtctcatgctt

SEQ ID NO: 766 - DNA, 749 bp, Macaca Fascicularis
  misc_feature (1)...(749): n = A,T,C or G
gacatgatctcattccttcaaangtctgcatagtattccatggtgtatatgtaccacgttttctttatcgagtctgtcattgatgggtgcttcggttgattccatgtctttgctactgtgactagtgctgcagtgagcatttgcgtgcatgcctttatggtggaattatttctgttcctttgggtgtatacccagtcatgagattcctgggtcaaatgatatttctgcctctaggtctttaaggaatttctatgctgtcttccacaatgcaaatgagacattattgaaagtgtaaagggggctgctaattacgctggggcaggcagggtgaaccaggaccctgccaggcgagtctaggccatggccccacaccagaagatgagggctggagactcctggagaggaatttgagtggtgagaccacctgcattcattatgcatcaactctgctggtgacagtccccagtaaacccatcaaacatgaacctaggtgctgttgggaaggtctttggatgccattaacatctacaatgagttggctttcagtnnnnnnnnnnnnnnnnnnggatgtgggcaggcctcatccagggagctgaaaggccttcagagcagaactaggattttggaggaggatnnnnnnnnnnnnnnnnnnnnnnnnntcacctcctgcctgggaatttccagcttccttttcagacttcggacttgcctccaagctcccagaatcccataagccaattcctgcaatg

SEQ ID NO: 767 - DNA, 1514 bp, Macaca Fascicularis
  misc_feature (1)...(1514): n = A,T,C or G
ttacaacttacagaacagaggtttactccgaagcatatcacccaccagttgccacctaagcacctaagaagttctcaaataaatgttctttcctccctttaactgcaaacccagcagataagcctgtagctgtgaaacaaaggaccctctgcttttaccacctgcccacctgtagctcctaaaaatgatgttgtcacattttcattcctcaagagctggactgttctgtggctaagcaattctccagaagcccaagagctctgggagtaagaagtgtaaggccaaatttgtatatttttctgggccagggccctgagctaaaacaggcaggggccctgggttcccctaggattttgacctctcagtgaatctgatacaagatgggaccctttgggaagccccaccctgggggcatgaggtactgcctagcctttccttttcagcttggacgttggccacccagagggttgcctctctaccagccttcctctggggttggtacagaatctctgcctaacccctcagggcatgagactgatacaaaaaggtgggcatagcatccagtggctgatcccaccaaaggcacacagcatgtgctggcagtccagctgggacttggactcatcacccatcccagttcagccctccttcctcagagtcttccagcatattgcctttgttgaagctagtgcactgccatggaggtgctcatgtcagctgatggagcgctggctcatggtggaaactaacgaaactgtaatagactgacatgtggtcagaggtctctgtggacacctgtgtggtattcagtgctgaggagaacacagacggccacactgtgtggtgcctagagtgatggaactgaaggaagaagacaaagtctgcataaacaacaacagtgcagggctggaaggactgctcaagaaattcatgtctattgagtcagttgtgaaaataagaattcatccactcactgattaggaaccctcctgtgacgccaagaaagataaaagcttaagaggtgctcacatcttaggtatacaaaaaaaccaatatgctgtaatcatgttccgtttgcagagatcatcttaggaggcctggtgtaataggacaaacaacaagttgtgtctgcagaatgcatgggaccagtcatgggcccttctcttgatggatgcttaacttagcagcacaggcagatccctaaataattaattaaaatagtgctgtgaggtatcgtgataaagatttatgcttagagaagaggtgagaaagttggatgaggctttattaagaataatgggggaaataagtagaaagtatgtatgtttagaggctgggcacagtggctcatgcctgtaatccctagnnnnnnnnnnnnnnnnnnnnnnnnnnnnnnnnnnnnnnnnnnnnnnnnnnnnnnnnnnnnnnnnnnnnnnnnnnnnnnnnnnnnnnnnnnnnnnnnactctgtctcccaaaaaaaaaaaaaaaaaaaaaaaaaaaaaaaaaaaaaaaa

SEQ ID NO: 768 - DNA, 405 bp, Macaca Fascicularis
caaatttttaaaaggtaaaataaaattttatcggtaattagtattattacatttagcttttcatggaatggaaagaaaaaaagtgatattggcccctggaaagatttttaaactggagtggtttgataacccttctatgtattgtagggagaaaaaaaaaagtttattttattccactgtcctcacttaaaggcatcatttgagcaataaatgaatattgtctttaaaccaagggttagggaattttcctctctctctctctatcgctgtctctctctcctctctctttttgttcaaagaacttcaaacatttgagaccacctggtattctgtattttcactggccatattggaagcagttctagttgcattgtattgagttgtgctggcagtagtttccatgcc

SEQ ID NO: 769 - DNA, 736 bp, Macaca Fascicularis
cagaggcagcgtggatctgcccacacataggctactggaatagtttaacccagcaactttccttttataaaacaacaaatggttcaactctgtctgcaaattaacagctgaacacctgcaactgcaaatatttttttgatccgacgtactgaaataggaagtcatgctcttcccaccctccacccaccagagtggaacccgctgcaaaatccccagccttaattcttgcttcaggacccagaccggtgtcttgctctagggcagcccagggcagaggggccaggtctgcccagcgtttaccactgctgtcaagccacagcccttggccaccatatgggccatcctcagtgaggcagccccgcctaggcctccgccaagctctggtcccgaagaggctgtgcgctcccttcccggccgtccccaggccctgcccactgcctgctgcgtggaggcagccgtgggaaggagccctggggagccggcccaggggagcgaagcccatgttcgcttcctgacttagagctgggggggtggggggtggggcttgttcccctgcagtatctgttctgtgaagtttgttaaatgtaaggaaagcttaaattcttgtatctttaaaagagaaaatcttatttaacccttttgtgttctagatttacttacacacatagcctagagctcagttttagttttaacattgtgaaaatattaaaagaatcttgtaactttattctttttt

SEQ ID NO: 770 - DNA, 1131 bp, Macaca Fascicularis
  misc_feature (1)...(1131): n = A,T,C or G
catcatnacttttttaactggcttcattttaggaataataattcatcaaaatccttggctgaattaaaatggtttttgttttttgtttttacccagacaactctagaaatgcggaccaaactagttcattttctcaaagggcataccttgtgcattgtggcttatgatgagccatattaattgcctgttaaatatacactagcttgaacttagatgttaaatgttattattaccagcatttgtccttttgtgaaatcagtatcagaatacttgcactctttaacacattctttataaaatgtataaattcttcaaaactatttaaagaggagtgttattgnnnnnnnnnnnnnnntttgagtttgcctcagtagattactaaagcaaattgtttcagttttcttaaatgccctttgatgtttcaaaaaaaaggaactgtaatttgattgactgattttaagatcagccataaataatcagcaatcttcaaaagcactttcaatggattggtcatctgggttctaaagggaagagtctgtgctactaaccatttcaaatgcagactcaaaccttcccaacatctttatgactctagaataatcatattgatgaaatcgtaattcatggttgagtttcagaacaaaagatattcattgcacattaaccatttagaggtcatttaaataacaaaatattgtattgtaaaagaactgtacaattttaaaacaataaagatttgaaccnnnnnnnnnnnnnnnnnnnnnnnnnnngatacatttttaatatatttgagtgattgctgggaagtgtgaaaatattgttatgtatcatatcaaagagaaacatgtttattacaaaaatgttctttaactatatactatgtaacagggtaaacagtgttatgtagaatagaattgtgtaaactagatctttagagaagttgccattgagcaaagttatttaaatgagttagttgagttggatgagaattgtttgaggtctgttgctagagaacaataataaaataattctttttcagaaaatatttaatttcttcataaaaataagttaaatatttttttaaatatgtgtatctaatagtacaaaatggaataaacatcatagtgtata

SEQ ID NO: 771 - DNA, 682 bp, Macaca Fascicularis
tccttaatcccagaagggtggaaatgtatgactccacccagtgatctcagatacagatttcagaaatttcagtcacccacctcatacttacacagggacctttttggaggcagcatcatccgaggccgctcttgcccaatttgactgcccccacctcctcaacgtcgtcttctcttgcagtctagaaaggggggctaccccccaacatgggatccatatttagatccatgttggagggtgggtagaaaggggagataggatgagggaaaattgagtcttagtttcacacatttgtaaaatcgtcagactttccacgttgccaagaaacttgtcaacacaacccctgtgaattggctgcttggccttcgcctgcccagatttgcttccagaatggctccttcagcttggcatgagactggcaccagaaagagtgccaggggccctaggaaggggggaaagtggggcattcagggcaggctctgaacccactgggattcctgtcctgattccatctgcatgtgaccttcagcaagtctctatgtgaggcacttcacctcactgggcctcagtttccacctctgtcgaatggggataataataccatctacttcccagaattggtgccagaatgaaaagcagtccctgctgtgatagtgcctagaacagagtaagcgcacaataa

SEQ ID NO: 772 - DNA, 4043 bp, Macaca Fascicularis
acattctgctctgaatggcggtggagaacctagaaaggaggcttctgccgagcagcatccgcgcggagcgagctgaggtccccaggaccctgcagcaggtcctacgagccgcgccccggcgtccgcgccctgaaggcgaggccaggcttggcgcggagggacctcagcgtccgtggagcgctcgctgtctttgggttcctcctgccagagccctgcctcctctgctctcctcggcctcgcagagggggcgcaggggcgagtcctgggcgggcagggcagccgcgcccgcaggagacaaaggcccggggggtctctggccgctgcacttcccagcgccgcccggtcctcacatagaaaactcttccagctctgcggactggccctgaattccttcttccacgagatccacgaaccctctcttggggtctggactgggacccctttccggtaacacaaataaggaacgctgcagaccagcgaagaactggcagaaattgtcatggagaagcaatgatccaaagacagctttgggacctgctggctcagggagactggctagatgtgaccacatgtgcccagaaggaaaaactgcgttggaggcgatgtttctgtaaatcaaagaagagacagtgtgagaatgtcagccctcaactggaagccatttgtgtatggggggctggcctccatcacagctgagtgcggtacatttccaattgatttaaccaagacacggctccagattcaaggccagacgaatgatgcaaaatttaaagaaattagatatcgaggaatgttgcatgcattagtgaggataggcagagaagaaggactgaaagcactctactcggggattgcccccgcgatgttacgccagtcatcctatggcaccatcaagataggcacttaccagagcttgaagcgactattcgttgaacgcccagaagatgaaactctactgataaatgtgatatgtggaattctctctggagtcatatcttcaaccattgctaatccaactgatgttttgaaaattcggatgcaagcgcaaagcagcaccattcaaggagggatgataggcaacttcatgaacatttaccagcaagaggggacaagagggctgtggaagggtgtgtcccttactgcgcagagggctgctattgttgttggtgtggagctgccggtctatgacatcaccaagaagcatcttattctctcgggcctgatgggagacactgtgtacacccacttcctctcaagcttcacctgtggtctggcaggggccctggcctcaaaccctgttgatgttgtgaggacacgtatgatgaatcagagagtccttcaagatggcagatgctctggctacacaggaaccctggattgcttgttacagacatggaagaatgaagggttttttgctctctataaaggcttttggccaaattggttgagacttggtccttggaatatcattctctttgtgacatacgagcagttgaagaaattggatttgtgacaagtcaaggctgcatgagacatctttctgaaaatggtaacttctgaaacagcaaatcttcctgtgtttcactctgcttctcactgcttggctcatcacagattctgggatgtgagcaacagatgaagattgcgttagttcagattgctgtgtgttggcattgggtgctcttcatcaaacgtttaatggcataaactaacatccaaacactagtctttaccgttggagcacccttcaacatcaaagataatatatgaaatgcatgtttcttgctaaagaaaacttgcaagaaaatcaggagctctggattgttttattcagggagagtagctcctgatgcatctcagctcgtgactgagaacatcagactgctctagaaaagctcattggaaccatggaatggagcctccgagaagatattgtggtttctgaatttctgggaacttttgctccttgtcagctgaagaaatttcatgtatggagacctggactgttcaaccccaggtataaacggtgcaggaaatggatcctaggaatattgcactgctttataatttcctattttggcaggatcttccacttataataagtgatcttaagcttttgaagacttgacatttgtgagaaattgttacaaagtaataatctctaaattcgtggtggtgttatgcgttggctttgaaggttgcaaggtctatattggtgggaggtgttttcaagcagcttaggttctgtcttaggtaatgttagtaattagctttatgatttttagcaaaaaaaaaaaaaaaatgtatttcccaatgtgtaaaatggggataataacatctattgacgtagagggtcaaatgaagaacaaaaagtagctgctgctacttgacttgaaatgtaagcatgtttacatcatgctgtggaatagctctaaacagtctatgtagaagaggagcgtgttatcctgggcttctcatggtaattgtgaatgaagccctttgttaaggtcttattaaagaaagaacactgtataagttcaggctttagtacattttccttagcaaaatgttggtagtgaatcaaagagttgatttctccagctttccactttttactttagtttgtgctgtgcctgccttggacttcctgtttagtttggatggaaaatacctgcttgaaattttaacaatgatttctttagtgcatctatttagctagtttctgataggtgacatgtaatattttctctttttctttccttctatagacacaataaatcattctccctcttcttttttttctttttctattttcttattcttttctctaacctgcttcagagaaagagccctcttccttcttgtcttcatcttactattttcaaaacaaaagatgactgtgagaaccccaagaacctccacttccagaaggcagccacaggacagggaacatatttatttgggtcccttcggttccccctttgagaacaacattaaatacatgctagctggggctccagggcattctccttccacagtagtgcagccaaattcccagtttggccagtctcttcgttgagacagaatggaaggaatgcagggttttgtgggggatcagataatttttcctcccaggcatttttcccttgctttccttatgaatgaatggtccctttgaatattatttccaaaagtgagagctaagacaaagtcatcaaaaagagaggataaaagacgggaggggttgggtagggtgacctgttaattgcttagactcagatgaaagtccacctctccctgggcaatcctagagggcagcagaggaccccagagctcattcaggccttgctcctggttctaaactacaccttaggactttttcttctttccaaaacattccattgattttataaagactttctatagtgaggctttcactgttgagatctctgagtttaaagattgcttttcttgaaccactctttttttaatgtagaaaaattttattttttcaaatgtgcatacgatttttaaaacagtagaagcaaattcattctgcagaccatgtaaagagtgaatgtcagacagtattcattattaccagtttattcagattacgtacatgttcctaccaaggtggaaagaaattcaaacctcatggtgaaactaagcatgatttaagataaaagcatagtatttcttcagtgtagatttgttaagtgccttattgaacaggatcttaacctactttttctgtttttttggaagagttaatgcaattgttgaagcttgtaaccaagaaacaacttaaggaatcgggagacttggcccccttgttttcaggggtctggctgtaagtccctccccacctttgggtattcttaaatatgccaaaaggaattctagtttttataaccaatgggttttttttgtttgtgtgcttatggatttgtgtaatcattgatacttaatgttgtggatttgtaatataaaaagtggctcctgtcctttaaaaaaaaaaaaaaaaaaaaaaaaaaaaaaaa

SEQ ID NO: 773 - DNA, 632 bp, Macaca Fascicularis
  misc_feature (1)...(632): n = A,T,C or G
tgagaaaagtttctgtttgcacaagaaaataannnnnnnnnnnnnnnnnnnnnnntttatagatagtcacttgtttctacaattcagtatttgatgtggtcatgtaaatatgtacaatattgtaaatacataaaaaaatataaatttttggctgctgtgaagatgtaattttatcttttaacatttataattatatgaggaaatttgacctcagtgagcacgagaagaaagccatgaccgaccaatgtgttgacatactgatcctctactctgagtggggctaaataaggcattttctctgactgcctactggaaatatttttaagcggaaccaaaataggcatccttacaaatcaggaagactgagttgacacgtttgtaaatggtagcacagtggctactgtgagtggggagcagaaccgcaccactgttatactgggataacaatttttttgagaaggataaagtggcattattttattttacaaggtgcccagatcnnnnnnnnnnnnnnnnnnnnnnnnnnnnnnnnnnnnnnnnnnnnnnnnnnnnnnnnnnnnnnnnnnnnnnnnnnnnnnctcatttttttcctttggccataaatgtataatcgtcatataaaattctaaggt

SEQ ID NO: 774 - DNA, 2094 bp, Macaca Fascicularis
  misc_feature (1)...(2094): n = A,T,C or G
aggagattgcggaggccagttagccagttggcttacgtgtttatcgcgtagggcaagacttgccaaattcccagccagcggagcggcgaggatggggacttacgggaagttaaagagcttcgtgggcggcctcgcggctccaaaaccaggctctaggcgggggcgaccgcagccgttagggaggccaccgcggctacgaccgcagttaatgaagacaaagacttccagggtcttcatgctgtccatctgcatcaggctatacatacttttgaaatcccagaggtcttcagtctccctgtgggtcaaggagatgtgcagcatttaaagtggattgaggacggcatggaagaggattgagtggggaaagctttttgtgcattctgctggctacctccagcggctgcctctcccacgctgggaaatggatggctccactatactgtgtgatgttactgctatgttcatgccgtcccctctgcctggaatgcccttctgcatgaatgcctgtgaaatgttgctgctcctttgtatgacctggcttccatggttggcaggaatctcttcttttgtggtattcctgccatctttgtgcatcacagtcagcttcgtattcctagattgtaagctgcttgaggataggggcatgtcttgcacctgtttggcaaattgatgtttaaagtatttaaataactaaagctctctctacagtacatagtcacttttgatttatggaattggcaaaattaaacttttttccttgaatattcttaaagtgagactaattccaaaggagatttttctgtctgtggccttcattgggtggtttgctgttaccagaaagctcttagtggccttcctcttccctggtgtcaaggttgactataataggaaatgggaggggagagggccatttctgccaggcattgtcataggttcttaacattatataatccttataatgcaatgttttcctcactttacggatgaaacctgagaccagagaacatgtaacatgtaaagtacgtggcagaattaggatgtgaacccaactctgattctaaacctaatgctcttactctttcattcagaggttcagtcagttctttgtaggccatagatccagagaagctgctgtagccaacaataaagttgttagtttttaaaacatctatatggtgttggtctggcacttaaaatgtattgtttgctgggcacggtggctcacacctgtaatcccagcactttgggaggccaagatgggcggatcacgaggtcaaaagatcgagaccatcctgaccaacatggtgaaaccccgtctctactaannnnnnnnnnnnnnnnnnnnnnnnnnnnnnnnnnnnnnnnnnnnnnnnnnnnnnnnnnnnnnnnnnnnnnnnnnnnnnnnnnnnnnnnnnnnnnnnnnnnnnnnnnnnnnnnnnnnnnnnnnnnnnnnnnnnnnnnnnnnnnnnnnnnnnaaaaaaaaaaaataaatgtgttgtttactactcaccacagatctgcaggagttcactgatctctagggtctgccttaatgccagcttacgtggtttggtcactattacaaaccgtcatcccagaatgatgatgcagaggctagggctaggacccagaccagtgtttccacatgggaattccctcccagtatttcttcggaaatgtatgttttttgaatccataaaccctagaaaaatcagttgaggaaatgagaagtattgtaattattctgtgaatactaacacttaccattatagagacattactagtttgaaagaatccaacttcatcaaatactaacatactgaattgaaggctgtaagaactgagacaggagtatagtatcagagagaaacagtcaccatctaattagccctacttttggttgctgtgatgtcattatgtctgtatgtctggccatatcagctgctaatggtgagttcttgcaaataaaatgatttgataaacaacctagcatactttatacaaatcttatggtgttctgagaaataaactgtggaagcaaataaaaaaaaaaaaaaaaaaaaaaaaaaaaaaaaaaaaaaaaaaaaaaaaaaa

SEQ ID NO: 775 - DNA, 1771 bp, Macaca Fascicularis
aagcagctgtggaggatgcactgagcctgcgcagccatggcctcggcaggggcggagaggcggccgggggtccaggaggctacggtcgtggggcagggacagctcgcggaggaccccggcagcgctgagacctccgaggtgaccgtcaggctgtttaaccttcaaacagggggccgcagcactctgagaggcggaactctgagagccccgacccactaactgccaggctgggccctccaggcggggaggggcacaggctggtgtccttattcccgtttcggtgtctaatgttaggtattcagtgacggatccctatgtcctttgcccgactatggtgaccgatggcctgtgtgtcacctctagtgtccagtggcggaagaacatttcctggtgccagcccatgaggcccgcggaacccagggtgaagaccagcgcccagcaggcgcagcttcggagctggagctccaggaggaaggacccaagctgggggaggagaggcccaagccggaagccggggcgctagaggagagaggccccaggcccgtggtctccattgtgaggccccgtcatggtccaaagagaaagcctgccaagtgagggggctctgggggaggaggaggggaaggagctgcaggcccggggttggggcacacaccccagtagcattcctgattcctgcactcctgcaggaaggattcttgtcccctgtcactaccatcactctcctctcccgttcttccagagcccccatgtagggagcagcaggagagtgggagcttcagggtttgtagggcactgggctcactggcctctaagcctcttgggcctggggcctcatcgaccaggaaaggggcaggcgtcgagtcctggggcggtgggcaggctggggtattccctgggtcaggtctcttgtccctggctcaggtccctcagcctcccgggccttcgtgcccatcccaaggctgaagctgagctgccacccaggctgccgctgcaggaggaggagccagagggcagccagagtgagccctcaccatctgccaaacagcacaaaaaagccaagaagcgcaagagcctgggggctcccgtgctccacgctgtggccagcacggtgtctgcacccttagagacattggggctggagcgtgagtggcagtccctgggctgttccttctccctgtggggcctgacatggcacaacctggcgctctagcctctgccctgccctgggtctttgcaggaaaggcccagcgcctgcggcccctgtaccagtacatcaactattgcaaccccgagctgaaccaggcaggggagggggatggggaggccgaggtggaggcagaggcagagctggccctggttcctgaggaggcaggtgtggagcaactgcaggccttgctgcccttggcaggtgagctgggcccaggcctcgctttgccctgtcccagtccattagtgacccccatccatgctctggctcccctcggagaggaggctgggggcttgcccagcttgggggtgagtgaccaccacaaggctgaggtggataagtcaacccaggtggacatcgacaagatgctgagtgtctgcactgctccgcttgtccccccgctctctcctcagtacaagtgactgtcccgccccactggtggctcccctccttccatgcctgaatttggcttcaggcttcctgtgggcctaggccctctggtggagggggcaaatttggcacctgcccccacttgggactttgggcttgctgaaaataaat

SEQ ID NO: 776 - DNA, 753 bp, Macaca Fascicularis
cagctagggaagtccagatgtggcttatctcgaaacagacaaactaacattctaggaagacagttgtttacgtggtctgagggtcagcagctgttagtctccttcttttggttcttgagaccgacacatatcactttagccctaacgagggctcctcccacctccacctgttgccccagttgaaaagcatccattatgagctaaggtcagcctggatctggaactccagcccatacaaacaaaggaggatgtccctggtctgttccatccccatggatggtgttgctgctgggccacagtgttggcttcttttaagtaccccctttcctcgtcaacgcccccccgcccccggccccaaactgactagcactcagagggacttatgataaaggctcagctccaggggtggtacctgagtgtgtgccatgccacttcagaccagctgcttccattagaattccagggtcacagccccaacagaagcagcagtgcctctgtaggaggggtgctgggctctggccttctcatgcagagaggtctgggacagggtcagtatcgtggacatgtgtatagcttcccaagttctccttttacagtccctgctgggactccctgacttactttggttggttcctagtgctacttcttttacaaactacactttgtagaattgattagattaccttgtttatttaatgtgagtttgtgcctttttgtctcaatcttccaatacaggtatattgagaaaaaagc

SEQ ID NO: 777 - DNA, 751 bp, Macaca Fascicularis
  misc_feature (1)...(751): n = A,T,C or G
atcacagacacagatccgagagcactgagatctgttcannnnnnaaagacgcgtgtgtgagtgccctggcgacgcagcaaatcccacttctgaccgaggcagggtgtgtgtttatacagatgagcctgggcagagggagcccagaggccctggtgtggcaccccctcnnnnnnnnnnnnnnngaaggcctccatcccttacnnnnnnnnnnnnnnnnnggtttgggactggccaggagggcaccaggggaaggagatttaggggccgctgcacaggctcctgggcaggcaggaaaccatctcccgaaagcagaaaacgttggccacacggtggcagcagtccctaaggcaggggtcctggtcgtttctggttgtcgcatatggactcctcttcctttgggaggctggctctggcttcctcctctcactgtgagtggagagcggggagnnnnnnnnnnnnnnnnnngggccggggtctaatgaccgccctctgcctgtccttgggccctgaaaccaggggctcttcacacacatgcagctgtgatttcagagctggtctcacttcctattggcggtgccaggctaggacagagttggacggagctgtggaaaatgggtctccaatactatcttgttttgattccaccgttccgtcagctgccttcatgacacttgtacagccgcattctgagctcaaccctgaccttgtaactcggtttttcctttttggttacctttctgttttcaagaac

SEQ ID NO: 778 - DNA, 2007 bp, Macaca Fascicularis
ttagcttttgtatttactagttgcatgaacttgtgcagtcaggccttcagtacatacatctgtagcataaactgcatagacatgtctgttttatagggttagtgtaattatccaaattgcgattatccaaatcacgatggtgatttatggaaagacatcaccgtcaaagtatacaagtttcttgaatttaaagaagttaacaagaacttaactgggtagaaatggttgtacgaagccagaaactttccacattattcctattagaggagcaaatatcccacgccattcaagtatgtcaaatgtgccctagcattcattggaccattaggtttttcttggcgtttctttatcattcttctgtgatgtcttaaacccgtttggtttgttttaatatttatgtattgcttaagaggtacatgtaactggtagtagcactcccaacatgttactgaattttgctcaaggttagcgtaccaagtgtactatcctttagcagctcaaagatcaggtttgcttgaagtttattcctgcaagtttgtgcaacaatttaatgatacattttgaattaaaacaaaaacaaacagacaaacaaaaaaacgtagtccaaacctggaaatgtgtaaatatagaataggatgcaggctttaattaccagtgaattgttacataaatctgtttggtttggttttggttattccaaattctattctaaaaagaatttcttgtattattttccaagagcttataataaagtgccccttcaagtgtaataatccagacatgtctaattgaagtgagccagctcaccatctgctcacagttctgctacttaagcagtgataacactaaaaacagtctgccagagtttcagttatgcaaataaaataaatggtgggactcaagactatcctagctttgcattaatttgtacatcttcagaatgacaccaaagtagaaacagttcctctgtgtattatgtcaaaggaatatattttataaaagctctttgtcaagtggaaaataatttcaaagtataaacaatttttgtgctttagtttactaaactaataaattttaatcatgataattacaacagtaatatacataaatgaggtacatgcagcttattcctcatttaatttgcttaggggagggctttatgtacctgagaggaaaaaataagaggattaccaatttatatgcttggtaccaaaatatgtgattaagtttagttggctacatcaggccatcaggagttatctctttaggattctcataaataaattgtccaggtataggcttacagcctgaacaacatttcaggtagtttttgggagtaaatagaagtaaagattagtcagtaatagtcctattcagcaactttatcaaacctggaccaaataatctgctgataggcaaacaatgccttgtctttcccaggggatagcgcttgatgtgtccctcttaatacacctacgagctctttgtggtcagaattcatacatcattaacgattgttctaatattgtttccacaaaatggtaacagcagtaattcgatgctgtcttcgtttgttgcaaatatagtttgcttttgcgtaatccgtagtcatcttatattctccaccaaaacgttctctcctgtttttagatttacattgtgatgctgtagatggagaaaacattcttcctctcactcttcttttttgttatctgttctgatgctattggacattttgggttgagactctatcgtattgaatgttggcatgaaatctgtgcattattcaaactcatatttaactcatatttatatgcttccaaaatgagagcatataagcagcagcagtttcattttgtggcaggatttacattttccttttgagttacagaatataaagaagaaaatcaacgaagtcttcagagacttgatgttttaaaggtagcttgaaataccacaaacataaattatccaacttgattatgtcaagaaaaaaaaaaaaaaaaa

SEQ ID NO: 779 - DNA, 844 bp, Macaca Fascicularis
  misc_feature (1)...(844): n = A,T,C or G
gcaacctacttcagttagaattgtctaacactactctattaatcaggtttctagcctctacaacctacttcagtaaaaattgtctaatacaacaatattttttaaaaaacactgcaattatcaaggatggaaaatgtgtgattagtgtaaagaagttttaccagctttacacattcccacagataaatgtgaaattttcgtgagaattctacacaatgacaaatatggtacataaattttattatgaatattgagtataaaatactttaattctaaattataagaaaatataaatttgcacatattaatatagaaattcattttgtgtatatttaacatagcttttaaactattttacatttattagctacttcattatggtttcttgaacttctgaaaaaattagaaatgttttaaacttatcagtaacctaaaaacttattttgtttcatctaacaagtactgcatttgtaaaaagaaatttaatatagaatatatttttaaattaaatatttgaatataatatagctgtaagcaagaagcaagttatcactgaacatatttcttattatttctggctttgaattatacataacttaaattgtcttaaatgatacagaatattggagaatatgatactttcacataatatactatgaacctgttcatataactctgattgactactaacttctgttttatgtatttattaaagagctgacactgtagtttgttgtgagatgtttatttttctaacagagcttataacagttaggacaaggcatttaattaatgcaccattctgtttaatagtaggtgttaatcaatatnnnnattctcttta

SEQ ID NO: 780 - DNA, 742 bp, Macaca Fascicularis
  misc_feature (1)...(742): n = A,T,C or G
accagggcatggagattgtnnnnnnnnnnnnnnnngatcctggcctgnnnnnnnnnnnnnnnnnnnnnnnnnnnnnnnnnttcgaagggacnnnnnnnnnnnnnnnnnnnnnnnnnnnnnnnnnnnngggctttatctttggctaccaagatagctccagcttctacgtggtcatgtggaagcagacggagcagacatattggcaagccaccccgttcnnnnnnnnnnnnnnnnnnnnnnnnnnnnnnnnnnnnnngaannnnnnnnnnnnnnnaggggagcatctccggaactcccnnnnnnnnnnnnnnnnnnnnnnnnnnnnnnnnnnnnnnnnnnggaaggattccaggaatgtgggcnnnnnnnnnnnnnnnnnnnnncgctggttcctacagcacaggccccaggtgggctacatcagggtacgattttatgaaggctccgagttggtggctgactcaggagtcaccatagacaccacnnnnnnnnnnnnnngacttggcgttttctgcnnnnnnnnnnnnnnnnnnnnnnnnnnnnnnnnnnnnnnnnnnnnnnnnnnnnnnatccctgaggacttccaagagtttcaaannnnnnnnnnnnnnnnnnnnnntaattgaaccaagagagcaatccgtaactgcttttccgaacactaaaaccatatattttttaacttcctttaattttctttatatacactgtggctttcttttaccaacccaaaaaatcaaaa

SEQ ID NO: 781 - DNA, 743 bp, Macaca Fascicularis
  misc_feature (1)...(743): n = A,T,C or G
aattacctaacttgtgctaatngctgttccccaattatatgtgtgctgtgaaggcaaagttttgctcacctggcacgtaatagccactctacttacagacatctccactgttatgactgtgagcttcctaaggacagggctgtcttaagaatgacttactgtgctttcaaagtttaacatcagctggggtgcagaatttagcattgtggcagcagtcacagccacctcttttgaagtgtgctctatcttttctaggttttgtttttttttttttaatcatggctagactttaactagcatttttttttcccatttccaactacaggatataccaggagttggtaacatccactcaggtgccacacctccctggatgatccaagatgaatacatcggtgggaaccaagaaataggaccatcctatgaagaatttcttaaagaaaaggaaaaacagaagttgaaaaaactccccccagaccgagttggggccaactttgatcacagctccaggaccagtgcaggctggctgccctcttttggccgagtctggaataatggacgacgctggcagtccagacatcaattcaaaactgaagctgcagcaatgaagaagcagtcacatacagaaaaaagctaatcatgctttaccaactaccatgaggctaaaagcaaagtcaacaaacccctactttccaccgaattctttatcattgtctttcttaggaaacagacatactcattca

SEQ ID NO: 782 - DNA, 1983 bp, Macaca Fascicularis
tacttgcaaagccgagaccggcaggatctgagctgtccaaggagcaggccgggctctcgccatgggtcactgtcgcctctgccacgggaagttttcctcgagaagcctgcgcggcatctcggagagggcgcctggagcgagcgtggagaggccgtccgcagaggagcgcgtgctcgtcagggacttccagcgcctgctgggggtggctgtccgccaggaccccgccttatctcagtttgtctgcaagagctgccacgcccagttctaccagtgccacagcctcctcaggtccttcctgcagagggtcaacgtctccccgacgggtcgccggaagccttgtgcaaaggtcggtgcccagctcccagcaggggcagaggagggagcgtgtctggtggatctgatcacatcaagcccccagtgcttgcacggcttggtgggatgggtgcacggacacgcggccagctgcagggccctgccccaccttcagaggacactgtcctctgagtactgtggcgtcatccaggccgtgtggggctgcgaccagggccacgactacaccatggacaccagctccagctgcaaagccttcttgctggacagtgcgctggcggtcaagtggccatgggacaaggagacggcgccacggctgccccagcaccgagggtggaaccctggggacgcccctcatacctcccagggtaaagggacagggaccccagttggggctgagaccaagattctgcccagcacggatgaggcccagcctccttcagacagcgacgcggtggggcccaggtcgggcttcccacctcagccaagcctgcccctctgcggggccccagggcagttgggtgagaagcaggtcccatcttcaacctcggatgatcggagacgtcttgagtgaagacgaaaatgacaagaagcaaaacgcccagtcttcggatgagtcctttgagccttacccagaaaggaaggtctctggtaagaagagtgaaagcaaggaagccaagaagtctgaagaaccaagaattcggaagaagccgggacccaagcccggatggaagaagaagcttcgttgtgagagggaggagcttcccaccatctacaagtgtccttaccagggctgcacagccgtgtaccgaggtgctgacggcatgaagaagcacatcaaggagcaccacgaggaggtccgggagcggccctgcccccaccctggctgcaacaaggttttcatgatcgaccgctacctgcagcggcacgtgaagctcatccacacagaggtgcggaactacatctgtgacgagtgcggacagaccttcaagcagcggaagcaccttctcgtccaccagatgcgacattcaggagccaagcctttgcagtgtgaggtctgtgggttccagtgcaggcagcgggcgtccctcaagtaccacatgaccaaacacaaggctgagactgagctggactttgcctgtgaccagtgtggccggcggttcgagaaggcccacaacctcaacgtacacatgtccatggtgcacccgctgacacagacccaggacaaggccctgcccctggaggcagagccaccacccgggccaccgaccccctctgtgaccacagaggaccaggcggtgaagccagaacccacctgaggacggcagtggggatgagcacctctagcagcctggactctgcaacggccgtgtcagcctcacccttcgtgcgcacctgcatgggagggttggggggtgctgcccgccctcggtgtacagctcaagtagcctccgtctgctctgggaccagtggtttattttcctacaaacactgagtgacttggggccagacagtttatagacaattgattccttttccccactaaagcaatcgaggagatttgtaatccactttttagtgcaacaagagctccgtgttatgcttgtaataaattattttcaaaggaaaaaaaaaaaaaaaaaaaaaaaaaaa

SEQ ID NO: 783 - DNA, 760 bp, Macaca Fascicularis
  misc_feature (1)...(760): n = A,T,C or G
gaagagcacacacttacagggctgtaaagatggaaggagctggtatgtattttacgtgcatagatcccaagagcacttgtactaaaaagcagaaagttacaaggaagcagannnnnnnnnacatttccagcaattaaaannnnnnnnnnnnnnnnnnnnnnnnnnnnnnnnnnnnnnnnnnnnnnnnnnnnnnnctggtgtaaagaagtctgaagtggctgatgtccataacttctgagtccctttccaaaagactcttgttaatgctnnnnnnnnnnnnnnnnnnnttgaccagcctctccctaaaatgttaagcttctcaacaacannnnnnnnnnnnnnnnnnnnnnnnnnnnnnnnnnnnnaggaatttggggctggaacggagctatgttacatctgttgttatacaggtagattataaattctacatgcaccagccaaaacttaggacaggatgtccccaaattaagatgctgtagattaccgaatcagaaataccagctggatttaggccagctcacatttatttggaaattaccctcnnnnnnnnnnnnnannntgagnnntacgtggaggaannnnnnnnnnnnnnnnngacaccacggggcttggggtccaggtcccagttnnnnnnnnnnnnngagacagataagtgtgtttcctcattaaggtggtgggagtgtgccttttggcattcagaaaagggtttagccaccctaagagtggaaataaagattccnnnnnnnnnnntgtgcag

SEQ ID NO: 784 - DNA, 751 bp, Macaca Fascicularis
  misc_feature (1)...(751): n = A,T,C or G
ggtagcaagcagggtngtgannnnnnnnnggggactcgtngaaagaaagaagagtggaaaatggttccaggagggaagaggttctttgagacacactaccctgggaggcgcaggagaagggtcggcccggcccggccctgggccagagttaagactatttcacacaggttctctgccttcagtggggagggggtgccaccagggctgtcggccaggattgccactcctgtttcagaggaggannnnnnnnnagagaattnnnnnnnggccaagccacacaatcagtggggcagtcagagctcagacctgnnnnnnnnnnnnnnnnnnnnnnnnnnnnnnnattctccacgccctccccagctcccagtctccctgcccgccatgtcccagaccagcccaccagcgactggccactgttgcacagcctccagggtgcttggtctctgcaaagtcaaaggcctgaccgctnnnnnnnnnnnnnnnnnnttttcctgcggcagagcagggcctggtgtggaaccagggannnnnnnnnnnnnnnnnnnnnnnnngaagaaaaacaggtctcagcccaggatcctcactcactcccccaccccccactttgaagccatctctgttctgcaggtgagaggatttaaagtcagtcacaaaggcttgggaacaaaaggaattctcttccaagcatgcctctgtggtgctgtttggtctctagaannnngggtcacttttttaatgcagtaaagaagta

SEQ ID NO: 785 - DNA, 704 bp, Macaca Fascicularis
  misc_feature (1)...(704): n = A,T,C or G
gacattcannnnnnnnnnnnngatagatgaaggatagatgatagatgaaagacagacagatggatggatggatggatggatggggatttgggaggaagaggagtgannnnnnnnnnnnnnnnnnnnnnnnnnnnnnnnnnnnnnnnnnnctccctagtcagaagggccagtaagcagcttagagctttaatcccgcannnnnnnnnnnnnnnggtgcaagagnnnnnnnnnnnnnnnnnnnnnnnnnnnnnnnngagagagagagagagagagagagagagagagagagaccctgtggtaggttnnnnnnnnnnnnnngaaagaaaaaaaaaaaacctttgtttcaaaactctnnnnnnnnnnnnnnnnnnnnnnnnnnnnnnnnnnnaaaggaacttgtcaggtgacggagacattctgtgtctggacagagcgatgcnnnnnnnnnnnnnnnnnnnnnnnnnnnnnnnnnnnnnnnnnnnnnnnnnnnnnnnnnnnnnnnnnnnnnnnnnttagaaagggtacattttgcttcatgnnnnnnnnnnctcaataaagtgtattnnnnnnnnnnnnnnnnataaaggaaaaaaacatttatcctggataataggcaggaattggggagaaggtcttaattgtcatcatatcgtttttaaaacatttttcaaatgtgtaatgctttgatgacattcttaagacac

SEQ ID NO: 786 - DNA, 1071 bp, Macaca Fascicularis
gttgatgcctgttgacgtctgtcccagggataagggatcccagtgggcctggcttgagatgggacaatgctatagcaagaaatctgtggtcccagagtctgacagcccagagagaagcagcatgacgtctggaagtttagagtcagatacacaacaagaaaacaaagtatcgaaagtgtccctggatactggacagatggcgtttaccttggcccaacttgagtcattggagacttgtctgaaagaagcagaagaaaaggctaaagctttatctgaacagctttcagtctctgaaggaacaaagtcaaaactgcttgaacaagtatcccggctggaggaaaaactggaggctgtggaccacaaggaagccagtggggaaccatatgaaaaaatggttcttgtgaaaaaccagtgcatccagaaattgcaagctgaagtaaaagcttcccaggagcaacttacagcccagaaactaaagcatgaaaagaaagtgaaaaagctacaaactgatttggcaacagctaagcaagaggctgccatcacagttctggaactcaatgagaagataaagactctatgtgaaggaaagccagcccctagagaagacagctcgctggaagggttctgtggaggtctcccacctgtggaagaaggtgatagaaaaattagcctgataatggaactgtcgacccaggtttcccttcagactgagaggatcactcagctgaaagaagttttggaggaaaaggaaaggaagattcagcagctggaagctgagcggagtccccatcctccccaagaggtcaaggaccctccaggatgtttaccagaagccccagttttctctactgatgacgtccctcctgtggtctctgatgagaatttgtaaagattcccagtaagaaaacaataaaagtttattaagtgtcctccaggtaaagtccgatcccaagtagtgttctaggtgacaaactcaagtacaagttcatgcatttgactgtatactataatgtttgtattggaaggaaacaaattaaaggaaatgttcaggagcaaaaaaaaaaaaaaaaa

SEQ ID NO: 787 - DNA, 1911 bp, Macaca Fascicularis
tgagagtgcaccagaaacctacaactttttgtctttctttagtttgggtttgaaactcaaaccttctctttcctctgcagcagtcatttcctgaaatgcggtggttactccaacatccctcacaccccacacgtccttgggtttttatgaatttattatttaaaagtgcttttttggtaatttcttggaattttggagggagaaagcagacacttgttctaaaaatcacatatgaattcaatcctctctgtgtatttctaacagattagcagttttaagaaaaggtatgtttggcaagacagaaaataaaaatacaatgaacttcttggaaaatttctgaagcagacagcggcaaacggaaattaaatgagcacacactatatcaggctatttcacatgtattatctcatttaattctcatagctgtactatgagtttactatagcatcatgccatcccctagagctgagcaaaccaaggcaccgagaggtaaacaattcacctaagaagtgcagggccagaagttaaaatcagtttcaaaatcagtttttttgatatgccctacaaagtatgtactttcctgtagacagctaagttattttatttatccggtaacatttcatcaacctgtgaaataacaacactaaattacacagtctgtgctgagaatatctgccctcatggctgcccgtagtattttgagcatcctgtctcgatagtatccagtggtataaatcttgccttctctggatagaattaaaaagaaaaagcaaaaacaaacaaacaagcaaaaaacagggccagagaccctaaaagacacctcaccaaagaaaatatacagatggcaaataagtggatggaacagatgttccccatcatatgtcattcaggaatctgggaaatgcagattaaaacaatgagatatcactacacacctgttagcaggggtccccgactcccaggccatggacccagtaggagtctgtggcctgttaggatccagccgcacagcggaaggtgagtggcaggccagtaatgctcactcccgctcacttcctgctgtgtggccaggtccctaacagtctgccaacagctagtggtccctggcctgagggttgggaacccctgtcgtttagtaagtattccattgtttaacgataccgtttagtacttacagacatttgcattatttccagtttatgacaattatgagtgatgtggctatgaatattcttgtacctttatttggtgcatgtgcacatggctttctcttgtacagaagtgaaaatgctgtatcactggttattcatatcttgaacttcaattaataatgctacactgctttccaccagtgtagcatttttccaccagttttcgccccacccactgtgtctgagcattcctattgcctcctattcttgattatttttcattttagaatttttcatctttgtcaaatatgtgtagtgtgggcttattatgtctttgatttgcatttccctcattagtaatggaattaggcatttcatttggctatttggatttcttcttttggttgcatgatccagcagttaactcatttttctatcctgtaatctattttctaattgatttgcatatcttgaaatcctttgttagttttatatgaagtttttttttttttcttttttgacagtctcactctgtcaccaggttggagtgcaatggtgcaaacttgactcactgcaacttctgcctcctgggttcaagtgattctcctgcctcagctactggggaggctgcagcaggagaattgcttgaacccagaggcagaggttgcagcgagctgagatcgtaccactgcactgcagcctggtgacgaagccagactctatctcaaaaaaaaaaaaaaaaaaaaaaaaaaaaaaaaaa

SEQ ID NO: 788 - DNA, 675 bp, Macaca Fascicularis
  misc_feature (1)...(675): n = A,T,C or G
gagccaagattataccatnnnnnnccagctttccattgcntgggtaacagannnagattcngnnncaaaaaaaaaaaaaaaaaaaaaaatgcccttttcctgtcctcaccatcgcagtctgaggccatgctggagtgaggaaggacgtcttaggccatagaagtcngaagacnngggagatcatccagnncagccctttcatgttagagcagaagacgacgcccaaacaggagaaggcacttgcccgcggtcatacgtcaggttgccacaaaaccaggacgnnnnnnnnnnnnnnnngtgcctcactgccactcccagggaccgggagccccataaaacccagtcatgtctnnacagcagagttggctccttgaccagcagtcagccctggggacttccagatgggaaaagcgccttnnnnnnnnnnnnnnncttaggatgaaggacagcttgcctgcacacttgggccccaatcaaggatgtagggccttttctggcccctgacccctccctggcatgggagcacggggaagggctggccttggggggagcggcaggggcaccacctgtttttgctggttctccccacccttaccctcaagggcgtgggggctgcccagctgcctatgtgcnnnnnnnnnnnnnnnnnnnnnnnnnnnnnnnnnnngcaatcca

SEQ ID NO: 789 - DNA, 727 bp, Macaca Fascicularis
  misc_feature (1)...(727): n = A,T,C or G
caatgctgaaccatactggagaaaaggggcaaggtacnnnngctgaggtgcatgggctgccatctcaggccgtcttgaggacctgggctcnnnctgctactcccaggaaatgggctcctgacacagcagtctgccaccacagccccaggagggtgtnnnnnnnnnnnnnnnnnnnnnnnnnnnnnnnnnnaagatgacccttctcccctacctctacctagccactggcagggagggnnnnnnnnnnnnnnnnnnnnnnnnnnctaggcatggtgaacgcctgggaccaagccatgtggcgttttttattttgccttcctggaagactcaagatgtgtctcttcattctctctcagtatttgtttactttggtttttttgtttnnnnnnnnnnnnnnnnnnnnnnnnngtgggcacaagctgtaatattcagcaaaacttnnnnnnnnnnnnnnnnnnnnnnnnnnnnnnnnnnnnnaagctcaataaaaagtnnnnnnnnnnnnnnnatcccctctggcaggccaatagctgcatcaagctgttgggagaaatgggagggcagggaaaagatgtaaagccaaaggacagcaggaacctaccacctgtttcccttctcccattctacttccagtctggaatgccacaagnnnnnnnnnnnnnnnnnnnnnnnnnnnnnnnagttttcccaaatctccgtgctttcccttcttaaaacttcccttcta

SEQ ID NO: 790 - DNA, 806 bp, Macaca Fascicularis
  misc_feature (1)...(806): n = A,T,C or G
atgttatgacatgtataatagagtagtgatgtanaaacacaagtattcattaatgnttatnnctcactaaaatctataattagaaactgttcatcaatcaaggtgttatatttcaatcagagaagtgaacatttatgaagattatttggaagtgtgtacagaaataaactagacttacaagtaggccagatcagaaagttaacatatgaacctgcagagatcttgtaagacttaaattcagtgtgaggaacaactctggttctctcctatnnnnnnnnnnnnnnnnnnnnnnnnnnnnnnnnnnnnnnnnnnnnnntagacagaaatctacaaagacaaaagtgaacaaaattaagttnnnnnnnnnnnnnnnnnnnnnnnnnnnaacttgnnnnnnnnntttattttgaagtattggtgaactaggcgcttgctaattgataactgcagcatagtttgtgtttactccagttcatcaacttgggtcatttgaaagatataagagcttaaggcaaggaagaaataacatggaattctatttcaaggacaacagaacattcttggaaaagcagctccagttggcttttcaactgtgtcaaacttgaatttgtaagtccccacagagcatggacagtcggtgcagagttccaaggaaacaattattgccaatgatcacttccattttgtatacactctttggttcatataggccatattccaactggctttttagtaatagaagtccagtatataatgtatcaaatacaattgaggttctaacctagtgtgttaatttatctgaattg

SEQ ID NO: 791 - DNA, 188 bp, Macaca Fascicularis
agagaggggtgaaaacaaaagagagtgttttacacatggaaaaaaaaatgaatctgtcactataggaaaagcacaaaaaggccacagagaaaaaagacccccacatgtgtgagatcacagagacacactacacgaaagagcacgggaaagccatataagaaaagggtgagcacgtgaccaaaatgtgc

SEQ ID NO: 792 - DNA, 737 bp, Macaca Fascicularis
  misc_feature (1)...(737): n = A,T,C or G
tggggactagctggccacatgnnnnnnnntttcaggttagnnnnnnnnnnnnnnnnnnnnnnnnnnnnnnnnnnnnnnnnnnnnnnnnnnnnnngccagggagactcaggctgccatggctccaggctccctcccctgcctaggggcaatgtccatcgggtcctgggcctcagcttcccttccgacattcctccagccccaggagcaaccccttgggctgggcctnnnnnnnnnnnnnnntctggnnnnnnnnnnnnnnnnnnnnnnnnnnnnnnaccccagcagccagggnnnnnnnnnnnnnnnntgtcaggccnnnnnnnnnnnnnnnnnnnnnnnnnnnggtggcccctgctgtcttgcgctctgggaagtcagatgtcatttcaggcctgcagtctcatcctgcccttgccatcccccatcgacgtgccacgtnnnnnnnnnnnnnnnnnnnnnnnnnnnnnngcagccagccagggagggctacctcgtcctcctcaccaccttggnnnnnnnnnnnnnnnnnnnnnncccgccccagcaccccctcccnnnnnnnnnngcagggagatgcatgcaagtgcatgcagcaggagatggggccgtgtccgtgtgccccaccctccctcggctttactcctgcccagtgactgtgaccgtccgtgttgcctnnnnnnnnnnnnnnnnnccccaaccccttcaccaaaggtcttggtacaaccagctgcccattt

SEQ ID NO: 793 - DNA, 343 bp, Macaca Fascicularis
  misc_feature (1)...(343): n = A,T,C or G
taaccgttaatttaaggtcaagctccgcaaccatgatgctatcccgcacctgaaacaaatcaacccacctagcagcactaatagcgaccatcctcannnnnnnnnnnnnnnnnnnnnnnnnnnnnnnnnnnnnnnnnnnnnnnnnnnnnnnnnnnnnnnnnnnnnnnnnnnnnnnnnnnnnnnnnnnnnnnnnnnnnnnnnnnnnnnnnnnnnnnnnnnnnnnnnnnnnnnnnnnnnnnnnnnnnnnnnnnnnnnnnnnnnnnnnnnnnnnnnnnnnnnnnnnnnnnnnnnnnnnnnnnnnnnnnnnnnnnnnnnnnnnnnnnnnnnnnnnnnnnnnnnnnnn

SEQ ID NO: 794 - DNA, 671 bp, Macaca Fascicularis
  misc_feature (1)...(671): n = A,T,C or G
tgttccccagataatagaatnnnaatacgttccatcgatactcagtgctgtacattatctgaagagattttcccccaaaacagatatattttgtctgtccttggtggggggttctggtccctgtgttagtcttaactctcatgaatatggagataatcttaagagnnnnnnnnnnnnnnnnnnnnnnnnnnnnnnnnnnnnncctatttaatgtccattgagtagttttagtggtcaggaaggtggttgtcttcttttgcttagcggggggtttttgagcaggaggaggcttatgctttgccgagactagagtcacatcctgacacaactcttgtcctggtgtgctagagtactcgaagagaatcttctggtcttgattcactggtgggggcagttggtgcccccattagtgcccagatcagaaacatacataccctgcctagggatttagaaagtgggctggcagtctttcctcatacccatcacgcagtaggtacctgctacagtgtattgtaaacttttttctctgttcttccagggctactacaaagttctgggaaagggaaagctcccaannnnnnnnnnnnncgtgaaggccaaattcttcagcagaagagctgaggagaagattaagggtgttggggggnnnntgtgtccnnggtggcttgaag

SEQ ID NO: 795 - DNA, 405 bp, Macaca Fascicularis
acatgtttgggaatcactcaggaactagagaagagcaacacctgaaggtggcgcatctgtgtgcccagctacggagagcggggatagtagagaccaggaaggtgaagcggaagacaagagaagttaacagctactagaagcagctgaaatggtgacttcgaagacactttgaaaactataaaacactctgcagacagaaggccgcagtcttctcccttttggttatctgggttcttgggaggcagtgtgacatcgtgaaaagtgcatgggatgtgaatcccataaattaaaccctgccacatatgaaaaaaaaaaaaaaaaaaaaaaaaaaaaaaaaaaaaaaaaaaaaaaaaaaaaaaaaaaaaaaaaaaaaaaaaaaaaaaaaaaaaaaaaaaaaaaaaaaaa

SEQ ID NO: 796 - DNA, 1091 bp, Macaca Fascicularis
  misc_feature (1)...(1091): n = A,T,C or G
atgcagcaggctggctcagaggacgatgtngggctgcgtgccggccttcntgctgagtgtactcagccccaggagagcttgctgcacccgggctgnnnaggtcttcacggcacaactgcctggaaggcaggttgcggagaaggagaggcggatggcccgagcagcaagggggaccgatgctgtgcggctcacaccactccagaacctgacaaggcaccagcaggacccttgccaggagcatgtctgtgcagcagtggttttgcccctgcacgttccagaagccttcatgggaggnnnnnnnnnnnnnnnnnnnnnnnncagatggggcaggtagttcattcaaaagaactctgtgtcccatagacctaggctctcctttcgcgtggcgtgggcttcgctggcccactgtctgttcctggctcagcagaaacatctatttgagtcagcatccctgcagggaccccagagcatcgtaagccttcctgtgattggtagggatggctgtggggtggtttccaggagggggccaccatcgctgcatctactcccagacccccacaggagcccaggctcaggcaggcctggcccagaggcacccannnnnnnnnnnnnnnnngaggcagtcgtagtctctctctctctctcagtatccacgacaggtatgaaacatatcgtctctttataaatgtcattttacaaattatgcgattatctggaagctctgagatgagagcaaatgcctgatcatgctgggcaaatgtcagataccaaagcccatattannnnnnnnnnnnnnnnnnnnnnnncccaagttttccactgtgcgtggtactgagcagtgtgatggtctctgccgtgccgtccgggatgtgaactgtccctgcttccccaatgtccacaccgtagacgctccccactccggtcagtcacttggtcatcagatggcccgtcctggtatcacagtgcttgtgttccggtcactcttacttcataagggtcccaaagcacccgagtagtgatgctggctattcggatatgccaaagagaaaccctaaggtgcttcctttaagtgaaaagannggaacaaaaca

SEQ ID NO: 797 - DNA, 675 bp, Macaca Fascicularis
  misc_feature (1)...(675): n = A,T,C or G
tcacttttaacacaaagtcnnnncataaaaaatgnnnntacatttcccccccaatgactacatacatagatgggtagcagcaagaaaagatgaaaatgaaaaggcagccattaaaataaatggatcaattgtataccaagaagtannnnnnnnnnnnnnnnnaaaaannnnnnnnnagggtatgttaatagccagaggcttgagtcattactgagtatgttaagagaacgaagccagtccagtatgaccgagtaggaatatataattgtcattgcacttcatttgttatagcaaatactctaagacaataggaaatctaagctatatctagattcccaattagaacatgctgacctttaacattttcaacaatttctactgggtttagtacatcagtccttttcttcactcaaactccgttatgagttctttcccatcaatctaagtgtattctgtgcataaaataccttaaatgttaagacttttctaaggttcatttgaaaatggctgtatgaaaagaatacccatttgttttgcctggaaagatacaaatctaaatgcataagtttctcaaggggaaaaannntcaactttcttcttcccattatgatttcctaaacttctcaagtctgttctccatggcttctctaaggatgaaacccagagagcaaacaa

SEQ ID NO: 798 - DNA, 738 bp, Macaca Fascicularis
  misc_feature (1)...(738): n = A,T,C or G
gaatgcaatcattaaaaagtcaggaannnnnnnnnnnnnnngaggatgtggagagaaaggaacacctttacactgttggtgggactgtaaactagttcaaccattgtggaagacagtgtggtgattcctcaaggatctagaactagaaataccgtttgacccagccatcccattactgggtatatacccaaaggattataaatnnnnnnnnnnnnnagacacatgcacacgtatgtttatcgtggcactattcacaatagcaaacacttggaaccaacccaaatgcccatcaatgatagactgaattaagaaaatgtggcacatatacaccatggaatactatgcagccataaaaaaggatgagttcatgtcctttgtagggacatggatgaagctagaagccatcattctgagcaaactatcacaaggacagaaaaccaaacactgcatgttctcactcataggtgggaattgaacaatgagaacacttggacacaggaaggggaacatcacacactggggcctctgtgtatgtagttccaaatgggtcagtccactttgaagaaagaacactctaaacataccgcaccaccgcttctgcaactgatgctgtgcaggccttccgtgtagatgcctgtcatccattttaagctagtgtctaatatctataaagtgggcttttaaccttgtctgaaactttatttcaccnnnaattatctcatttaaatgataacaaca

SEQ ID NO: 799 - DNA, 735 bp, Macaca Fascicularis
  misc_feature (1)...(735): n = A,T,C or G
cataagacagacaatttgggnntgctgtaatgccgtctcacatctcaaagtacattcaaatctaaaaaagaagttcttataattttgccgtgttgatactgttcagcaaacaagctaccaggaactgtgaggctttgtcattgagtgttagactttaaacaagaattaaaatcatgtgctgtatttttaaaacatagccaaattaaatagtacgtgagaaattcagagtattagttttaaggcattcaactgagaaaacctgttgtattcctgaaagtcagaaaacattttcatcttattgagagggatgtttttaaacttttattatcatttgtaaacgtgaagttggtggattgctttgtttttgcatgattagcatgggnnnnnnnnnnnnnnngaggaacatgttttgaaaactcaagagatactagtgatgagggcggtacctgcagtgtgttctctctttattggcttctaaaccacttttttcctttaatgcatgtcaaatatttctcccatgcttctcttagcagaaaagtttttacctgtaagacagggcactttttaactctaaaactagtgatactcagtgacatacactttgtcttataaacattttttcattttttattttgaaaaattgcaaatctacagcaaaagtaaaacagtagtaaacatcatataaccctcacctggtgttaacattgtgccgtttgctttatctcgtatgtattt

SEQ ID NO: 800 - DNA, 940 bp, Macaca Fascicularis
  misc_feature (1)...(940): n = A,T,C or G
ggatggtctcaggtcacannnncagnnnnnaacagtgatgcacggccggtccagagcgtggtgagctttgtttgccncccgggtccacttttactgtcnnncctgtgtgtgtgaaaatccagggcccagaggaagtgcaagcgggtcctccacctcttggtggcactgttggnnnnnnnnnnnnnnnnnnnnnnnnagcaggggagttgtttgaaacatcttcctgagtagtccagacttgtcaatgagtgctttttttcntgtaaacagtctgacatatttactcgtcactttcaaaccgaaagcatgaaaggaaggagatgttgtggggtccgtttaactcgatagaaagcacagtgggatggcccccggcccgggctcttgacccgctcagcactggccccacctccctggccgaggcacttggccttgctgagctggacttctcctcctcctcatgaccagggtaaattagaacatgtttaaagacacccccttccaaattctgtaacgcattgtaattggagaagaaggaaactgcaaggctaaactgtcatttacaactttgctacacatagaccgtagtcagttttgtctccagaaccttaggcttttgtattttttaattttaatnnnnnnnnnnnnnnnnnnnnnnnnnnnnnnnnaagatgttggaaaagcannnnnnnnnnnnnnntcatctattattgcaaaaatgtaacaataaagttcctcaaaataagnnnnnnnnnnnnnnnnnnactctttacacataagaacgcatatnnnnnnnnnnnnnnnnnntatttttaactcttctgtttgtagagaaattgtttcaaggattttgagtcataggtctaatttatagcgctctctagaattcgtattgtaattttcctacttctttgataaaagaaaaatgagtcagattatttaa

SEQ ID NO: 801 - DNA, 700 bp, Macaca Fascicularis
  misc_feature (1)...(700): n = A,T,C or G
aaatacattttgttctatgtgacttgnnnnnnaaatagttaactggtactgtaatttgcattaaataaaaagtaggttagcctggaaatgaaattaaaattcacaagtgtgtggtctttatttcagtacccaaccctcgttcttcaccctactattttgccactgcaatatgtagtcacatcaccatttccgttcctctaattagggaaacattaatctttgttatgaaaaacaagatatgaataccacttcttgttctttccaatgattttattccattgtgtagccccaagaggtgcagcttccatcttggaaacctttggatttgacgtagaggaagctttgcagacactgcttagaaaagaaagaaaacaactctgaaagggacagtttttaaacgtgtataagctgctgtctttgattactgtgttcatgatttggtgtggctgtattttcttttaactttcatcctattagtaatggtctttgggagtctctgtaaaatatatggacaccacaaacagtggggctgtacctcccaggtaaccaacacatgttgtgtttgagtctgctcatttccaatactggatgatgtatgtaaacatgttatgtctcttagtgcaaaaagaaacatcatttttttagggctggctcactctgtcaggcctaatctaaaggctagatataaggtcatgtgact

SEQ ID NO: 802 - DNA, 660 bp, Macaca Fascicularis
  misc_feature (1)...(660): n = A,T,C or G
gatacttattttaatacagatcgcaaactcaggacacttaacagagcagaatactctaaaaacttgataaaatgaaatatagatttaacttatgaaccttccatcatgatgtttgtgtattgcttcttttttgatcctcattctcacccatttggctaatccaggaatattattatcccttcccatgatattgaagttgagaaatgtgacagaggtgtttagagtatggatttcttttcttttctttttttttttttttacgagatggannnnnnnnnnnnnnnnnnnnnnnnnnnnnnnnnnnnnnnnnnnnnnnnnnnnnnnnnnnnnnnnnnnnnnnnnnnnnnnnnntcctgctttagagtacggatttctttaaggaatattggttttgttttctggactgtatcagcagatggtagacagtgtttatgtagatttgttgttgtttttatcattggatttcaacttggcccaagtgaaacaatcagatttctatcattcacaatctcccccggttttggaataacttggaagtaagattcattgccttaagatgatggattctgttaactatggggtcccacactgcactatgaattctacccactgtaagggcaaaaacaccattccttctacctataagaaaaaagtctttcc

SEQ ID NO: 803 - DNA, 221 bp, Macaca Fascicularis
tgttatctttaaaaccccagttcgccttgaatcaggaattgaaattaccaaagagaggcccagagctgttttcatgctacagccacgccggccttgttgtggttcctcaaattcagtgagctctttctcaatctgtggtggtttcgctttgcactggaaccttcctcccaacacttctctgtagcaagcccgcccaaggcttccttacccttcaggtttcc

SEQ ID NO: 804 - DNA, 681 bp, Macaca Fascicularis
  misc_feature (1)...(681): n = A,T,C or G
gtannnnnnnnnnnnnnnnnnnnnnnnnnnnnnnnnnnnnnnnnnnnnngctgccagtnnnnnnnnnnnnnnnnnnnnnnnnnnnnnnnnnnnnnnnnnntccccgtgtgctacnnnnnnnnnnnnnnnnnnnnnnnnnnnnnnnnnnnnnnnnncctacagatctgggcctccaggaatgactgnnnnnnnnnnnnnnnnnnnnnnnnnnnnnnnnnnnnnctgtcctcctctggactaaggcagcctagtgttnnnnnnnnnnnnnnnnnccgctnnnnnnnnnnnnnnnnnnnnnnnnnnnnnnngctggnnnnnnnnnnnnnnntctcccagaatcccctattcctttcctgacctcaccacttcaaccttctnnnnnnnnnnnnnnnccacatccctggnnnnnnnnnnnnnnnnnnnnnnnnnnnngttgaaactggaatcctctgacctgctgccacctctcccaggtccctgcaacctcctgtctcctctacccttcgtctnnnnnnnnnnnnnnnnnnnnnnnnnnnnnttgcttttggagttgatctagaggactcagnnnnnnnnnnnnnnnnnggatcctctcctgaggaggaggggtgcccagtctcctcttctacctccgacctggcctnnnnnnnnnnnnnnnnnnnnnnnnnnnnnnnnnnaccc

SEQ ID NO: 805 - DNA, 590 bp, Macaca Fascicularis
  misc_feature (1)...(590): n = A,T,C or G
attttagatncnttgatnnnancttcgtgattagatttaggtttaaaaagtcttggcagaggtctgggagagatggcttatgcctgcggtctcaacattttgggaggctgaggctggaggatcacttgaggcctggggttcaagagcagcctgggcaacacagtgagttccagtctctacaaaaataaaaataaataaaactaaaatttaaaaatcatagcaggaatttatatatgtgatactttatacttctttttgcatctcacttattgtcccagagttgatggtgccatgtttgattatttagttaaggtggtatccaccaaatcttttcattgtaaagatacatttttttccattgtaattggtacataaaccatgggttgatatttaaggctatggcttgttctctatcagtttttttaatctaacatttaatcatccattaatttttttttctaagttagtaattacattgatggttgaaaaatgacaatttttgccgggtgtggttgctcacccctgtaatcccagaactttgagaggcagatcgactgaggtcgggagttcaggaccaccctggccgacgt

SEQ ID NO: 806 - DNA, 1524 bp, Macaca Fascicularis
agaaaaaaaaggattccctttgaactaggaacattctctttgagtagcccaaaggagaaaaggaagtattaatgataatacatatttcttgactcttcagtgtgtattgtttagctaataatattgttgcttatttgctttcaactttaaaatcaaccagtaaataaagcatgaaaaagccaattatggttatagaaacggatgctaatgtactagattacgcaaagaaaagttggtaatggaaattaggaagtagaagcagcagagggaacagtggtagaatgaagggttggattgcttatgtccttatttctagcagagtcaagagatagtatttggaatggcacaaagaaagacttgtcattttttaattataaaagacaagagtgaaatgattttttaaactgtgataaaatacacatatcataaaaatttagttttaaggagttaagttggtggagttaagtatggtcacagtgttttacaactgttaaccgctatctagattcagaaccttttcatcatgccagaagaaaaccctgtacacattaagcagtcgctccccagtttccctcttcccctagtccctggcaaccattcacgaatctgctgtctctatggatttgccttttcaagatatttcatataaatggaatgatagaatatgggaccttttgtatctgtcttttttcacttagcaaggttttcagggttttcaaggtttattcatgttgtaacgtgttagtacttcattcctttttgtggctaaagtaatattccattgcatggatgtcacaattttacatttatcagttgatgaatatttggcctgtttccatcttttggctatcgtgaatagtgttgctgtgaacattgataagtttttgtttgaacgtttatagttatctgtattttatagatgaggacagtaaactgcagacctagattagtaagtagctctggatcacacaagtaaaagatggtgaagccagggatacaaatccaggcaatttgatgtcagaacctacattttttaaccactgtgcttaacctggcagctactaggtatccagtaaatgttaactttctcttccttttgagaagtttattttttaggtattgactatattaattttgcattttattaagctttaagtaacatccaatttaaattttgctgtgagtactgtttaacctatattttaatactttgtatatattggttatagtttggctgtagcagcaattcctgaaggtctccccattgtggtcacagtggcactagctcttggtgttatgagaatggtgaagaaaagggccattgtgaaaaaactgcctattgttgaaactctgggtaagtctgtgttaagagcattcttatgcaatgatgcataagtttatgtcaatagtgaatcatctcagagttttacaatttttatcttaaagatttgcataatgatgttaaaatgccaaaaaaaaaaaaaaaaaaaaaaaaaaaaaaaaaaaaaaaaaaaaaaaaaaaaa

SEQ ID NO: 807 - DNA, 757 bp, Macaca Fascicularis
  misc_feature (1)...(757): n = A,T,C or G
gnnnnnnnnnnnncacactgcctcntnnnntagacattatatgcacagctgcaagtcagccaattttttttattcnnnnnnnnnttcccccccattatagtgnnnncatatctgaggtacaaaaagcattcaacacactaccataataggcttctttggggatgagaaatttgagtctcaacaactcagaatttgaaatgtcagcgtttttggtaaacgtaggtgttagaggtatattttgctttcctacaattgttgggcccttgattccnnnnnnnnnnnnnnnnnnnnnnnncnnnnnnnnnnnnnnnnntattttaagagactgtaaatgtcatctcagctggctcagttatatctctaatgtcccgggtagcagcccttccctctaaaaacatgtttactnnnnnnnnnnnnnnnnnnnnnnnnnnnnnnnnnnnncagcttccgatttctagttggatttgtcttgcattgtttgtataacttgctggtcacccnnnnnnnnnnnnnttttcactgagaaatttggtaggggtgtctagttcagcttttatgttgatccatcctaacttattttagacattgaatttatctcaccgcaagtaaaagaacgtatgtgtattgactgtctttgctaagtttcctaatttttcctaattatggcaagtatggatgtgaataagaacactgatgctgtacaaatatttttgtggaaatgtaccatgttaatgtgactatttaaataatacgaaaa

SEQ ID NO: 808 - DNA, 230 bp, Macaca Fascicularis
ctgacaagtggaaagcaatcagcggggaagaccccaatctggaaatgctcagacatcccaagacatgacgcaaccccccacgcttctggaggtggggagggcctctggacagatgggtgtcccgtggtgcccctccactcttctcttcctctcttttttgaggggagaaaccttggaatttctatgagacccccccagggaaagggtcagttgggcccccatccctcccc

SEQ ID NO: 809 - DNA, 725 bp, Macaca Fascicularis
  misc_feature (1)...(725): n = A,T,C or G
ggtcagtgctgagacccacaggtctaagaggagtggcagagccagtgtgccaccaggctgggcacggacannnnnnnnnnnnnnnnnnnnnnnnnnnnnnnnnnnncttgtgttcacccgtgggtgtgtgtgggcacatgtggatgagcgtgcactcctcgtgttcatatgtcagggcacatgtgatatggtgcatgtgaatctgtgggcgcctaaggnnnnnnnnnnnnnnnnnnnnnnnnnnnnnnnnnngggcgggcgtgcnnnnnnnnnnnnnnnnnnnnnnnnnnnnnnnnnnnnnnnnnnnnnnnnnnnnnnnnnnnnnnnnnnnnnnagggcagccacatgagcgnnnnnnnnnnnnnnntcctcggatatgtgacccacagcaggctcctgaggctgggggtgactgggtggtttggccttgaggacgctaaggcaggcagcacacacgggtgtggacttggactcggacacttgtgcgccgcaccctggcccgctctctacctctgcccaccgttgtggccctgcagccggagatctgaggtgctctggtctgcgggtcagtcctctttccttgtcccaggatggagctgatccagtnnnnnnnnnnnngggaccctgcccagagctgagttgggggtatggctctgccctggaaagggggtgacctcttgcctcgaggggcccagggaagcctgggtgtcaaggctgcaccaggg

SEQ ID NO: 810 - DNA, 866 bp, Macaca Fascicularis
  misc_feature (1)...(866): n = A,T,C or G
caaaaaaaaaaaaaaaaaaaaaaaacaccagaaaataaaaatctaaatataaatttgttttctcaaatatttgctatgannnggttgatggattaattaaataggtcaattcctanaatttgagagtgcaaataaagacctgagaaccttccaaaatctgtatgttcaatgagcagcgtcttcagcaggtggtcatcagactggtggagcttaagactcatgtccatgatcaactgcaggggtgttgtcctcatccagggatggaggtggtgtctgtctcctctcaatattttacatgctgtaaaccaaaaataaaaatcaaaaccactccctcccagtcattttaatggacaccctcagccagtgtgttcaaaagttaacctgaaagactgactcaagccatcatggaaagcaggtgttgaacatgcctcattatgccctcttcccttttggaattcaggaaaatctgaccagcatttaccaccaacacagaccttaaatctgatcagaaacatttacaatctattctctctgaagcctggcacctggaggaatcatctgcatgagaaaattttggactccacaacctcttatcataatccagacgttcctttctattgatagtaactcaaccaattaccaatcagaaaaattaaaaatctacttataacccagaagcactaccccgcaacccttgcttgcttcaaattgttccaatgttttggaccgaaccaatgtatagcttaaatgtatttgattgatgtcacatatcttcctaaaatgtataaaaccaacctatgccacaaccacgttgagcacatgttctcagggtctcctgagggctgtgtcataggctgtggtcactc

SEQ ID NO: 811 - DNA, 512 bp, Macaca Fascicularis
tactgcaaaaagaaagcataagtaaaacagtcaactttaccatttccgtattctccatagattgaagaaatttataccacatatcgcatatgaccatctttccattaaatcaatgtagagataatgtaaactgaaaaaaatctgcaagataatgtaactgaatgttttaaaaacagaacttgtcactttatataaaagaatagtatgctctatttcctgaatggatgtggaaatgaaaactagcgcacctgcactttgaattattgcttcttttttattactgttatgattttgctttttacagatgttggacgattttttcttccgattgttgaattcgtaatcatggtctcatttcctttgcttctttggaatgttcctttcaacacattcctttattttattatacattgtgtccctgttttagctattgctgctgttttttattctgtttacaggatgatttttaaactgtcaaatgaagtagtgctaacctcagataggctaaatgg

SEQ ID NO: 812 - DNA, 789 bp, Macaca Fascicularis
  misc_feature (1)...(789): n = A,T,C or G
gattccagcattcatgagtcagggtaaggtccctgctaaggacaaaccttaggaggacagtttgnnnaagacacacagctgctttcctcctgtttcctgatcctgccctgggtctgcagtcatagttctggaaatttctcttgggcccaagactaggaggttcctctaagatcttatggccctgcttcctcccagccccctcacaggacattttcttcccacaggtggaaaaggagggagctactctcaggctgcgtgtaagtggtgggggtgggagtgtggaggaactcaccaaccctgtaattcctcctgtcccacgtcacctgcgggctctgaccagctcctgtttttattctaccccagccaacaacagtgcccagggctctgatgtgtctctcacagcttgaaaagcctgagacaactgtcttgtgtggggctgagatgcaagatttcttcacgcctctccttttgtgacttcaggagactctggcatctctttctgcaaaggcatctgaatgtgtctgcgtccctgttagcataatgtgaggaggtggagagacagcccacccccgtgtccaccgtgacccctgttcccacgctgaccagtgtttcctccccagtcatctttcctgttccagagaggtggggctggatgtctccatctcagtctcaactttatgtgcactgagctgcaacttcttacttccctactgaaaataagaatctaacataaatttgttttctcnnnnnatatctgctatgagaggttgatggactaattaaataagt

SEQ ID NO: 813 - DNA, 697 bp, Macaca Fascicularis
  misc_feature (1)...(697): n = A,T,C or G
tcctgggggcagacatcgccctgctgaagctggccaccagtgtgannnnnnnnnnnnnnnnnnnnnnnnnnnnnnnnnnnnnnnnnnnnnnnnnnnnnnnnnnnnnnnnnnnnngctggaccacaggctggggcaaggtcggcttgttcgatatgctgccgcctccttnnnnnnnnnnnnnnnngaaggtccccacactgagcaacgcagactgtgannnnnnnnnnnnnnnnnnnnnnnnnnnnnnnnnngacagaaagttcatccaggacgacatgatctgtgccggccgcacgggccgccgcacctggaagggtgactcaggtggcccccnnnnnnnnnnnnnnnaaggtacctggctccaggcgggagtggtgagctggggattttacagtcatcagcccagcattggcgtctacacacgagtccaaacctatgtgccctggatcctgcagcaaatgcgcctctaagccccgggcccctctcagctctctaaaatccagctcattcctcgtctcggcccctccgctccctgctccttccagcacccaccttctctgctcctccatcccacatagtcctcacttccctccgccttttcagacctgcaccttcctccctcacactgggaggaggaggcatggaaggtgctttgaatgggggtgaggttagggatggaagtcctggagccagttgc

SEQ ID NO: 814 - DNA, 777 bp, Macaca Fascicularis
  misc_feature (1)...(777): n = A,T,C or G
caagaagacagggntgagcagnnnnnnnnnnnnnnnngtgctggcccagatnnncaagcgcctcaaccccgannnnnnnnnnnnnnacgacaaaatgcacttctccctcaaggagtgaggcgccgtccggcacacggccctgcccccgaactcagcctctcactgccccttcgccatnnnnnnnnnnngcgctgtccggcacacagccctgcccccagaactcaggctctcactgccccttcactatcctgctccctgactcccagggccccatagttagcaattctggaaaggttaagccatctcctcctctggctcctcctggaatattcagatgcctgttagaccttcttactgtcctccttctcctggatcagcctccctcacactgaccaagggcccgtgctccccacttccacagttctcccttccactcccctagttctctctatagccatgacttgtccnnnnnnnnnnnnnnnnnnnnnnnnnnnnnnnnnnnnnnnnnnnnnnngcgcctgcagtccccgctacctgggattcttagcccggttcaaggctgcagtgannnnnnnnnnnnnnnnnnnnnnnnnnnncgggtgacagaatgagatcctggcacacacacacacgaaaaagtagccagacatagtggcaggcacctgtgannnnngctactctgtaggctgaagcacgagaatcacttgaacctgggaggtggaggttgctgtgagccgagaccacgccactgcactccaacctggataacagagtgag

SEQ ID NO: 815 - DNA, 723 bp, Macaca Fascicularis
  misc_feature (1)...(723): n = A,T,C or G
taaannnnnnnnnnnnttcaatgaaagtcagacatgaaccatctaatgcagggatggccaatcttttggcttccccggaccacactggaagaattggcttgggccacacataaaataggctcacactaacaatagctgatgagctaaaacaaacaaaaaaaaccaaaacgccaaagaaaatcataatgttttaagaaaatttacatacatgtgttgggctgcatttaaagccgtcctgggccacatgcatcccccaagggctgcaggttggacaagcttgatctaagacaaaaaagcatgttcatggattgattagagtgctgtgtaaacctttgcatattacatagtgctgtatgtcatggacatgcctattaccacctacattttttaggtcctcaattactctttggaaataaatgaattacatgtaatgtnnnnnnnnnnnnnnnnnntgtaaattacaagcactgagtacactgggttcgtggagaagggctcctccatagagaaaagttaaaagatctgacaaactttaaacggtaagctcagtagccacatgtcatgtattttctgattatcatttttaaccannnnnnnnnnnnnnnnnnnnnnnnnnnnnnnnnnnnnnnnnnnnnnnnnnnnnnnnnnnnnnnnnnnnnnnnnnnnnnnnnnnnnnnnnnnnnnnnnnnnnnnnnnnnnnnnnnnnnnnnnaaagatcacgcc

SEQ ID NO: 816 - DNA, 958 bp, Macaca Fascicularis
  misc_feature (1)...(958): n = A,T,C or G
ccgggcccgggcccggggcgacccccgccctaccggccgcgctgcttcctccaaactccggctcggcggcgccctctcccgccgccctgggcgccttctcggacgtgctggtccgctgcgaggtgtcccgcgtgctgctgctgctcctcctacaaccaccgccggacaagnnnnnnnnnnagcacgcccagaccctggagaagtactcctgggaggctttttacagccaagggcaggagagcagcggccagcttcccgaggagctctttctgctgctccagtctttggtcatggctgcccacgaaaaggacacggaagccatcaagtcgctgcaggtggagatgtggccactgttgactgctgagcagaaccacctccttcacctcgttctgcaagaaaccgtctccccctcaggacagggagtctgatccatcccattcacccagtgactttttgcccagaccgcaggggattcccatcagtcacgtgaaccagannnnnnnnnnnnnnnnnnnnnntcacacatccacgttgnnnnnnnnnnnngaataaaaaagacatcgttcccgcttctgcgttttgttattcctgttgccgccataggaattatttcgttggctgaacgttnnnnnnnncccaagaacacactnnnnnnnnnnnnnnnnnnnnnnnnnnnnnnnnnnnnnnnnnnnnnnnnnnnnnnnnnnnnnnnncctttcgtctccttcctctgcttcttccacccaacgcagcctcctgcctccgcctttgtttcatagtgaggattttattttgcacggcactctccctctaaatacctaccctagatgatttcatcctgcccctcatttctgaaggtatttctgtgtctttgtaatggccacatttctccttccactcgtccgcacagtacgtcttcgtggcaggggagtcattttattccttacagcttccttgt

SEQ ID NO: 817 - DNA, 1239 bp, Macaca Fascicularis
ttgattggagaaggagaacgtagaagtttatacttgcttccggtccgcgagcccagagcactaacttagggtcttttcccaaggtggatgtagaagcgggcgctggcctcccactctcctttccatttgggcttagcttctgggtcactgagaacgacgtctgaatagggccctggatccttgccatggatgaaggtggttcccgcatccgccggcgggtgtctctccccaaaaggaaccgtccaagcctggggtgcatttttgtcgctcccaccgcggccgagctcgagcccggagatgaggggaaagaggaggaggaaatggtggctgagaacaggcggcggaaaaccgcgggcgtactgccggtcgagcataatgacagtgaagaggacatgtttggtgactatgatagctttactgaaaactcctttatagctcaagttgacgacctggaacaaaaatatatgcaacttcctgaacataagaaacatgctacagattttgccactgaaaatctttactcagaaagtatcaaaaacaaactcagcattactaccataggcaaccttactgaattacaaactgataagcacacagagaaccagagtggatatgaaggtgtcactgttgaacctggagctgatcttttgtatgatgtaccttcctcacaggccatatactttgaaaatttacagaagtcttcaaatgatttgggcaattgttctatgaaagaaagggattggaagtcatcctctcacaacactgtgaatgaggaactgccccataattgcatagagcaaccccagcaaaatgatgaggcctcttccaaagtcagaattagttcagatatgaacaggagaaaaagtattaaagatcatctaaaaagtgccatgactggaaatgccaaggcccagacaccagtattttctagaagtaaacagctcaaagacactctcctatctgaggaaattaatgttgctaagaaaacaattgagtcatcatcaaatgaccttggtcctttttattcattacccagcaaagtgagagacctttatgcccagttcaagggaattgaaaaattatatggtaatgctttttgctggaataaaaaaatttttttcctatcattaccataaaaaaaaaaaaaaaaaaaaaaaaaaaaaaaaaaaaaaaaaaaaaaaaaaaaaaaaaaaaaaaaaaaaaaaaaaaaaaaaaaaaaaaaaaaaaaaaaaaaaaaaa

SEQ ID NO: 818 - DNA, 659 bp, Macaca Fascicularis
  misc_feature (1)...(659): n = A,T,C or G
atcaagaaaggtttgtatatagtatttttactatagcttcatccttgataacgtcctaatttccttttggacaacgcccttgactaatggcatatttagatctgtgtgnnnnnnnnnnnnnnnnnnnnnnnnntttgttactggtacctgatgcacacggattgcgaccagagcacgatgcctccgtgaagtggtgnnnnnnnnnnnnnnnnctgtccagccaagannnnnnnnnnnnnnnagtggcttccctggtatccactcttatctttttccattatcaagagaatccaggttctgtcagattagtnnnnnnnnnnnnnnnaaatttttaaaaatctcnnnnnnnnnnnnnnnnnnnnnnnnnnnnnnnnnnnnnnnnnccctggccactgacagatcagcagatgtccccacgtgggcttctgagaaagctcttgaacaggggtcattcttaaacctgaattcctccccgtatgttttgttctttgctttaccccctacttttcaccttgcaaagnnnnnnnntacctagtattggaagatcccccttatgaccgtgcgnnnnnnnnnnncagtctaaggaagtgactgcagaaagctcacagtgaccctggccttccccgtggcttctttgagtgtctgcaccagccctggac

SEQ ID NO: 819 - DNA, 699 bp, Macaca Fascicularis
  misc_feature (1)...(699): n = A,T,C or G
gctggtgtgcaatgatgcaatctcagcttactgcaatctctgcctcctgggttcaagggattctcctgcctcagcctcctgagtagctgggattacaggcacccaccaccacaccccattaatttttgtatttttagtagagatgcggtttcacgttgttggtcaggctggtctcaaactcttgacctccaatgatccacacgcttcagcctcccacaatgttgggattacaggtgtgagccatggcaccagcctggaaatacagtctttgcagatctaatcaagttaagctgaggccctcggggtggtttctaagccagtgtgactgggaaaatgctgcgtggagacagacacgtgggcacagtgtcctgtgatgacagaggctgaggtcgggtgaggcagccacaggccaaagaagccgacgaggagccaccggggacagggagggtctttggagggagacggccctgcccataccttgattttgcacttctggcttccagaccagagacattcctgcagtcagttctaagccacctggtttgtggtgctttgtggtggcagcccatactctagagaccgcgcacagctcagcgacacggtctctcctggacaangtgagccgggcgaccagcacagtcgtgggacccgcataccgcacgtgcccaagcagaaaccacactggggccctggcggcag

SEQ ID NO: 820 - DNA, 1573 bp, Macaca Fascicularis
acgtgctggttcaggcaagcatagaatgacctggtactgtgtccgaacttggtgggttcttggtctcaccgacttcaagaatgaagccgcagaccctcacgagggctgaaaatgtcctgaagtaaagctgagcaacgatctgatgatgcttcctgattctgtttacaaaagtcatcccgcttttttactagctggacctttaatgtaaaagcacgaagtaaaaagaataacagggaaaaggatgtgagcttgacctcagaattttgggaaagacttctgaaaataaaaagtcaatgactctggagaaactgacagactcctcagcaggagcacactcttcctcctgaccccactttctactgaagtcgctttctttttggagcatcaaggtcctcagaatcaactggaagcttgctggaaatgcctattgtcagcctctgtcccagatctactgaattagacttttctctttgggcccataacatatagaaacgtgatatacttaacaagaacaggacaagagaggacagtaggagcaaagctgcattggaataaagaaatgacagcagatgttaacttgaacccccaggaatacattaagagaacctgaaactgagctgaagaaagagggtaagttatccaggaagcaacaatgaagaggaagaagggcatcaaatctgtcacttccagctctgtcaaattaggaatatggaggaaaagcatggtgtcgacacttgagaaaggtgctggcatatagcatatggaaagcaactctgccagtcatcagctttgtgagttctctatgcctcatttcatcatcttctcaataagcacatcaatacctaattcatattgttttgcgaggctgaattgggataatgtacataaaagtcttaacacattattaaaggctcattttgaactttgaaaatttagtgacacttttaattaagtgttaaaacacatttcccaaacttaatatttaaatgtatgcttcttctgaaaatgttttcagagcacaaaatatgtaataatgttatcttttatgttggtatcattagtactttgcctaatgtctcttttgatatttcacatatatctataaaatgtctgttcaggatgagaggacataaaataaattacatagcatttggatctgtataaaataaatatggtctaaataagtattgtcagaatactatgcagccataaaaagattgagattgtatcctttgcagcaacatagatggagttcattatcctaaacaaactaacacaggaacataaatccaaatagcacaagttctcgcttataagttggagctaaatatttattacataaggacacaaagaaaggaacaacagacaccagggccttcttgagggttgagggaggagagtgagggttggaaactacctatcaagtactatgctaattacctgggtgataaaatcatttatacaccaaatccctgtgacatgaatttacctatacaatgcttgcacatgtacccctgaacttaaaagttggaaaataaataaaaataaatgttaaaaaaaaaaaaaaaaaaaa

SEQ ID NO: 821 - DNA, 697 bp, Macaca Fascicularis
  misc_feature (1)...(697): n = A,T,C or G
tgtgtgccacctaaggctggatnnnaaagtgcagtctcgttcttcatataataacccacttcttattagtttaccacttgcctttttttattgttaatgttctgaatttccttttcttggcttgtttccactttgttttaccctgggtcatnnnnnnnnnnnnnnnnnnnnnnnnnnnnnnnnnnnnnnnnnagttcttatggcttcacttaaagactgtctcaaaaatactttgctctcttcttcttttgtgttcatgggacatggtacctaagcaaataggagttgggtttggtttttctcctaaaataatgctcaatacttacctannnnnnnnnnntccatttgaataaaatgacagtaactaaagctagttaatgtcagtgacattaaactaactcaggattcaggagttttaatgttagaatttagacttaacagatagagtgtggcttcatttgtccacggtagcccatctctcctaagaccttttgtagtctgtcttcctgccttcgagcgtgatgacagtaataccctgtttagtattctcttatgcatttggtttgttggttagccgactgtcttgaaactattcattttgcttctattttattttacagaggtagcattggcgggttttttttttcctctctctctgttgaagtttcagtttctgtttctaggtgaggctacccca

SEQ ID NO: 822 - DNA, 761 bp, Macaca Fascicularis
  misc_feature (1)...(761): n = A,T,C or G
gagatctgttggagagagagaataaagagattattttccattatttttaaatggttgtttttgttttaatttgcacagctgcacagaggaaataacttaggcactttctgtttttttaaaaaataataaggtctcatggcttcgttcagagaccacagtaacaacaacagcccaccaatcagagaagctggttgttattaaccaagctacagattcacactttcnnnnnnnnnnnctaatgggatgaggcttttcaccnnnnnnnnnnnnnnnnnnnnnnnnnnnnnncctaaataaaacactggactgtttcctgtttacttcattgattgcaactacaaaggtggactcaaagcaaagcacaatcatgccagccaacattccagaattctgctgagaactccaagcctgtgaggggaaaggtttcacaagccagacaggcctgggggactgcagtccccaaggagaccccgccatgtgctggccctttgagtgagaatgctgcatctttctacatatcttcatgagaatactgagaattggattttccttttcaaaatgcactttgctttttttgtatgttttgttgagatgtttctaaagaaaagattttatgtaattataagatgaagcgtagtgaattgtacagtcgnnnnnnnnntgacctatttctatataaaataaaattgtatggcttatgtgtaaattattttgtatctgagataccagttcctttcnnnnaatataaaagtataaaagtt

SEQ ID NO: 823 - DNA, 735 bp, Macaca Fascicularis
  misc_feature (1)...(735): n = A,T,C or G
acataccatatatacnnnnngtcannnnnnnnnnnnnaacacacagcagagattncttgatgaacacgaaatgaatacnnnnttttccctttatgtagtgtgagttcgcattttnnntagctggaaacagcacagaatgtagaaaactggtnnnnnccacggaacatttttgttgcagtttnncatctgtacacatgtatttacacgtaagttcaccacttatacgtgtgacggtacaaagctgctggagataaggcaatacaacatggggtgggcaggggccaactcccctatctatgcagggccaccaagggataagaaggggccatggagagcacagactctggcttgcggggctacagcagacgagatatgaggttgatttcacagttcaaagatacttgggctattggccgtgtatgctttaaatgcatgtctaaaattaagtagcattaacatagatcttgctaaaatacctactttctgtcacagtgaatgtttagcagatgacattttaaggatgttgatttatagaattgtacctcaaatgttcattaaaaataattctgacatgctattaatgaaatgcccctggagaaagaacgcttgcagaacttcccgtggtgtggaagattgcatgacgcacgaaaacaaagctataatttgttatgtcattcaaggtgactcaatcaaatccaagtgagatgagtttgcaatttctgttcaactttctgt

SEQ ID NO: 824 - DNA, 161 bp, Macaca Fascicularis
tttttgcttctgacgtgcgtttctcatccttgctttaccaaactgagcaatgacgtcgggattaatatgcaatttattgtatctgaattcctgtaccacacctcataagtatgatttttttaaatttgatatttcagaataaaaaaaaaaaaaaaaaaaaa

SEQ ID NO: 825 - DNA, 481 bp, Macaca Fascicularis
  misc_feature (1)...(481): n = A,T,C or G
ccacccccacctccccagggccctcgtgcggtccatgaccaagaccagcggtccgcgtgctgccccggaagtctannnnnnnnnnnnnnnagagaagctagagagccgggacaagcgcaccctcgcctgcctgatccannnnnnnnnnnnnnnnnncatatcggtgcagtggctgcacagcgacgtgcagctcccggacgcccggcacagcgtgacgcagccccgcaagaccaagggctccggcttcttcgtcttcagccgcctggaggtgaccaaggccgaatgggagcagaaagacgagttcatctgccgtgcagtccatgaggcagcgagcccctcatggatcgtccagcannnnnnnnnnnnnnnnnnnnnnnnnnnnnnnnntcctgcctccctccctctcagggctccatccagctgtgcagtggggagggctggcctgtccactgtgcaaccactccaggaatccaaggaagcc

SEQ ID NO: 826 - DNA, 723 bp, Macaca Fascicularis
  misc_feature (1)...(723): n = A,T,C or G
ccnnnntttcagcatnnagaatacagaactttttcttctagctgatggcattaatanttcttgagagagagaacccacccacggcacttttctgagcccagcagaaatcagcggagcttgggcttcgcttagcaggtttgcaattgannnnnnnnnnnnnnnnnnnnnnnnnnnnnntaatgctggaaacagaagcaccaacctgattgtgcaattactccttctgtagaagaggccaaaatcctcctcctctttcctttccccctatattcactcctccaggatcataaagcctccctcttgtttatctgtgtctgtctgtctgattggttagatttggctgcccttccaagctcatggtgtcagatggagaacagcaaccttccctcggaaggggacaactcgaggtgctggtacatttcccttgttttctatgttcttctttctagtgggtcttatgtagagatagagatatttttgttttagagattccaaagtatatatttttagtgtaagaaatgtaccctctccacactccatgatgtaaatagaaccaggaataactgtgtcattgtgataatcccatagcaatttgtggtaagaacaagacccctttccctcaccaccaagtctcatggtctgtgtctgtgaaccagggcaggtaattgtgacaccgcatctcatagacctctgcctgcccagatttttgtgtgctcacctcaa

SEQ ID NO: 827 - DNA, 765 bp, Macaca Fascicularis
  misc_feature (1)...(765): n = A,T,C or G
tgaannnnngtacaagtacattgtgatgagnnnacgcgcatcggcgacgagacggcccgctggatnnnnnnnnnnnnnnnnnnnnnnnagacggccgtgctggcgggcaccgcctgcctcttcaccccgttggcgctgcccttagatnnnnnnnnnnnnnnnnnnnnnnnnnnnnnnnnnnnnnnnctggcctgctgcaccctctatggnnnnnnnnnnnnnnnnnnnnnnnnnnnnnnnnnnnnnnnnnnnnnnnnnnnnnnnnnnnnnnnnnnnntgcctctgcacacactcacctcctccaccccagtggtgctggtgcggaaggacgacctgcacagaaagagactgcacaacacgnnnnnnnnnnnnnnnnnnnnnnnnnnnnnnnagaagatttacgaactctatgccgtatgatctccgtagaannnnnnnnnnnnnnnnnnnnnnnnnnnnnnnnnnnnnnnnnnnnnnnnnnnnnnnnnnnnnnnnnnnnnnnnnnnnnnnnnnnnnnnnnnnnnnnnggaaggtgtttggcttaatattcgttatttttaaaaaaataacagatcacacgggtnnnnnnnnnnnnnnnnnnnnnnnnnnnnnnnnnnnnngatttccataacccaagagggggggtctgaggctgtggaagtccgatcgggcagtggnnnnnnnnnnnnnnnacacgctgctgagggggtgcggacgtgctttggggnnnnnnnnnnngtctattgtttaactgtaccatccaga

SEQ ID NO: 828 - DNA, 723 bp, Macaca Fascicularis
  misc_feature (1)...(723): n = A,T,C or G
gcaggagggaaaggcaacgcnttnnnnnntggccaacgacaaccgtgcccctgtgacctgtaccnnnnnnnnnnnnnnnnnnnnnnnnnnnnnccacctagagctcaagacggtggcccacgccgggatggtgggattcccnnnnnnnnnnnnnnnnnnnnnnnnnnnnnnnnnnnnnnnnnnnnnnnnnnnnnnggcttcctacccgttcaccaccctgaagccccacgtcgggatcnnnnnnnnnnnnnnnnnnnnnnnnnnnnnnnnnnnnnnnnnnnnnnnnnnnnnnngaggcgcccaccagaacaggggtctggggtccgccttccnnnnnnnnnnnnnnnnnnnnnnnnnnnnnnnnnnnnnnntggatctttctcagcctgnnnnnnnnnnnnnnnnnnnnnnnntaaaatatgaactggagatgtatgaagagggcctgtctgagaggccccacgcaatcatcgcaaataannnnnnnnnnnnnnnnnnnnnnnnnnnnnnnnnnnnnnnnnnnnnnnnnnnnnnnnnnnnnnnnnnnnnnnnnnnnnnnnnnnnnnnnnnnnnnnnnnnnnnnnnnnnnnnnnnnnnnnnnnnnnnnnnnnnnnnnnnnntggaggctgagctgggcaagggccgccagccgctcaggtggtagccatgccagagcggggtcgcctctgggcctccctgtctgagcaaacctgggtgtgaacg

SEQ ID NO: 829 - DNA, 709 bp, Macaca Fascicularis
  misc_feature (1)...(709): n = A,T,C or G
aggtcccagccctgaaaccagcctaccgtgagcccctttgcagatatagtctcatttcatcctcagatggtccttcaaggtaggtactttattccccattttaaacatgagatgattgaggccagaggggtgtggcaacttgcctgggggctcacagcacaaaaggagcagaggcaggatctgacccttgttctctgacctcactgnnnnnnnnnnnnnnnnnnnnnnngttatgtccctacaaagcaatgcatggtccaaggctcttttgatggtaattttgtttttaagggtcctgttctaaactggtctgagctctgaggagtcctgaaccctgggtgcannnnnnnnncatgctgggagtccttttctgcccacgctgagctgggcttctcgagggctggggctgctgtccctggagcctggcagcagcactgtgtctgattggctgaagctgagnnnnnnnnnnnnnnnnnnnnnnnnaatcccatttggctgaaggggttcctgtagccggggatgttnnnnnnnnnnnnnnnnnnnnnnnnnnnnnggacatgtgtgcggtggagaaaagcaagccctttcagtgccagctccactcaatttctgtgtggaccaagaactataaacttaaaaaaatttttttcctaaggtatcttcagaatatggtgtatttttatgtggaaaagaaaaagttatgaaggca

SEQ ID NO: 830 - DNA, 750 bp, Macaca Fascicularis
  misc_feature (1)...(750): n = A,T,C or G
ccagcaggtgtttnnnnnnnnnnnnnnnncnnncacnnnnnncttccaccctgtgacccacgtcaacgacanntgcctgctgcggcnnnnnnnnnnnnnnnncctgggccctgcagtggggctgctgaggctgccagggagacgggccaggccccccacagccgggacacggtgccgggtggctggctggggcttcgtgtctgnnnnnnnnnnnnnnnnnnnnnnnnnnntggaggccgaggtccgagtgctggacctggacgtctgcnnnnnnnnnnngaagggccacctgagccgtacgnnnnnnnnnnnnnnnnnnnnnnnnnnnnnnnnnngaggcttctgctcggccgactccggggggcccctggtgtgcaggaaccgggctcacggcctcgtgtcgttctccggcctctggtgcggcgacccaaagacccccgatgtgtacacgcaggtgtcctcctttgtggcctggatctgggacgtggttcggcggagcagcccccagcccggacccctgcgtgggaccaccaggcccccaggaggagtcgcctgagccacagccttgcggcatgcaaatgaggttgctgctnnnnnnnnnnnnnnnnnnnnnnnnnnnnnnnggggtccctggggccccagacaccgggaagcctgatgtgcagggttggggtgggacggccagcggcgggggacacccgttccatatgcaaaggcagaatctaacccagtaaaatgttaactgactcc

SEQ ID NO: 831 - DNA, 716 bp, Macaca Fascicularis
  misc_feature (1)...(716): n = A,T,C or G
gttcttattcaagaaatagatgaaaatggttaagtacaattaanntggctccaaaagtcttacaatgaaaacaannnnnnnnnnnnnnnnnnnnnnnnnaggcaaacaattttcattcttaatttttccttctgttagttaccttcatgggtttttccaaattgttatctttttagtttttcaagtgaatgcatatattaatacataaaattttaaaaagcttcttcagtttataatgcatcctaacagtcccctgccccatccctcctaattctccagagcaatgacttttaactcttccagcaatgtcttctgttttttccctcacataactacttagtcatttcttgattattttgtacattatatagtgatttctggatatgacaggtgaggatttagctcttacaccatcgttatcttcacttcctcccatattgtcccaaagtgcttaccatatttaggggtgaagcagtcaccacatcattatgactgtgtatgtattgctccttgttgagaaaaacagtgtattatgctcttcctatcctgtacttctttctgccctnnnattaatgattgcctaaccaacccttcccccttatttttttactttcgctttatcttcaatgaacttctttccaaatgcccnnnntttggcaataacttatttttaagnnnagggatctcactannntagccaggcttgtctggaactc

SEQ ID NO: 832 - DNA, 730 bp, Macaca Fascicularis
  misc_feature (1)...(730): n = A,T,C or G
ggcacatgggctaaaccnnnnnngnncttnnntnctagtatgtggggcnnnanncattgtcgtgtggggtggatcagataattgctcctgtggggccctggcttccttctctgtttgttctgtatttgttttcgttgtcttgttgagaaataccatccctgtgcaacccacccnnnnnnnnnnnnnnnnnnttgaggtgccttccttgtatgctttttgttagtattttttgttttgttccttaactgctgagcctcagccagcgtgggtcctgggggaaaatatcattccaaaggaagccatccctacggggaaattggttttactgggtaaattagtacttttattccttcccctatcccttccttcctagttgtgataaacatgggagaggagtgactttgacagctggggaatttcctcctaagaaccttattcccaaaataagccaggggttatgtcaaggcttctttcaaggaggctcataaaagcagtgacctcatctggggctttggatagagtgagaattccccaactaaattggacttctctgctttatctcctttccttccttcaccatatgcactacatttctggcttgatccccaatcaaattcccgctaatggaagaagtttagaatctttcaggtggaataaagtcacatgaaaacaaaacacaactatatatattttcagtttttttgccttattgcttttttccaaaaaaaaa

SEQ ID NO: 833 - DNA, 734 bp, Macaca Fascicularis
  misc_feature (1)...(734): n = A,T,C or G
aaagatcactttcaatggcaatactttcttaaataattcaagatgggtgtgaggacctatcttactagtttagagctgtgttaaccatttgtgaattacttcttgtttaaaggaagttgtcaaaaaatttttaagattctaaatggaatatatgaataaagtaagccgtagaatagaaacctnnnnnnnnnnnnnnnnnnnnnnnnnnnaattaacataggtgttttattctttcaactccttagtaccagagccaaataccatttagttctcggaaatcttatcaatattgttctgtttacttacttattataaatctgcagataaccacttgaaccaggcaaannnnnnnnnnnnnnnnnnnnnnnntttttttagctttgaatttgtnnnnnnnnnnnnnnncttgcagatagtagggcagccccgtggggcaaggatttactctgggaggtaccagccataccctttaannnnnnnnnntccccctttgaaagatctttttacaatgttaaagtatagtagttgtgagaacaagcaggatttgcaggttactttaccagcannnnnnnnnnnnnnnnngcttaaaatctgagactgtgaaattattccataggaaagtgaatgttattttgcagaattagcctgttacataaaagtatttgttgaagtgtctttaaaattgctatcatgagcaaaactgtttggttactgtaatgcttatttttctgtat

SEQ ID NO: 834 - DNA, 2654 bp, Macaca Fascicularis
ttgttggcctactggaaaaagtggctttcggcagccttcaaatcggcaggcaccactaaaaacagaagggaagagagggaagaaaacaacggcgactgggtagctgcctgcagttctgacaactccaaagggatacacttgtagaagcgggtcgcaggctggggctccgcagagagaggccagaagacctttttggcatctaacatggtgaagaaaggagcaaagaagagaacaaagtaactcctgggggagcgaagagcgccgtgaccaacaccaccaccgccaccaccagctcctgcttctgcggccacccacgtccaccattcaccgggaggctccagaggctcaggcagcggaccccagaaaggagcgaggggaggcagccggcttttccaaggagttatggatgttggtgcattcacttctggccagatccgcgcccagagggagctaaccagcagccaccacctcgaactctctccttgccttgcaccaggtcttacccttccagtatgttccttctgatgagacaatttccagtgccgagagtttcagtacaatgtggaaatggatactgacacattgtgcctcagcctttccccacctgccaggctgctgctgctgctgctttttgttgctgttcttggtatcttccgtccctgtcacctgccaagctcttggtcaggacatggtgtcaccagagaccaccaattcttcttcctcctccttctcctctccttccagcgcgggaaggcatgtgcggagctacaatcaccttcaaggagatgtccgctggagaaagctattctctttcaccaagtactttctcaagattgaaaagaacgggaaggtcagcgggaccaagaaggagaactgcccgtacagcatcctggagataacatcagtagaaatcggagttgttgccgtcaaagccattaacagcaactattacttagccatgaacaagaaggggaaactctatggctcaaaagaatttaacaatgactgtaagctgaaggagaggatagaagaaaatggatacaatacctatgcatcctttaactggcagcataatgggaggcaaatgtatgtggcattgaatggaaaaggagctccaaggagaggacagaaaacacgaaggaaaaacacctctgctcactttcttccaatggtggtacactcatagagaaaggcaatgtttgtggatgcagcagaaccatggctcttttgccaagaatagtgggtattcttcatgaagacagtagcttgaaaggcaaagacatgttgcagatgtctgcttgcttaaaagaaagccagactttgaaggtttttgtattcactgctgacatatgatgtttttttaattagttctgtatcatgtcttataatcaagatataggcagatcaaatgggatagaagttattcccaagtgaaaaacattgtggccgggtttttgttgttgttgttgttaggtttttgttttgaaacttctgagatagaacttaaaggacatagaacaatctgttgaatgaatgatcttcgggaaagttatttatggaatacgaactcatatcaaagacttcattgctcattcaagcctaatgaatcaatgagcagtaatacacgcaagcatttactggaaagcacttgggtcatatcatatgcacaaccaaaggagttctggatgtggtctcatggaagaattgaatagaatttaaaaatataaacatgttagtgtgaaactgttctaacaatacaaatagtatggtatgcttgtgcattctgccttcatccctttctattgctttctaagttatttatttaataggatgttaaatatcttttggggttttaaagagtatcctcagcagctgtctttatcttttctttttcttcagcacaccacatgcatgttcacgacaaagtgtttttaaaacttggcaaacacttcaaaaataggagttgggattagggaagcagtattagtgcccatgtgctatcagttgacttaatttgtatttctgcagtaataaccatcaacagtaaatatggcaatgctgtgccatgtcttgagtgagagatgtctgctatcacttgaaaccatacattactctcgaggcttcctctctcaataaatagatcagaaggccaaattcctctctttcaatacatcaatttacctccaagaatatactaaaaaaggaaaattaattgctaaataaatttaagtagcctcgcctcattatttactcgtgattttttgccatatgtcatggaggtaaagagactgtccacatctctaaaaaccctctgtaaattccacataatgcatctttcccaaaggaactatcaaagcatttgatattaagtgcaactctcccagggacttaaactgagcaaatcaaatgtatactggtatatgtgtaaccatatacaaaaacctgttcaagctgtatgacctcatctttacaaaaccaaataaaacttgttttctgtaaatttaaagagctttacaaggttccataatgtaaccatatcaaaattcattttgttagagcaggtatagaaaacagtacataacagtttaccaatcatcatcacattgtattccactaaataaatacataagccttaaaaaaaaaaaaaaaaaaaa

SEQ ID NO: 835 - DNA, 330 bp, Macaca Fascicularis
tttttttttttttttttttttttttattttttttttttttttttttttttttttttttttttttttttttttttttttttttttttttttttttttttttttttttttttttttttttttttttcttcccacccaaccaactttccccccaacccggaaacagacaagcaacccaaatttgaacccctcaaaagccaaaaaatgggagacaatttcacatggtctttggaaaatattttttttccttagcattcatctctcaaagtatagtttttatctttgaccaacctgaacatgaccaaaaaccaaaagtgcattcaacctaccaaa

SEQ ID NO: 836 - DNA, 690 bp, Macaca Fascicularis
  misc_feature (1)...(690): n = A,T,C or G
gacgacgcccccagcaaccctggagctggccgcagtgtaccagggtctctctgtgtctccagagtcctgtctttcgctgggagctccatctctcctgccccacccatcatgccagagactgcagcctcagaccccctgggggtgctggagccacagtgcagaggtggtgcccaactcagaggaccagggaccaggcgccgccttccagctcagtgaagcaagccctccccagagctcaggcctgcggttcagtggctgccctgaactttggcaagaagatctggagggggcccacctgggcatcttctactgaatggctttgacttccctctctccatccaggaatcagacctgtagcatgggtgcctcctcatttgctacttagtggttgttcacgctttcctttagccaaggctccctttttctaagtgatgtctttcagggaagcagtgtttgaaatagataatgggtatcttccctggatggagtcagggcgggggcagtgtcctccactgctagacacccccagaatgcctggcgctctgcagagcacagtctgagctgctctaagaagaggtctcctttaccccaaaggcagctgggcagggacaggtgggagaatgggtgtaggaggcaggccccatactctgcttcttggtgacagttggccagagnnnntgtgtgctttga

SEQ ID NO: 837 - DNA, 741 bp, Macaca Fascicularis
ataacaatatatgcccactagaatggctaacattaaaaagatcgaccaagccaagttttggcaataaagtggagtaactggaattataatatattgctacttggcaggtaaaattacaacattaactttagaacatagttcaaccgtttcttcaaaccttagacacacacactgtcgtgttactcagcattttacggttaggtttttacccaagagaaatgaaatcatatgtccacacaaagacttgtacatgaattttcacagcagttttgtttgtaatagtcaacaagtggaaacaatccaaatgtccctcaccaagtgaatggataaactaaattaagatatatttatacaattgaatattgcccagcaacaaaaggaaacaatttgtatatgtgcagcaactgagatagaactctaattatgctgtgtaaaggctaaaacataaaaaaaaaaaaatctgaatgatttcctttatacgataggacataaatgaagtgattcgggttacatgaaattttagaaagtcgaatcaatctgtagtaagagaaaataggtcgaagattgccaagagaaggaagtggatgtttggatgtattacagaaggacatgagggaactgtgtaggggtgaagagtatgatggaaatatttgttgtcttctatttggtgatggtttcgctagggctatatatataagtaatcaaactgtactctttaaatactcatcaatcatgtatgta

SEQ ID NO: 838 - DNA, 665 bp, Macaca Fascicularis
  misc_feature (1)...(665): n = A,T,C or G
tcaatgctagtgacanncnntagttacataatagagtttttcttaagttattaacttttttcctctttttctgtcttctcccaccctatcctatctggagcttaataaatataaaccattttcattgtggatgatactagagactatccataaataatcttgataagaatttggctacttttaccgttactgaagtaactgtcagtaattacaattgnnnnnnnnnnnnnnnnnnnttctgtgactagactttttgcatatttacagtactgtgtgggtcttttttactgtgatattaatgttcttgtgaatgatacagcaagaaggtgggaaaacttacatttccttgtgtcaaaatgtaatgatctaatnnnnnnnnnnnnctacttgttggaagagtaattccctactctttgtgtgcagaggtgcattttaggacaaagggaactttcttgagtcctttaannnnnnnnnnnnnnnnnataaataaaatatcaacaaatatttggtatagaaatttgattgctctcttcttatttggcaaataagactttcaaaatgaaccaaaacaaagccaggtaccttctacttttttacttaaaccattatttcatgacggtaaaaaacattttaatgccaagaaaaaaaaaagggcaacatgggct

SEQ ID NO: 839 - DNA, 729 bp, Macaca Fascicularis
  misc_feature (1)...(729): n = A,T,C or G
caaaacaagaaataccnttattgtatccaagatagtgattgtgcacttagttgaatacattttagaaataacactgttatgaaatggctaagcctaatggttcaggtaaatatttatttgtggtatataccattttctagtattttaatagctcctgaatataaatgttgttcagttattgcctctttatttaaggtcttttcatttctccttgagccaagttaaggtcaaattctgaattgtacctgattttaaaataatttctgtttagtgcttacataatccaattatctataataaatgtttgccaggtttttctataaagggacattgtcttttcaggcttatggtttctgatataactagttggctctgctgttgtagcagaaatgtggctatagtttgcattccaataaaactttattaatggatactgaaaattgaattttatataatttttcacatgccataaaatattattattttaacccatataaaccatttataaataatgggaagggtttggtgagcagtacttgcccctctgttaatatagctctggttttttatttttttgcggggattgttgtttcattttgctttgtttgttttattaatgtttgtaacaactttatttgtaatagcaaaaaactggaagcaactcaaactttcatcaacagaaaaatggataaatacattgtggtatatccatataattgaatatttaac

SEQ ID NO: 840 - DNA, 1914 bp, Macaca Fascicularis
ataaaatagattaaaatgatgttggaaaagtacttgaatcactgctgggttggactcgttgcagttgatgacaaaataagtgcttcaagtggttttgatcatcaaaggattgagagagctccttagaaaaattgcaaagccctcaaggtatttttataaaaatgacttttttgtgtgctgtgaaattcaaatatggaaatgtgaaatatgtcatgtcctgctgtcatataatttgtcagaataattactttcttgcccaaaagtctatactttgcgtttatttcaaattaagtctggaatcaaatataattgtagttatgcctaattttaaaaaatgaggtagagcacattattttcataactagttttttaaagatagtcttattccaactttaattgctatttatgaaagtatggaccttgttgacagtgaatttatttaagtagcctttttccagtattgatattcttttatctttatggcaccatttagtggagagaaatataaacaaacataaagctgtagtatgaaatcataactgcataaaattaactgtagtacatactgcactactgtaataattttgtagctacctcctgctgctattgtggtgggtgagctcaagtgtcaccaatatctgcttaaaatgccatgtaccactaatcatgtccacatgagcagcacatgacagtctccattaattgcatatggcagcgaaaagtgatctcttgcgttctcatgtatttttttttatcatgtttaatgtaatatcgtaaaccttaaataacaccatgagacctataggaagtaccacaagtgatgcttccaggaagcagagaaaagtcatgacattacaagaaaaagttgacttgcttaatacgtactatagattgaggtctgcagctgtggttgcccaccatttcaagataaatgaacccagtgccaggatgattgtaaaagaaaaggaaattcatgaagctgtcactgcagctatgccagcagggatgaaaaccttgtactttttgcaaacgacctttttatcttgtattgaaaatgcagcttttatgtgggtgcaggattgctatgagaaaggcattcctatacaactaatatgatttgagaaaaagcacagtcattgtatgagaacttaaagcaaaaagatgaaggatctaaagctggagaatttaatgccagcaaaggatggtttgataattttagaaagaggtttggctttataaatatcaagataacaggaaaagcagctcctgccatccaggaggcagcagcaaaggcagtcaggtttatgatcaggactgctcttatctgtaaagctgctaacccctgagcctggaagggaaaagattaacaccagctaccaggcttttggttgtaccatacaacaagaagtcttggacaaggagagcactttttctggattggttcctttgtcgatttgtccctgaagttaaatagtatccttccagtaagggtactgccttttaaagttcttttgatactggaaaatgtcccaggccacccctaaacccatgagttcaacactgtgaagacgttgaagtgatctacttgcccccaaacacacatctctaattcagtctctagatcagggggtcataaggacctttaaggctcattacaaacagtactctatggaaaggattgtcaaacgtacggaaaagaaccttgctagaacatgaaagtctagaagaattacaccatcaatgatgccatcattgttatagaaaaagctgtgaaagccatcaagcccaagacaataaattcctgttagagaaaactgtgtccagatgtgcatgacttcacaggatttatgacagcctatcaaggaaatcatgaaagagattgtggatctggcaaaaaaaaaaaaaaaaaaaaaa

SEQ ID NO: 841 - DNA, 702 bp, Macaca Fascicularis
  misc_feature (1)...(702): n = A,T,C or G
ctaaaagatnnnnnnnnnnnnnnnnnnnnnnnnnnnnnnnnnnnnnnnnnnnnnnnnnnnnnnnagctataaattgagtttaacaatttataaactcaagagaataatttttataaaccctgttttccaatctgtcatttacttaaattattttggttgtttttccctttttttccttcttttcctaccccctccccctccgtgtgaagatttgnnnnnnnnnnnnnnnatttttttccctgctggaattttagcattgatatgaaccatggacaagtatattctgctgccacaaagactgtaaagtgctnnnnnnnnnnnnnnnnnnnnnnnnnnnnnnnnnnnnataaagcttttcttggttccttcagtggtgttggtagtaaaatggaaggtgtcttgctgcaggtaactaatgaagaagtggtcaaccacagagtcttcaagaaataagaaattctgtaccatctgaaagtagttcttgttggtgccttcatttaaaaagcactctttaaaataaaagggaaatgttttctgataaaacaaacatttagttcaggttcttgatataaaacaattaaaaaatgagtattgtttgtaaaactaacatcaaattggctagagagagaaatgtatcatgttttaaattaggttttgtgagtagacagnnntacaattctattttaaatataaagttataaa

SEQ ID NO: 842 - DNA, 758 bp, Macaca Fascicularis
  misc_feature (1)...(758): n = A,T,C or G
gaaacagcaggagagggtggctcaggacttagggacagggtatgggttagatagtggaaagcaaaggagagcaggaagttataaatcactggttaatgagaaacggagagagctgactctaggatgaagctgtgactaggctggagttgcttccttgaggatggactccttggtaccaagacctatgccacatcacactggggctagggaggtgggtgatgccagccctcagtctgtcttcagccagggactcgagaagttatattgggcagtggctccaacctgtggaccagtnnnnnnnnnnnnnnnnaagatcaggcagggtgccattcattgtctttctctcctagccccttcaggaaagaaggactatatttgtactgtaccctaggggttctggaagggaaaacatggaatcaggattctatagactgataggccctatccccacaagggccatgactgggaaaaggtatgggagcagaaggagaattgggattttagggtgcagctatgctcaccctaaacttctggtggcctggggcatgtcttgaggcccagactgttgagcaggctctcctggcctgtttactcgtcaccacctctgcacctgctgtattnnnnnnncagccagccccaggcacgccacctgctcctgagcccccactatctccctgtgacgggtgaactttgtgtactgtgtcttgggtccatatatgaattgtgagcagggttcatctatttaaacacagatgtac

SEQ ID NO: 843 - DNA, 979 bp, Macaca Fascicularis
  misc_feature (1)...(979): n = A,T,C or G
ctgatcagtcannnagaagtnnnnccacacacaaaggacaggtttaagtttatgaaacccaagggctaggccatggtatagacttcttctatgagtgtgtgaaaatgtgttacttttaggatgtgtaattggtgctactctctgtgaccaccaatgggtcagttgctatagaacaccaccaccaccacaaaacgtctgtgcagttttcagagtgtcacaaagtcaacaggtccttannnnnnnnnnnnnnnctaagggaaatccgaactgannnnnnnnnnntagaattgtcacccnnnnnnnnnnncctcaaacatggatcaaatctgttgtgaaacatcaatatatgtagctggatgagtgactagttgcccttgtataatatgtgatctaagaaaattgctaatctttccctgccattttgagaaacacagtccaaacatgagcataaacagaatttcctgcaatacatcccagtaggtccacctagtttacaacttaaactagtttgtgaaacatttgtctgtatacattttatattttgtacattttgatgtaacatatcatgtaaataggcagaaacagtgaaataaatcatctgaaaagttttgtagtctttgtaaagccccaacaataagtacttggtgtcaatggacttaactggatgatgtattttctattggtttattgttcctctagcttgtaaaccagcttgcatatatttttttgcaaatgtgcacccttgtatctgtctaaattattacttgccacagnaagagatggaattattttttggcaacatggtgtgggttgtatttatggaaaaaaaatgaataattttgcatcaagaagtgtcaagctttaaaatgttgcttgcnnnnnnnnnnnnnnntcaataggcctatttgcaaatttccatggtataaacataaaaagggattcagctttccagtaaataaagnnnnnnnnnttatttttt

SEQ ID NO: 844 - DNA, 730 bp, Macaca Fascicularis
  misc_feature (1)...(730): n = A,T,C or G
tttggctatgcaaaaaatactaattacttttgtgacctaattttaacttaggtttatttgttgagcagcaaactaataattgtgtatgtagctaaatatgtcacataaattctactgtaagttttattgattccatttttcaattttactcttgtatgctcattccctaactcgtgcaatgggattgtttcagatcttaacaaaaagttaagttacatcctaagttaatggtgaacttaaaggatttgtgtgaatgttaatgaatgcccacctagtaactatcaggtacatacaggtagatcttgtgaagcattttggaatgggggacttaaatcaaacattattctttgaagaattttttttaataataacatttcttgtttgttcctacatgttcattgataaagtaatgaaaaaaaaaagagtagttctttacgcataattgcaagatagaaagataagcaacagtaacattttggtgtaaaatttatgattctttatacacacacacacacacacacacacacatttttggggagagcaaaattgctctcaaaattctatttcctttgcttttactttaagtattagcttttctgggttaatgagggtattgccataactaatttcattcacccccnnnnnnnnnnnnnnntatttcattttcacttgtttttgtacaccnnatataaaaattatttttaattcactatttcatacctaacaatgt

SEQ ID NO: 845 - DNA, 733 bp, Macaca Fascicularis
  misc_feature (1)...(733): n = A,T,C or G
atatttagcagtgcagttgagttgtgtgttaatgttagactatccctttgtaagtgnnnnnnnnnnnnnnnnnnnnnnnnctatatatagtgtaccatcttggtcatatgttacgcttcaacatatacttgttcttgtgctcttcctgtgcctcttgaagtttttccttgattgtgctatgtttgagtggaagaaattctttgaagtagatgtgagtgaaaaactgcatgcctttagaagcccagtatcagaatttgctacgtttcaggtgctagggacttaatgaaaaacatgacaaaacaattcatttttgtggcccaggtaaattatttctgctttcacttnnnnnnnnnnnnnnnnnnnnnnnnnngttgcctctatatttgcttactcttgaccaagtgtgagacagtttgaagagtgtgctaccatggaaattgaatgaagccagtgactaagcttctgttttattattatcatggccttcgcatgcattatttgccctagggcattatttgggccttcattcagaagaacttgaggtgctgccatttcgttgtatatgtacaggattatgggctggaaagcatttgttataaacctatagtgcacattttaactgccccctaaattattccttccctgggtttgttttctttggggtggtgtagattgtatnnnnnnnnnnnnnnnnnnnntttttaaaagacaaatcaacttgnnnnnnncaaaa

SEQ ID NO: 846 - DNA, 1345 bp, Macaca Fascicularis
ctagttttagatcgcgagcggccgcccttttttttttttttttttttttttttttttttaataataagtacacaaagtacacaagtgtatttattacattttgcaagcactttgttctacatttcaaaaacgccaccatcaagctgttggcacatttatgtacaaaacagattaattgtaatgcctgctacaaagcactctgtgaaaatacaaactctaataccagaaataaaagtcaaaagtgtcaacatcattacataagttgaaaagacagttttatcacaaactgttaagacacggaactgaaacactataatatagaatttaaagaagcccattaatattttgctgaatatctgtaatactgcatatatcagaaaaatgttgaaccagtaagataatctaagcataaagaaaaggaagcaaaatgaaccccaaattaattaaataatactacagaatgcataatcatgccacagatatctctagtagtaccccctacctactacaagaacttgtaaaattactgatgatgcatgactagtcattgtacaaagattgtttccactcaataaattttattagaaatgcagttacactgagaaaggatttcacaatggtcaaatcagtgcacaatactacctagtttaatacactgacaaaaatgtcttgtcaggctacatcattttagaagacactttacagcattcttgtagcattagaaataatcaaaagaagagagtcaaggttaaaacaaacaccaaatttggtccaataatactgattgctttttttaaaattcctttgatacaggtactttttataaatgaatatgaaggaacattcggttaaaatgacttacttgaaataaaaacacaaatatatcactacactttcaaacaatacattctataggggcctctgaccacactttagaaaacactacaggtaaaccaacatagattggaaggctgcaagcaaagctattatattaatggaagccttttcaaatatatcatacacattttaggaatagtttacagaggtgcaatccattaaaacttttaaagtaggtaaaacaacttccgaggggttagtgtgcttattcgtaataaaccaccttcataaaggtaattaattttccacattagcatattaaaagttccaatccagccacttcttaaatcacaaagagatcattctccaatagtctacagtagttatttccattaaaattgtctctatatactaaactttaaaaaggtaagcctggtgtcacaatcttaaaaaggcaactagccatgcattagcattactgtttctacatgctcacaacataaacatg

SEQ ID NO: 847 - DNA, 731 bp, Macaca Fascicularis
gatttatcaccttaatttttaaggacattaagtatattcatactatgcaaccatcatcactctccatctccagataaatcttttcttcaataaaagtttttgttgagatctaatccatgtactataaaattcaccaatttaaggtgaggtggtttttcagtgttgtggaaccaataccacaatctaattttaggagaatgttatcatcccgaaaagaaaccctatacccataaacagtcatttcccacttccattccctcagcccctcgcagccaccaatctgttttctgcctctatagatttatctgttctagacgtttcgtatggatggaaacacaaaacatggagtcatttgtgactgctttcatttaacaatgttctcaaggtccacattatagcagacagcagcagctagttcttttttattgctgatgaatatttcattaaataaaacaaattaaaaactattccattatatggatatactacattttatccatcagttgacatttgggttgtttgcattttttgactattatgagtgatgctgctatgaacattcatgtacaaggttttgtgtggacttcagttttcatgtggtaactgtttaacatttttaaatattgccaaattgttttccaaagtggctacaccattttacattctcaccagcaatgtatgagggtttcaatttttccacattcttgcccttgttatttatgtacctcatg

SEQ ID NO: 848 - DNA, 642 bp, Macaca Fascicularis
  misc_feature (1)...(642): n = A,T,C or G
tcagggtgagaagtgagaagcagcttgttgtatgtcagggagccaggcctcgagggtgagcgagatggagaannngaaggaaggggctttgggtcttgaagccagcaggccaggcagcatccgcagtgttagtccaaagggttggaccgtgtcgtcagcctcgcatgtggtcagtgatggtctgggcgggccaaggagactctgggcttgagcccaggtctcctgcatggctcagctgctgaatttttcctcgaggctctttggtgggtgacccagcaagggccctgtgtaggacagcagcagggaggcgtcatggggcctcagcagaaggagaacgacgagggcatctcatgaaccatctcaggcacttctgcatcacggaagactcgtccctcccagccgtcctggggatgctcagggtgcaggcagaggctcatgaggccgcactcaggggtcatgagcggggactggggcagccgagcccgcacagcgaagaggggctccgatcaaagccacccatgctgctggccgggggcccaggtgggcacaagctcctttgcgctttgcacaaacctgaatcccccaccagagaggatgtgtgtgaggagccnnngaacacctgaatccnnnntaagagagaaa

SEQ ID NO: 849 - DNA, 784 bp, Macaca Fascicularis
  misc_feature (1)...(784): n = A,T,C or G
gaaagctgttnnnnnnnnnagtcnnnnnnnnnnnnnnnnnnnnnnnnnnnnnnnnnnnnatgacattttggccagctgttcgtgaggataaccgacgggtggcatnnnnnnnnnnnnnnnnnnnnnnnnnnncttcatatgctgctttctgtgggctgcttggcatacnnnnnnnnnnnnnnngagatggaccatctcccaacaactacagctactctgaaccaaacagttgctgcagccaagtccagctaatgaggaaattctcttttgttttttggagcatggttctttgggaagtggcatccactgcaggaaagcagaatgagcagagnnnnnnnnnnnnnnggagtggcacaaactcccagtgtctggatggggccatactggtgcctaatcacccgtttaacaagcagaaattaaatgttgctcagcacatgtgtctttcagctcttctttttcacacatggannnnnnnnnnnnnnnnnnnnnnnnnggactgaaatgccggggaatggcttaggcatgctcagtgccatccctttgccacccacgtcaaatgacatgcttcactgtggtaccttaatacccgaaacagacccatgctaaattctgatgtcctctctctgaattatgtacagactacctgggggatcattttattttaccatatggattttgtttcatctttggtttcgtgtatatattggtggagattaactgggagcttgaaaatttgtctttggtaacctgatactggannnnnnnnnnnnnnnnnnnnnnataa

SEQ ID NO: 850 - DNA, 756 bp, Macaca Fascicularis
  misc_feature (1)...(756): n = A,T,C or G
gagacagagtgaannnanctgtgccgatatgctgttaaattaatgtatagnnntgttttaaagtattaatttaaaaaaccatgttctctagaaacatattttaaaaatctatatgaaagttttaaaatgttctagctaactaatggataagcataccagtaaagccaaaataaaggttagtgcttttaaaactaacctgtgttagagnnnnnnnnnnnnnnnnntaaagtatgtattttgcatccatttatctatagatcctaaacagaaatactctaggttgctacaccacagttttaagaagttatgctgcggctgttactctcttctaggattctggtggtaaagtagagaaactcggannnnnnnnnnnnnnnnnnnnnnnnnnnnnnnnnnnnnnnnnnnnnnnnnnntggagcaagtcactgccgagcttctcagtctgcattgacactgctactgactcacctctccttccctggaatnnnnnnnnagcttccctgtgttgtgaagacaccatttgtaagcactnnnnnnnnnnnnnnnnngtgacagcgctggatatcatgcttgggggggcctcttcctgactcccatccccgtaataatgagttttgttnnnnnnnnnnnnnnnnnnnnnnnnnnnnatggtttagaaaatcaaatatttgatcagctgtcccctctgaacaaaaattgcaccccttttttaaagttttgttgcatctttgtagtaatgtaattgtatttcatgcc

SEQ ID NO: 851 - DNA, 692 bp, Macaca Fascicularis
  misc_feature (1)...(692): n = A,T,C or G
attaggccgctggctcgggccggaggcttgtgtacacttcagagcagtcgggcagcaggagggccggaagcctggttggtttgtatatgatctctcttgctgctctcgtgcacttcccttgatttagcaaccttgacctgcactggcccccatggctgttggagggaagtagcctcttgcagggaaatactttcctctgccctggaatctcctatgtgcctgttaaagattccagggccaagaactgggcaggctgaggagcagctaggtaggtgggttatggggttcaggactgcttctggaagggaccgcctgtacttctgtaccaccgttgccctttacactttgctcaggatggggtgggggaagcattcaaacaaaacaaggaagggaacnnnnnnnnnnnnnnnnnagtggatgcatccagagctcagtcccctttcatcttttgtctctggacgttctgctgccctcctcatactggggactggcattccaggtcagcttggctgtggtcttagaggcagggagtgcctaccnnnnnnnnnnnnnnnnnnnnnnnnnnnnnnnnnnnnnnnacttaggctttttttcccccccctttaagatgcttgctcctctcccctttctttttaccatccaacctttattgttagtggttacaaagnnnnnnnnnnnnnnnntgtactttg

SEQ ID NO: 852 - DNA, 413 bp, Macaca Fascicularis
cacacccccctcctgtcgctatcgccgtttaactggtgactccggtattgagctctgcccttgtcctgcctccggtgagggtgagccagtcaaggaggtgagggctagtgccaccctgccagatctggaggactattccccttgtgcactgcccccagattctgtaccgcaggtctctcccatggggctgtcctccagtgaaggggacatcccgtaagtaagttttgagagggtgggtgggttacttgcccaccagaaacagccctagtcccacctccttgcgttccctttggccccttcctgcctacctagatctgcccgaaagggctggagccccgaggagaggggcagtatttgggggattgtgctagctttacccccgcaaggcatcaagacatatacacaggagcctt

SEQ ID NO: 853 - DNA, 727 bp, Macaca Fascicularis
  misc_feature (1)...(727): n = A,T,C or G
ggcccaccccccggctctaacatcaccttaagagccctacacagtattcccaatgnnncagccattgggcagccctgcagcaatgtgcagaaaatgatgcgatctgcagaaacttctcatttatatctaaaagcagcctgttctcctaaaaaaaaaaaaatttcaaagtctatcatgaggacaaaggggtagcgcatttgatgtataaagacctacaagtaaataagaccaacaacctaatagaaaaataggcaaattatttatacagacagttcacagaaaatacaaatgactctaaaacatgtgacaagatgttcaacctcactcaaaagataaatgcaaattaacaccgagcaaccatttttcaattaagagactggcaaagtttggaaaagtgtgatcactcactatgtgggtgtaggtgtgaggagacagacactctcacacattcctggtgggagagcgagttggtataaaccctactgagcaatatctaccaggatgcatgagcccttcgatgcaacaattccactgccaagaatttctccgacatttatacccacacgagtggaaaccaatgtgcaaggaaagtcattgcagctttgtctctaataacaagagtttggaaataaacgaaatgttcagtgataggggtttggttaaatgaactgtggctcatgcaggcaatagaatactatgcagccataaataagaacaaagtcactct

SEQ ID NO: 854 - DNA, 751 bp, Macaca Fascicularis
ctatcaaaaaattttaaaatgtgaccaacttttgctagattcacagtataaatcaactttatacacactaatggtttaacctcagctggtaattttctttctcataagcaggcaggcaagaatattcacgaatgtttttgttactatttctacgatcagttttatccagagttttcacacaacagaggctcaccatttcctgtaaggtattatgacctctcagaagaggttgatttaacttctataaatacaaccacttcatgcgttggcatctccttgagaaaaggcttctcgagttactgtcataaacggaagcctgactgcagttgaagtttctgtccaaagatggattcactactttgtgaattgatttgtgatacaggagggggccgtgcaccccacctccactactccggggtgtctttcttctcagaagttggcttgagccaggaatcaaggagtctccaacctatttcttgaacatggacctggtttttactctggggatgtaccctattaaagaaaactgaagactgagggggtcttgggcattgacatggttgacatgggcatttcttaaagcagagcccccacaaaaccccactcatttcctttcctaagaatttccaaatccaaattcaagcggagtccggcaatgctggggttgagtctgtgctcagctctagagagggggcgggagggcccttccctgtctcccactccgcaagcagcaaccctgtacccagtcaca

SEQ ID NO: 855 - DNA, 811 bp, Macaca Fascicularis
  misc_feature (1)...(811): n = A,T,C or G
tattaggacnnnnnnnnnnnnnnnnnnnnngccctggcaagagcnnnngacaagtttttccacaggaatatgtatcatggaagaatagaggttattctgtaatggaaaagtgttgcctgccaccaccctctgtagagctgagcatttcttttaaatagtcttcattgccagtttcctcttgtagcaaatggaagaatgtagtatggctaatttcttattactaagtaatttattttaaaaatatctgagtatattatcctctacacttatccctaccttcatgttccagtggaaggccttagtaaaatcaaagatcggtgagttcatctgtaatgttttttttacttgctttcttattgacagcaaccacgaattttttttttcctgcggagcaagttttcaaaatgtaaatactttnnnnnnnnnnnnnnnnnnggcccattctgatccagttcaccagtagattggacagcatacaatttggatcattttgtcccttgtaaatcaaaatgttctgtagattattcctttaatggctggacttttggctgtttcctaatgaaacatgtagataagtggttattatttcgagtttataaccctattgctagcaccttgtatgnnnnnnnnnnnnngctcatgattccaaggatcagcttggatgcctagaggactagatcaccttagtttgattctattttttagcttgcaaaaggtgacttatattccaaagaaattannnnnnnnnnnnnnnnnnnnntgaattaaaatgagttaactttaaaaaaaaaaaaaaaaaaaaaaaaaaagg

SEQ ID NO: 856 - DNA, 698 bp, Macaca Fascicularis
  misc_feature (1)...(698): n = A,T,C or G
cagaaaactaagcagtaagtataactttttaaataagtatgtatcagtgaaagtaggcttgttttacaactatttctagccagtgagttgtgttttcatgtctcatcaagacggtaccacattgcatcattttacaaaatacattgtcattttcatttcaactgtaacataggaaaatagatatttcctagatgatttctgagnnnnnnnnnnnnnngaaaagttatcaattggtatacatgtgtctctgtaatagnnnnnnnnnnnnnnnnnnnnnnnnnnnnnnnnnnnnnnnnattctatcttatgttgtcttgaggccaagatgtaccacgtttgccctgtatattgaattggtggtagaaggtagttccatgttccttccatttgtagatctttaagattttatctctgataactttaatagaatgtggctccattctggtccttcaagcctttatggtttggattttcagcaggggacagttgatgtggagtcaatcttttttgtacacgggaagctttataaaatttccttcacgaatctcctattttgggaagctgttttgcatacgagaagaacactgttgaaatattatttttccaggaactaaagctttatatattgatcaaggtgattctgaaagttttaatttttaatgttggaatgttatgttattgttaattatactttatta

SEQ ID NO: 857 - DNA, 2064 bp, Macaca Fascicularis
  misc_feature (1)...(2064): n = A,T,C or G
gtaatcttggtaattagtcatcagtggagcagtgggtaataaagcctgattggggtgggttgaggagagaatggaagatggggaaggagagacagtgagtgtagatgactcctttgaacagatttactgtgaaggggagctccaaaagaggtggaaaatggaggagggactagggttaagggagagtttatttaaaggaggatgatatggaggtatgtttatatgccagtggaagtgatccagttaaagagggagaaaagtccttgaaatggcacgggagaatgggttcagagcccggtgaaggtattgaccttggatgggagccaggactctttttctatagtaattgcaggatggcatggcctgagtattttagttctgagacagacacaataaagggcttgttgatgggaggatggggtagttctcatcttatagaaacctgttttctctatgaaatatactgcaaggtcatcaactgagaatggggtggggagggagtgtaggagacctggggagagaaggaagtgtgaggcgtccccagagactgggaaattgaattttctagggaaatgtggtaggtttttctgacagagttgagtgagatttgtggtcatgtttgaagtgagtctagtcagcaaatttgtatcatttttctctagtaatgttcagctgctctggtacaggccctgaataagtgggtaggacaccagggcgggagttctgctagactaagacaatgcaaggagagctgcaagaagcccaggtggtcagcatggcagtagctgaagtgttggacgttggaatcagagccaggcaaagagagaagtgaatatatgcaggtagtgatggaaacggatcataaaaaaatgtttttaatgaagtggggttggagaattgctggagtaagtaggggtgtcagagtaagctagggtggcaatgatcagaaagtgggaagctggcaatgtacatttcatgggtgattcagttagtggtgtgccaaggtctaggaaacagccacgtgagtggagcaaaagctcatgggatgccaatcacagtgggaagaaaaaaataacaaagtctcattggagctaggaaggacagccagttagaggccagagtatcagacagatcatcttcatggattttggagtttccaatgatgctggcagaaataataatggagaaggggtcagcgacctgggtgctaaggtcatccatgaacgagggggaacgtccaggaggttggtagactgacagcatttcatacgcaggagaggtcatgaggtctgatgacaagtgcttcacgtaggtgagcttgggttcttcaaagaagaaagagagatggtttagaagctacagtggggtgctcgcttcagcagcacacagaccaaaacaggagtgacactgagaagattagcgtggccctgcacaaggatgacacacaaattcatgaagcgttccatattttgtatgaaaataccgttagatagaaggaataagttctagtgtttgatagtacagtagggaaattatagttaacaataaattattgtatatttcaaaatagctaggagagaagaattagagcgttccccacacaaaggaaagatgaatgtttgaggtgatggatatcccaattttacactgatttgatcatttcacattgtgtatagataacaaaatcttacatgtaccccccaaatatgcaactattatgtatcaatgcaatttttttttaaagaaactagcnnnnnnnnnnnnnnnnnnnnnnnnnnnnnnnnnnnnnnnnnnnnnnnnnnnnnnnnnnnnnnnnnnnnnnnnnnnnnnnnnnnnnnnnnnnnnnnnnnnnnnnnnnnnnnnnnnnnnnnnnnnnnnnnnnnnnnnnnnnnnnnnnnnnnnnnnnnnnnnnnnnnnnnnnnnnnnnnnnnnnnnnnnnnnnnnnnnnnnnnnnnnnnnnnnnnnnggaggctgcagtgagctgtgattgcaccactgcatgcccacttgggcaacagagtgagaccctgtcaaaaaaaaaaaaaaaaaaaaaaaaaaaaaaaa

SEQ ID NO: 858 - DNA, 1665 bp, Macaca Fascicularis
  misc_feature (1)...(1665): n = A,T,C or G
tgagtaacctttctgctctgttgcagcaacaagaccagaaagtgaatatccgcgtggctgtccttccttgctctgaaagcaccacctgcctgttccggacccggcccctggacgcctcagacactctagtgttcaatgaggtgttctgggtatccatgtcctatccagcccttcaccagaagaccttaagagtcgatgtctgtaccaccgacaggagccgtctggaagagtgcctgggaggcgcccagatcagcctggcggaggtctgcaggtctggggagaggtcgactcgctggtacaacctcctcagctacaaatacttgaagaaacagagcagggagctcaagccagtgggagtcacggcccctgccccagggcctgcaagcacggacgctgtgtctgctctgttggaacagacagcggtggagctggagaagaggcaggagggcagaagcagcacacagacgctggaagacagctggaggtatgaggagaccagtgagaatgaggcagtatgtttgccggctgaatcggagtgatagtgacagctccactctgtccaaaaagccaccttttgttcgaaactccctggagcgacgcagcgtccggatgaagcggccttcctcggtcaagtccctgcgctccgagcgtctgatccgcacctcgctggacctggagttagacctgcaggcgacaagaacctggcacagccaactgacccaggagatctcggtgctgaaggagctcaaggagcagctggaacaagctaagagccacggggagaaggagctgccgcagtggttgcgtgaggacgagcgtttccgcctgctgctgaggatgctggagaagcggcagatggaccaagcagagcacaagggtgagcttcagacagacaagatgatgagggcagctgccaaggatgtgcacaggctccgaggccagagctgtaaggagcccccagaagtgcagtctttcagggagaagatggcatttttcacccggcctcggatgaatatcccagctctctctgcagatgacgtctaatcgccagaaaagtatttcttttgttccctgaccaggctgtgaacattgactgtggctaaagttatttatgtggtgttatatgaaggtactgagtcacaagtcctctagtgctcttgttggtttgaagatgaactgattttttagtttgggtcctactgttgttattaaaaacagaacaaaaacaaaacacacacacacaaaaaaaaacaaaaaaaaaaaaaaaaaaaaaaaaaaaaaaaaaaatcctagttaacatattttgtncaatattaaaaaaatgcacagaatccattgttggggggagggattcanaggtgcatccatggatcttcttgagctgtgacgtgtttttatgtggctgcccaacgtggagcgggcggtgtgatagactgggcgggctaagcagcccagtctatgtgggtaacaggccacgctggtctcagatgcccagtgaagccactaacatgagtgaggggagggctgtggggagctccattaagttttatctccatcaataaagtggcctttcaaaaagaaaaaaaaaaaaaaaaaaaaaaaaaaaaaaaaaaaaaaaaaaaaaaaaaaaaaaaaaaaaaaaaaaaaaaaaaaaaaaaaaaaaaa

SEQ ID NO: 859 - DNA, 131 bp, Macaca Fascicularis
tattctgaactgccgggtgaacctgacttgttccctcctcaatctaccgttatacctttaagatgtgaatgatgggtgtgttgagtttaaaaccataccacttttgctctggcatgtaatgaaagtgttct

SEQ ID NO: 860 - DNA, 1758 bp, Macaca Fascicularis
gaagtgtgacttgaagttaccagtaaagccccaagttcagagcctgtagacatgtcaattcctgcctctcatcgctaagttggggtgtgttttccttaagaagcaaatgtgtgtgatcttggtagctaaccctcctcctcttagaagtttctgaaagatttttatgtggagggagctgggcttgttttcaaggacaaaggacagaaatggaccgaagcccagcaggcaagatttaagttagggttacaaaaggattgtctgcgctggagggttgctagatttttaaaaagtaaccgaaggagatattgagatcttcctccttaagagccattaatctgatctaggttatattattccttctggaaacaatgggtaagatgactttcttctagttgtgtttttttaattgtaaatctaattcttctttctctatttttgtctccaagtttttttcctgtatagttgtgtagtggtacttcgagcttgagccaccatgcccagccagttatttttgttttttgtagagacagagtctcactctgttgcccaggctggtctcgagctccgggcctcgggggatcctcctgctgcagcctctcaaagtgctgggattacagccacgaaccaccatgcccagctcctgccttactttctgagtagctgggactagtggtgctcgcctctgtgccaggctccagggaacacgctctgagctctccacatagaatagatgactaagagtggatgtcgctgtggccagcagctatgcccctcatcaccctttgtgaatgaccttggtcaagctcttgttgaattttctctctcagatctcttgaaataaggcttgtgaagtgtcttgagatcctcacaacaggtggtatacaatgaaaaatgtcagtgttctcctagttttgtttctttgatctccatttcattcctccttccggtgcctgcagctgccctcagccttcaaagtgattctcattggagagagaggatgcatctctccctggacccaatacctcttcctttactgtctaaaaatagcccagcctcttcaggcggggagttgtctttcgaaacctcttctcacctacttggcctcactcatttcagagtggaacagcactgctgctttccaagtttttctctcttccaagtttgcaatttagggcaggttcccctcttggatttgagtcaatgtcttatttcctgctggtattttgaatgtcttccatttgtcacctgtgtattttcatttcttgactagtgaaaaaacaggtagaaatgaggctttggcctgacctctgtgacctccgcaccaaccccctgatctgaagttgggcttgatgctgttatcactgaccctttgtttggagaaaacagtccagggcttgaaattggggctatgtttattcaaactaagcttctatgagcacatggtctgccccactcatcctcagagtatctgttggttttacttcatgttcagactgcagtgttgttaaagaaataaagctacagtgttttcagaagcatttgttatgttatactttacattcccactgttccaggctaagcctctcctctgggctccattgtttagtgcaggacaaagccaggttttctggcagcttccttttcatagcaatgctcagtagaggtgtagaatgagacctgcccaccttcttgggtgtttattaccccatttgtggattttactttaacttctgttacctttaaaaaaaaaaaaaaaaa

SEQ ID NO: 861 - DNA, 721 bp, Macaca Fascicularis
  misc_feature (1)...(721): n = A,T,C or G
cagatctcactcaacatcagagaattcacactggtgagaaaccctatgagtgtaaagagtgtgagaaagcctttagaagtggttcaaaacttattcagcatcaaagaatgcatactggtgagaaaccttatgaatgtaaggaatgtgggaagacctttagtagtggttcagaccttactcaacattacagaattcatactggtgagaaaccctatgaatgtaaggaatgtgggaaggcctttggtagtggctcaaaacttatccaacaccagttaatccatactggtgaaagaccctatgaatgtaaagaatgtagaaagtcctttagtagtggttcagctcttaatcggcaccagagaatacacactggtgagaaaccctatgaatgtggggagtgtgggaaagctttttgtagtggctcaagccttactcagcatcagagaattcatacaggtgagaaaccttatgaatgtaagaactgtgggaaggcttatgggaggggttcagagtttcagcaacataagaaaagtcataatggtaagaaactctgtgaattggagactatgaattgaaattatgtgctgaaggaaggactctaaatatatgacataagaaaattcatagtggtgaaaatctctacaaatagaactaaggtacagatgccttacttatgcttcacaggttagtcagtctaagaaaatnnnacagnaaaaaatccccc

SEQ ID NO: 862 - DNA, 2406 bp, Macaca Fascicularis
agttctgagtctctgttgacaaaaagggactggaaagcaaagacgctgagcttgagggagaggagggcggggacccagaggaaagaggcaccctatcacccaacttctagaacttggacttgaggttcgggaatttgctccatctctcccgccctctggcccttgaaatattcaccttttcctccctatttttatcttttattttctttcattgcttccctctccgccctcgcccatccttatgcacgaatctgctggtccagagaggcggaagaggctgatttccccgtgccagcggtgcccctgggattccctgtcttcgcgcagacttgagattaactctctcgtgcagtgcacaacccctgcttcctttgtttccttggactcaaaacaagtggctagaaggtgtctcttagagtggacttgtaagtacaaggccgggccagtgggggagagcgaggaggaggagggtgtgcagaccactttgtctatgcttgtcttggtgtcagcactcaccaaagaagctgacaatcatacagtggagagaacggacgctgtttgcacaggtagctggcgaatgtgtacgtcctggcatcgccacttacttactgcgggaggcgccagccggccgctgtttgcgctctggggacgctgagaggcctggggtccgcgcgcctccccagccatctgtgctctggcagggcggtaggcgctcctggctgctgactgacttaccggatctgggttactccgcctacgctctggggcgccctgaaatgcgggtagacacctgaggtttttgccatagccggcggcgcaaggtcccgcggaactcttgggattggagagaccaagaaggctttaaaggggcgacatgctggggcggcaaagaggaaaggttctccagggcgcgcgtgccggaggctccagctggctgccccagtaaaacctgaaagagctattttatccttacaatgtagactttttcctcctaattcacgctcttgtcctttttggatcggggaataattctgctgagcgtgtcccaacactcactgcatttgctttacagtacatccaagacacaaagttagcagaacttagttttccaaataggaattctgggctttcagtggaatgcccagatagtccataggttagcactatctgtgacagcaggcagatagtttaaatagcagggtcctaaaggactagttaggaggtggtcttcctggggaagctaagaatcttttatgggattatttgctccctggcatggccattctgctgtgccaagggtctacggaaaccacctttttgccctttgaattgtggagcactccaggctttctctccttcagttattcttgaagccttgccactcctgccgagaaactggttaaaatttttgctgccccagaaagggaagttatttaggtactctctttggatgtaaatttccaactacgtgatggagatctagagggttgtcattgcttgatctagcctccaattttcttatgaataatggtttcgttttccagaaaattcacaaaataattgatccctactcccctctctcttcaactgtacctttcgaatgcttgcatttgctgttttgagaaccgtattacatttacacattgcaaaaattgccaatgaaaagttcatttgttgacaattaagaaagtgaaaggacagctctgtcacttgaagccattttattgtttgtcagactgaataaaactttcctttggtgtctgcttctgtattctaaactggaagtagacatcatattccagctaagtagggaaagttttagaactttgggaataatttgtctatacatgtataatgctgagaagggtctgcagtgaagaaagtaagatagacttctccaatacaactattactcatttgataattcagtttcatttttgcttacataatctaagtagacctatatcagaaaccaagtttttatgtatgttatactaaattttagtaacaacgtctatattttaaaaatccaaaccccaaatttgctcatccaaattatgtcttggccagcaagttttacattagaagttttgagacttccgtttatttgtgtcttttacagaattgtatgacaatgacttttagacatttgttctttctgctttggaatatttatacaagaatggagaaggaacattaaactggagcataattgtcaaggcaatagagaatttagagaaataaaatagctgcatatctctaaaaaaaaaaaaaaaaaaaaaaaaaaaaaaaaaaaaaaaaaaaaaaaaaaaaaaaaaaaaaaaaaaaaaaaaaaaaaaaaaaaaaaaaaaaaaaaaaaaaaaaaaaaaaaaaaaaaaaaaaaaaaaaaaaaaaaaaaaaaaaaca

SEQ ID NO: 863 - DNA, 767 bp, Macaca Fascicularis
  misc_feature (1)...(767): n = A,T,C or G
tggagtgagacaaagnnnctatgagtgccaggagtgtggaaaatccttccggcaaaaaggtagtctaacgttacatgagagaatccacactggtcaaaagccttttgagtgcacccactgtggaaaaagcttcagggccaaaggcaatcttgttacacatcagcggatacacacgggagagaagccttatcagtgcaaggagtgtgggaaaagcttcagtcaacgaggtagtctcgctgnnnnnnnnnnnnnnnnnnnnnnnnagaaaccctannnnnnnnnnntttgtcagagaagcttcaggaatcagagtaacnnnnnnnnnnnnnnnnnnnnnnnnngtggtgagaagccctatagatgtgatcagtgtggaaaagccttcagtcagaaaggaagcttaattgttcacatcagagtccacacgggcctgaagccctatgcctgtacccagtgcaggaagagtttccacactagggggaattgtattctgcatggcaaaatccacacaggagagacaccctatctgtgtggccagtgnnnnnnnnnnnnnnnnnnnnnnnnnnnnnnnnnnnnnnnnnnnnnnnnnnnnnnnnnnnnnnnnaccctttgaccactctcttgaacagaagttctctttacaaattaagagtacaaaatnnnnnnnnnnnnnnnnnnctatccagttctatggaatgaatggagaatctttcagaaagaccatcatcgggtagggcaaactgacttttctccttcccctaaaagag

SEQ ID NO: 864 - DNA, 727 bp, Macaca Fascicularis
  misc_feature (1)...(727): n = A,T,C or G
accagaacagtaaactacgtaagacttagttnctatatggtcatatactatatagaataaagaattgttacgtaaattattaaatgggtatacagacctttacataaaaactaaggtacctcagtggaatctgctatagtgcttccccctccccacccctccattttgtttataaccttttagctatctaaataatacatattccatactcaggttagctggttagctagcaaaagaattaacatttgtgatatttacttgcaaactttactgaagccatattcattatcttctttgtcaccaaggctgttgaccttaaataaacattaagttatcttgcacaacactgtatatgtgtgtgtgcatgtgcctgtttctgtgtacatttgtgggaaataattatgtttgtttccacatgtattcatttttaatccattctgtaacttttctcgggggggggggtggtcattgagggtagggaaggttttatattttaagttgtcgttaaggtatttcattagtgttcctgagtgtaaaacagttttttcccaaatacttatggcagataagagcatttttgtaaataataaattagcaccgtttggattaaatttgcattcagttgttttttagacaggttcattgtcatgtaaagcaaatatctcaaaatttattttacatttagcaaaggtgcaagattgtttttggagtttgagagatattttcc

SEQ ID NO: 865 - DNA, 682 bp, Macaca Fascicularis
  misc_feature (1)...(682): n = A,T,C or G
actttgattataannnnnngcctcannnnnatttattctcaccgaaagtcatcacaagnnnatgaagaaggattctcaaggggcattttcagatttctgccatgtaggagatgctgttcgccaagtgagacnnnnnnnnnnnnntnnnnnnnnnnnnnnnnnnnnnnnnnnnnngatatgtgcaaacctctcagtgccacaagagtaaataaccaggcagagaagctgcacaagaagtcatctaatgaggaggagatcctcagcagggaacctggatctgtggtcttgctannnnnnnnnnnnnnnnnnnnnnntcctaacctcnnnnnnnnnnnnnnnnnnnnnnnnnnnnnnnnnnaggattacaggcgtgagccactgtgtctaccagataactacaaactgaaccaaatatatggaacaatggttttcagacactggacaataggcaaaacatttctgaggacagctctagggccaccgtgcaggaaaaaagaatgcaaatagagctcggtggtcccagtgtgttgaaaagaaaatgttgaggatttgagaaaagtcaaagcagccagaatttgaaggcagagcaccagagagaagaacgggctacgaagaggggacctacaaagatctgcagagggcttccctggactcttcagttgaaactgctcagtgtaggtgt

SEQ ID NO: 866 - DNA, 742 bp, Macaca Fascicularis
  misc_feature (1)...(742): n = A,T,C or G
agaaaaacnnnnnnnnnnnnnngtatacatctggccccatttctcaccagcctatatatttaactggactcactctcccatcttcagctaatgctacaatcctggagtcaccttttgactcatctttcccagtgccgccacaatccattctcacctgtcagcaaaatctgtcagttttaatctatgaaatctcttacagtatttccatctaaccattccttgttttccttctatttctatagccatccttctggttcagaaaccttttacttcttgtctcaactaatgtaatagcttcctaactcctttctctctatttcacacatatggtaaggttattttccttaaaaaaacccttattatgttgttccttagctcaaaatccttcaatgactgannnnnnnnnnnnnnnnnnnnnnnnnnnaagcttttagctatgaattcaaaagtagcnnnnnnnnnnnnnnnnnnnnnnntcacttccagcttcaccttccaaaccacctccatattccnnnnnnnnnnnnnnnnnnnnnnnnnnnagtcacatcttacagcttcctaccctcccagttttatttataccaagcctcctcctgaaatttcctttcctttctttctacctacccaagacatataatatgcttcaataaccagtcccttcctcctacaaaccctannnnnnnnnnnnnnnnnnnnnntttccgaagtcctctacacttggnnnnntcnnatgaagcag

SEQ ID NO: 867 - DNA, 1758 bp, Macaca Fascicularis
  misc_feature (1)...(1758): n = A,T,C or G
ggctagagtgcagtggcgcgatctcagctcactgcaacctgcgcctcccttnnnnnnnnnnnnnnnnnnnnnnnnnnnnnnnnnnnnnnnnnnnnnnnnnacacccacacaggccaccgcgcctggcctcaaaatacttttttccttagctgtttttatcgagtggccaggtgcctattatagtgttctaggaagacgttagtcgggaccaagaacgtgggaagtactggtttccatatcgatttggtggtgatcgtaaactgattcaaatctctgaatcccaactgcacgccgaatttacggaaccaaaaacgctctgacgcccgcatttatgggcggacgcacaagtatgttacgatggctcgattgcttttgcctagcggaaatcattcagtaaggaccaagcactaaataaccaaggaaaaggaagtgagtcaaggacgtactcctcttggtgacagcgtgggccgctgagatttgggagtctgcgctgggtccgcttggagttctgagcggatggaagatttcagtcatgtttgcacccgcggtgatgcgtgcttttcgcaagaacaagactctccgctacggagtccccatgttggtgagtggagtgaggaggatcttccgcaaggggtgagaccctcctcctcggcaggatcaagacctgggagggaatctgtaaaatgttaagttaaacgggggcactcgggctaggaaggggctagcgacgggctgagagctttcctgaaagctcttctaccagtcttttcctacccacaccccgcacttccccgccgctgtcctccactcccagttggatctcaggtgtactaggatctgtctgcttgtgagcgtggcatctttcccatcgtcgaacgcggtcattgttactacccttgattcacagttaagtgaattgaagctcagagaattcagtcagaaccacagtttaagccaagtttggatgattactaagcttgcttcctcgccgccaccttagctatattttgacgatactgtggatcattgggactagatgtattccatttaactgtaccaattcctggtatctttctgtttcatctttctagtttgtgaattagcttaattcttagagttgttttgatgaactgataacaccttgtgaatgaagtgttgagtacggtgcccgccacattgtagccagaatggttgcagtgttataatttcttaagcacgttgaaaacagcttccgtgtttgtatggttgcatccaattccacactgagttccctaaggatgttgtgaaaatgcaggctgaggctggcttaagacaaccagagttgaaatccagatgactctatttgctttttgatcacgggcaatttattttgcttcagcaagccttgatgtgttagtaaatgaaataattaaagcatatgaacagaagctgctttcttttaaatacagaaaagatttttattttgtatgaatattggcacagatgaaatgaccaacttttccatttaagcagactaaaggaaataagtgaccttagaaaggtaatgggtattttacacatttttgaaaaatatagattcatcaaatttggattttaggaatctccaaaagattcaaccatttaaagtatctgggccaagcacgatggctcacacctgtaatcccagtgttaggggaagccaagacaggaggatcgcttcaggtcaggagttccagaccagcaagacctctgtctctccaaaaaaaaaaaaaaaaaaaa

SEQ ID NO: 868 - DNA, 775 bp, Macaca Fascicularis
  misc_feature (1)...(775): n = A,T,C or G
tgaagaatagagtgagtagacttactttctgnnntcgttatgtaaagtgaattaagagtttaaagagaagcaagtatgnnnnnnntgatcttgtgaaatctcaagtagctaaaaggaagtactgacattttttaactggaagtatttgaatttacctggatttaaacctgcattggcattttttataacacatatgatgactgaatttctgtagatcccgtaggaaatcacctatttgttttggaaaaatcatcttcctgaactttgcaggtctttaatcaaatttgcacatggttctgatgggtttatagctctttactgcctccctgattttgcatgtgtctttataccacctcctaatttcttacttcctttttctccttatcactatactctctttctctccaaattccatcagtctttaaatgttcacttcaaattctatcttcataaagtttttctcacaccttcttttctgtaaactctttcctgtggtttgaatgtttgtgtcccctcaaaattcatatgttgaaacctaattcccagtgtgataatattaagaggtggggcctttgggaagtgattagaccattagatttccagcgtcatgaatgggattaatgccctcatgatagaggctttagggagcttatcccttttgccatatgaagatgcagcaaagaggcagcaaaaaggtaccatttatgaagcagaaactaagcccttaccannnnnnnnnnnnnnnnnnnccttgacctgaacttctcagcctcca

SEQ ID NO: 869 - DNA, 785 bp, Macaca Fascicularis
  misc_feature (1)...(785): n = A,T,C or G
tagttctcagtcacgtatatgatcggtatgggnnnctgnngcacagacannnggcaatatatgtgtcccnntgggccagtctccccagaggagaggggcaggcaggaaagagtggggatcctaaggttactacagggggtggctaattcagctcagtgtcatccacaacttcctatattagggataaaacatacaggtgcacaagagctggggtatagcccataggtgatggagagaaaagtggtcagtccttcttgggcctggaggttagaagtcaagtttctctgctttcactgctcactcgctctctcctgcaatgattgatgatcactccgtgnnnnnnnnnnnnnnnncagagatgacctgggaattcagttgcaaagtatattaagatctgggagaggtaccagtctcctttccagctggagaggccccaacactggatggttctatagggagcctagggagcctggtcatcaacttgcaatacctcacagagccagttcacatcccactctgagctcccacgagaaacactgcttctccaggcccggggttgttggggagagaggcagaggcagctggagcgccgttctctcctgccgggacaccgcttgggctttggtattgacagagtggctgacagttatcttccaaccccaactggcttgggggcaggacaagggctaggcttgacggtggccaggcttgcctgctccccgcctgggatgcccctgctctggacctctcatttctcattggtttatttttcaatgcatctttaa

SEQ ID NO: 870 - DNA, 761 bp, Macaca Fascicularis
  misc_feature (1)...(761): n = A,T,C or G
ttgagagtttgctattttaactggttttacccagcttgcttaggcagtctgtctaatgctgcatttcctactccaaggcagcattcaaggagcctaatttatcagcacactttagggactttttccctagatgtacctcactgaaggaattttaaatgaaaagcttgctgggtttagggnnnnnnnnnnntgtaccttaaaatgttagcagacatagattaagacactgggagccaatgaaacagttgagggtttgctgtgtgttgatgtttctgtattttatcacccccttcctgcaacattatttctgtggaatctacctgcccttttgttttttagatacaagggcttggttttactaccaaggctgcgctcaaggccccggctttnnnnnnnnnnnnnnnnnnnnnnnnnnnnnnnnnnnnnattgtaggtgtgattcttggcacccnnnnnnnnnnnnnnnnnttacatgatccaagcccagaaccaaaactcaggcactgcatagatggccagtttggcaaactactgacctagcttgttgccaattgttgattgagcttcccataactccatttctgttcctctgtatagagccaccttctattcccatcatgagcctttaggtctccatttgcatgttgcaaatactatgtgccatgtaggtannncattcagggcattgctctaaactacaaaaaaaggttcccctgaggagtggcgctcacnnnntgtggcagtattggttgtgagaaaag

SEQ ID NO: 871 - DNA, 597 bp, Macaca Fascicularis
  misc_feature (1)...(597): n = A,T,C or G
gggtcagagcgctcacgggatcaatgtgcaaatccaagccaggaagtnctgctccgggtggaaggtcaaaccttccctccagggaaccagggggctccagcgggcatcggaggcaagttcttggcctctgctgccaggtcccccagtccccccaggctgcattaatgtcctctggaataagagcctgtggctgaagcagagggccttctgctagagttttccagggtctggaaggagggtcctccagaaggagctccgaggtagccccactgtggccccctggacnnnnnnnnnnnnnnnnnnnnnnnntactacccaggggccggcactgggagtccggggcagatttctcctgcactaggctatgggggtttggaggnnnnnnnnnnnnnnnnnnnnnnnnnggctggggctgggggaagaatgtctgagacaaggtttgggannnnnnnnnnnnnnnnnnnnnnnnnnnnnnnnnnnngcaggggctgnnnnnnnnnnnnnnnnnnnnnnccttgtgggaaggtggggcagggaggacactgcccgtcacctctgtccccagtcacttcctgcttgacctgactcttcacatgt

SEQ ID NO: 872 - DNA, 1468 bp, Macaca Fascicularis
  misc_feature (1)...(1468): n = A,T,C or G
tgcgctatcagatggtacagtagttcatcaaaatctatccgcaaacgctatggcttatgcctggatttctagcactgtaggaggccaaagcggatggatcacttgaacccggtggtttgagaccagcctgggcaacatggcaaaactctgtctctacagaaaaaagaaaaaaaaaatagccagtcatggtggtgcatgcctgtagtcccagttactactgaggttgaggcaggagaatcacttgagcctcagagatggaggtttcaatgaggagagatcacaccaccacaccactgccctgcatgacagggtaagatgctgtctcttttataaagaaagaagaaagagagagagagagagagagagaaagaaagaaagagagaaaggaaggatatgacgcaactgaatcaaaaactagaagaaaagacagaaagatagagaacgagaggacgagagactggatgaggaataaagaggaatgacgcctgcgcttgtttgctcacgtccgccatgcgtaggcttttgcgagcccaacggaagtggattttctcgatcgcgcgcactcgactaattttttcgggttgcttcgtaaagcgctctccccccccccatcccccttatgtcttctcctttttctctccacccctcgcggggtcgtctcctgtactatttctcctcgccccccgctattaatcaatctgctcgttcatctcctcccccccggttgtcataaatttctccttgccggcgatgcctgcggtgactcaccaactgatcgcgggcgcgttgaggtgtgtccgccgcgccttcctcccggcgcgctcttagtaattataatgtgcgcccgtaacctttgtcgcgcctggtcggggcgttccgttgacatttcttatactaacctccactgctgcctggttcagcctccgccatgctacattctctttgctcccgcgtgtgagcccgagcttactcttctcactaatctggttgcggttcgttgttatgttctattgacgctgctcactcagtgtgagtattgtttctggcctaatcagcgtgggagtatttattatgcgccctccgcgacttgcattctatccttcgcacacttctttgtcttctctcgcctgtgattctctctgatcggtgatatactcgtgcttcgtatcatctcttatattatagtcgacatcttcgccgacgcccttagtatctccacgctctcgacgcgcttcaacaaatccatcatttctgtatctcgtatacattcagttaccgtaacggctgactttccttcgtgtcgtgtcatcactccctacctctacccctgtcgtatttgcgtcgctnctctcttttctgtacgactatcgctcgtcgctcgtcgatatggccatatcgtctacttcttcagctttaatttctgtcgacatggtatgcgttcgtgtaatacccgactcatctacatctt

SEQ ID NO: 873 - DNA, 715 bp, Macaca Fascicularis
  misc_feature (1)...(715): n = A,T,C or G
cagatcagcagcagcattagatnntcacagaagtacgaaccctattgtgaactggtatgtgagggatttagggtgccatattccttatgagactctaatgcctgatgatctgagttggaacggtttcatcctgaaaccattcccccatctatggaaaaattgtcttccatgaaactggtccccaaaagggtggggaccacaggtttaaagcatggccatatttctttatattaaaattctagtttgtacatttcttttagaaacaattacttgttactttggaatcatttatttcttccatgcttcctccataaagactgataagtcttggatgcaatctgtaaagaaaacacatgtataattcgttatttcatcaacatattttgttatttttcacacatacacttaataagtatggtacacaatgccaaatacaaattcataacatagcattcacaagagctgtcatgtagaaaacacagctgtaatctagaaaactgaggtctgaaaaatcatcaacagtaataactgacttccttgagtgtctaatgttctccattgcctttttaaaatagtcatgcctctagaacacccatgtctagtgggcacccctgcatgctgcttctaaccactgagtgtcacaatgcctaccaaggatgagtttgtaggttcctaaacctgtttctaccagttgctatgtaaannnttccgaagg

SEQ ID NO: 874 - DNA, 2073 bp, Macaca Fascicularis
  misc_feature (1)...(2073): n = A,T,C or G
tactggagcagcatgtggactttcgggcgccgcgcagttgccggcctcctggcgtccccgagcccggcccaggcccagaccctcacccgggccccgcggctggcagagttggcccagctctgcagccgccggggcctgcgcaccggcatcaatgcgacccgcacaacccaccacaccagttcgaacctccgtggcctcaaccagattcggaatgtcaaaaggcagagtgtctacttgatgaatttgaggaaatcgggaactttgggccacccaggctctctagatgacaccacctatgaaagactagcagaggaaacgctggactctttagcagagttttttgaagaccttgcagacaagccatacacctttgaggactatgatgtttcctttgggagtggtgtcttaactgttaaactgggtggagatctaggaacctacgtgatcaacaagcagacgccaaacaagcaaatctggttatcttctccatccagtggacccaagcgttatgaccggactgggaaaaactgggtgtattcccacgacggcgtttccctccatgagctgctgggcgcagagctcactaaagccttaaaaaccaaactggacttgtcttccttggcctattccggaaaagacgcttgatgcccagcccagttttaaggactttaaaagctattaggccaataccccagcttcattatgcagctgaggtctgtttttttgttgttgttatttttttcattcctgcttttgaggacagttgggctatgtgtcacagctctgtagaaagaatgtgttgcctcctatcttgcccccaagttctgattttttatttctacagaagattttttggattgtctgatttcctccctcacatgctatcccttatcttttacaatgtcttatgcctatcccctgaatataacaacctttaaaaaagcaaaataataagaaggaaaaattccaggaggaaaaatgaattgtcttcactcttcattctttgaaggatttactgcaaaaagtacatgaagagcagctggtcaacctgctcactgttctgtctccaaatgagacacattaaagggtagcctacaaatgttttcaggcttctttcaaagtgtaagcacttctgagctctttagcattgaagtgttgaaagcaacccacatggaaagaccgtttcttatttgtgatttgtggctgccagggagtggcctgtactgggttgtccaggaagacccagtgctgtttcttccgcatattcacatatgtgtctgtgtgtatatatgtattttcaatttaagggttagtatggaatcagctgctacaaaaatgcaaaaaatcttccaaagacaagaaaagaggaaaaaaagccaatttttgtgagctgagtgatatagtgtaataaacaaaatcatggagttgaggaggtaccttgtcaatgtaaaggggcatataaatgaaagagatactcatgttgataaagagagccgcggtcttagacatagttccgtcacaaagtagttgtccctttgtggacaagtttcccaaactccctggacctctgcttccccatctgttaaatgagaggatagagcatggttgattcccagcattcagtggtcctgtcaagcagcctcacaggcgagctctaattcccgttgggtagatgaggggatgacaaagaacagtttttaagttatataggaaacatggttattagtgttgccctattgagatttcagttgaattcatgtgataataatagccatccttggccaggcacannnnnnnnnnnnnnnnnnnnnnnnnnnnnnnnnnnnnnnnnnnnnnnnnnnnnnnnnnnnnnnnnnnnnnnnnnnnnnnnnnnnnnnnnnnnnnnnnnnnnnnnnnnnnnnnnnnnnnnnnnnnnntgggcatggtggcatgcagctgtaatcccaggtacttgggaggctgagacgggagaattgcctgaccccgggaggcagaggttacagtgagtcgagatcgtgcctgagcgactgagtgagactccgtctcaaaaaaaaaaaaaaaaaaggccaccac

SEQ ID NO: 875 - DNA, 748 bp, Macaca Fascicularis
  misc_feature (1)...(748): n = A,T,C or G
cagcctnnnnngctgggaactnnnnagctgggaccacaggcatgtgccaccatnnnaggttaatttttcatatttttatgaaaatgagacggggcttcactatgttgaaaccctctacggggtagacacgaggtttcactatgttggccgggctnnnnnnnnnnnnnnnnnnnnnnnnnnnnnnnnnnnnnnnnnnnnnnnnnnnnnnnnnnnnnnnnnnnnnnnnaagcgcgcggcctgcagtttagatttttgaatggattctatttcttccatggtaaataacaatgtaactgcagcagaggatatccatatagggaagtagagaagggaaaggaaagaccaggcccttgctctgtaccacccggttcccactctggcgagttcccgtcaagttctgcggtaggtaccatttgatgtagggggccagtaccatacaatttgacatcttgctttttttccatccatttaaaacacattggtactgtgagactgcccgggaaggctgccttctctcctagaatcgggcgtttccctcctgctggccatctccagcgtcccgtggttccatgctgagtcacaggatgcagtgagcatctttccacatcacccttttcgtactttgggtcatcctcttccagggctgatggactttggggcttggccattttctgacacaacactaagtcgtctggctttttgttttatttggtcaacgttgnnnnttttgtacctactagctagtcta

SEQ ID NO: 876 - DNA, 701 bp, Macaca Fascicularis
ctaacaaactcaaatatggtgtttctaacattttaaaactttgaaatccagcaaacatcagtgccaggttaactgtttttttgtgcagatgccagaataaggccatctctggtaaattgaagagcttcctggtatttcaaggtgagctgttaaaagaactggtaccatttctcagtgtaaatcagggctttctcaatgctctgtcactgaaacaaaatacagaaatagggtctacataagataacttctgtcttctgtaaacctagtctcaaatgtttatgaaaataatttatattgaatgacttactgcttaagtgtgacatcccattccttctgttaatatatggggctttgatgttgtcatttttaagggatggggtggtgtatgtagccaagaagaagttaaccaacaccactttctttctgtggcttatttgcctctctccaagttctagaggcttgtgtgtattgtgtttctttttacatgtattgttttgatactgaatacatgacaaggaccatgtaactttgtgttcgcattgctatagaaagtttagagagttaatatttctgttatcttaaatggtcccgactcttttttttcatattgactcataaacataactgcatacaaattatctctgatagaagtgctctcaaattatactctgtatttggttttagacgactgtatggtattt

SEQ ID NO: 877 - DNA, 643 bp, Macaca Fascicularis
  misc_feature (1)...(643): n = A,T,C or G
acaggagaatnnnnnnnnnnnnnnnnnnggannttgccttaagtctaagatggcgccnnnnntccagcctgggcgacagannnnnnnnnnnnntcacaaaaaaaaaataaaaaaaaaggagtcggacaaagaaccacaggatgtagaagacaactgtgtgaagtatttgtgagggacagggatgtggccctctgtgttaaaaataacgtgtcctgctttggcaaagagaagaacacggccactgcccgctttcaaggcaagatcagccttttttgttttgtttttctttctttttcctggtcatgaggatgaaaattactgagtggcccttaaagagggaagtttcttttcagctgttctcttttgcctgtaggtgggagggtgcggattgctgccgtcctagctagaggaatggctttgcttgaatgtgtagcgcacacgcatgggtgtttctgtgtgctagttgcttcttgctgctgcttcctgctagtctgggactcacatgcataacgtgagatatatatatatataaatgtataaatatatattttatttttttttaattctctggagcttttggttccaatcagttcctgttgttagtcatagaagcnnntcccttcccccattcccgtatccatca

SEQ ID NO: 878 - DNA, 728 bp, Macaca Fascicularis
  misc_feature (1)...(728): n = A,T,C or G
ctttgcatatgtgggctngtgtacgtgtgtgtgtcatgtgtggcagaggggcttcttaagccctgnnngataggtgcagaacgtcggctatcagaatgagcatnnnnnnnnnnnnnnnnnnnnnnnnnnncatgtgagatgatccaagaccaaaacaaggccctagagtctagactgcagtaaaacccaatactcaagtaggacagaaggtggaaggctcatatggataaaaggcccaaagtagaagacagatggtttgagactcgagacccgaggactaagatnnnnnnnnnnnnnnncaagatagatagaagcctcaggcctgaaacgaacaaaagcctcaagagccaagaaaacagggtggtctgaattggacagaaggcctgagttggatggaagtctcaagtcttgagtttgaagtcttaagacctgggacaggacacatggaaggcctaagaactgagacttgtgacacaaggccaaagacctaagattagcccggggttgtagttggaagacctacaacccaaggatggaaggcctctgtcacaaaccctacctatatggatagaggannnnnnnnnnnnnnnnatctcaagactaaaggccggaatctggaggtccatgacctagaacccaggaaggatggaagcttgaagacctggggaaatcccaagatgagaaccctaaaccccacctcttttctattgtttacacttcttactctt

SEQ ID NO: 879 - DNA, 1663 bp, Macaca Fascicularis
gtgcgatgtgctgcgctgcggcgaggcaggaggccggcttcctggggtagcggtataagcgggcgcttactctgtgcgctcgctccccgaaccctgcaccggccatgcgcccggccttggcggtgggcctggtgttcgcaggctgctgcagtaacgtgatcttcctagagctcctggcccggaagcatccaggatgtgggaacattgtgacatttgcacaatttttatttattgctgtggaaggcttcctctttgaagctgatttgggaaggaagccaccagctatcccaataaggtactatgccataatggtgaccatgttcttcaccgtgagcgtggtggacaactatgccctgaatctcaacattgccatgcccctgcatatgatatttagatcgggttctctaattcatcctcaccacggagtgcgcctccctcaccgtcacgctcgtcgtgaccctacgcaaatttgtgagcctcatcttttccatcttgtacttccagaaccccttcaccctgtggcactggctgggcaccctgtttgtcttcattgggaccttaatgtacacagaggtgtggaacaacctagggaccacaaaaagtgagcctcagaaggacaacaagaagaactgagacctgcctggagtacgtagactggtgtcgtcgtgagggagggaccactgtttcgcttttgttaatgccgagctacccgcagtgctgagccagccatgccacaggaaatcttcaggaggaggggacttctcatattgctcatactgacacgtgtagactgaatagaaacccctcagccctaaaatagaaaaaagaacagttctggactattgaacagcccattcatttatttgttttgtttaccaaaatattcagtattattcttgtttattgaattctgagcctccatgaactactggcttactatccatggtcttggaaaacattgtcccttctgttgctgttctaatgcatctctgccacagcagtcattgtcatcctgtggccttatcccttttgtctcccatcaccttttccttcctcagcagcacctcactgtcagtcagacgctgcaggcaccaccatcaccaggagtggccaagtaaactgagacaccggtaacagcggggctggacttcctcccgcgttttgggaaggaaacagatgttcccttgagctgattcccagtgacaccggagcaacactagtaggactcctctttcccagattttgcttttttttttttccctatgcaaaagtcagatgcttctatccgttgctttctgtggttagggcagccctgcagcatatctcacagcagacatagtgttcataacaaagaaaggttgtgccgggcacggtggctcatgcctgtaatcccagccctttgggaggctgagatgggcgtatcacttgaggtcaggagttcaagaccaatctggccaacatggtgaaaccccaactctactaaaaatacaaaaattagctgggtgtggtggcgcatgcctgtaatcccagctacttgggaggctgaggcaggagaatcacttgaacccgggagatgaaggttgcagtgagctgaggtcttgctactgtactcctgcctgtgcaacagagtgagattctatctcaaaaaaaaaaaaaaaaaaaa

SEQ ID NO: 880 - DNA, 738 bp, Macaca Fascicularis
  misc_feature (1)...(738): n = A,T,C or G
tcagcacanntncatgnnngctgcccagacnnntcaccatcccctacctgacagcncttcttccancnnnnnnnnnnnnnnnnnnnnnnnnnnnnnnnnnnnnnnnnnnnnnnnnnnnnnnnnnnnnnncggagaaccttgctcttcatatcagcatggaggattctggagccgagaaggagaacacctctgtgttgcagcagaacccctccttgtcgggaagccggaatggggaggagaacatcatcgataacccttatctgcggcccgtgaagaagcccaagatccgcaggaagaagcgcatactgaaaaaagttcttaattctgcgaacatcaacttcccgtgcccaggtgcaagtgtgggggcagctggcccagggtagagctttgccatggactctggcgcttctggaaaaaacattaaggtatttttcctccccttggagcttgtggcctacctcatctccatttgattagtagtttttctttttcttctttgttaaaaagttatttaattttgaatagataatatatgtatgcagtataaaatttaaaagacagaaaaagatataagtgataacaaaatatcttcctcctcccctgtttctcagaggctcagacctcatccctggcagctgctattatgttactgttaatatgaccttatgtattcttccagaaatattnnnnnnnnnnnnnnnnaacacttatattttctacttctcagtgtattttcgg

SEQ ID NO: 881 - DNA, 2302 bp, Macaca Fascicularis
agaacgcccttctctctcctccccacaagccaaggaatattctaggcccacacccaggggcccaccttctagacatggacacccgttgccctgctgtaagaacaagactcatggacagtcttgtttcatctatatttgcatccctccccagcgagtactttctgatctaggtcttctcccaacaccagcagtttgaaaagggataaaagaatccttacacaggagccattctcccgctaggctggtgagtcacagatcaagagagccaggcgtcattgtccagcaagtcaggttgactcaaggtggacgtattcaggacagcagaaggtcctgagcctatgggagtggttcctctgaaccacccaggtcccagaaaacaataaagtctttcagcagcctgtggaggtcaggagaggaccggggaccaggagggaaggtgcagaacaagaggcagatgaccactacctctgcctgggagacaccttgtcctagagtagggggctggcctgctaagtggacttttttcattcttgggccaaggggaagtagccaatgagtaacctggtccagaggttcagggtcaacgtgtttcagggatgtagtgaaaatagatacagccctcaaaggatcctctgcagtttccccaggggacccaattcaggaattatcttccttgcccccagatggaggcaaggggtaaatgttatccttatttacaacctgggaataaaactgcttccaccagcactttctgccccactgacttaagaactgggaagtgcttgtggcttcataagccacagttactctgtgatctctggcactttggagggaaaatgttggaatcatttctcataatgaacgacacagcatgcccttcttcctgatgccaacagaactctgcttgtcaatccgatttctcagtttttctccctgcaagagctcagggtccaaaagatctattattctggcacatgcactctcctgaaacaattttaatcctcataacattcttcattccctcaacccttcttcattcattcccttggaacacttgttccatttgtccttccatctgcctcttgtcgtaactctcatgtgctctagacactgactcagactccctttcaaagaacaggggacagcctaaaggtatctggtatggaggggttgggagttgacctgctaagtggctgcttgaaatgccaagtgctaggaacataccctctcaagacgttttctccagacagaaaatgtggagcacacagctcaactggggttgttgtgcaggctcctgcccaaaggccagaattgttcaggactcccagaggcagcctgaatagcccaggcccaggccacttcgtgggatacgggagggagatttccatggagatatgacctctgagtctgtggcacttgagtagcattttccaatgtaaccttggtgatcattgcctactgggacccttggtgcttcttatcaacctgtgctgatcacgcccataggtgtggttgtatcccttgagtggtggcttcctagatcctgaacaaaccttcctggtctctttctccccaggtgtgggccttcacatacacccagcagatcctccaggaggagctgtgcctgtcagtcatcaccttgttccctggcgccccagtggttcttgtcctttgcaagaatggagatgacagacagcaatggaccagaactggttcccacatcgagcacatagcatcccacctctgcctcgatacagatatgttcggtgatggcaccgagaacggcaaggaagtcgtcgtcaacccatgtgagtcttcactcatgagccagcactgggacatggtgagctcttgaggacccctgccagaagcagcaagggccacggggtggtgcttccctggaccagaacagactggaaactgggcagcaagcagcccacaaccacctcggacatcctggactgggaggtggaggcagagttccccgcccaggataggagtaactgtctcagggaggacagaggaaaataccacaagccaatggggctcagagacaaatcccacatgttctcaaggccattaagttccagtcctggccagtcttttcgtgattggtatctggagacagaaacctaatgggaagtgtttgttgttccttttcttacaaaggaagcactctctggaggccagagggaaaagccttctttgtcactaggccaggactacattgagagacgaagaatggaggttgttttcaaaacaaataaagaaaaccttagaagttgaaaaaaaaaaaaaaaaa

SEQ ID NO: 882 - DNA, 701 bp, Macaca Fascicularis
ctcatttgagttaacaatggtgttagtgatagattttctatttcttttcccttgatgtttactttcaagtaacacaaactcctccatcaggccatgatctatagaacctcctaatgagagtatctgggtgattgtgatcccaaaccatctctccaaagcattaatatccaatcatgtgctgtatgttttaatcagcagaagcatgtttttatgtttgtataaaagaagattgttatgggtggggatggaggtatagaccatgcatggtcaccttcaagctattttaataaaggatcttaaaataggcaggagaactgtgaacaagacaccctaataatgggttgatggctgatgtagcaaatcttctggaaacacaaactcttttaaggaagtccctaatttagaaatacccacaaacttcatatatcattattagcaaacaattggaaggaagtcccttgaatgttgagaagaggaaaatctattggctctcctgggtctcttaatctcagaaatgccaatcaggtcaaggtctgctactttttgtatgtgtgtgatgcttctcccaaaggtatattaactatataagagagttgtgacaaaacagaatgataaagctgccaacgataaaacacacgcttatagttccagctgcttgggagattgaggagggaggatgacttgaagaccaggtgttcaag

SEQ ID NO: 883 - DNA, 642 bp, Macaca Fascicularis
  misc_feature (1)...(642): n = A,T,C or G
tttcccccctaaatgggacnnnnnnnnnnnnnnnnnnnnnnnnnnnnnnnnnnnnntggctcatgcctgtaatctcaacactgggaggctgaggcggaggtcagnnnnnnnnnnnnnnnnnnnnnnnnnnnnnnnnnnnnnnnnnnnnnnnnnnnnnnnnnnnnnnnnnnnnnnnnnnnnnnnnnnnnnnnnnnnnnnnnnnnnnnnnnnnnnnnnnnnnnnnnnnnnnnnnnnnnnnnnnnnnnnnnnnnnnnnnnnnnnnnnnnnnnnnnnnnnnnnnnnnnnnnnnnnnnnnnnnnnnnnnnnnatcccaaaaacaaacagctgtcccaggccaagagtacttgggaaagcccttcatggagaacccagtttagaccaagtagcaaaagctgtggtcacaacaaaacaatgtgaggaagaaatcttacaaatcaccactgccctttttcnnnnnnnnnnnnnnnntccatcttttcggtgctccctaatccaagcagcttgactttagagaaattgcagaagcnnnnnnnnnnnnnnnatgctgtgtgactttatgtaagtcactcacctcactgagccacctccatttcttcatctgtgaaatgggcataacagtaatacataaccctacctacctca

SEQ ID NO: 884 - DNA, 678 bp, Macaca Fascicularis
aatgagatggaagactacaagagggagcaagtcataaatcgggctggaattgttcaagaggatgtgcagccaccagggttaaaagtgtggtctgatccatttggcaggaaatgagaaggcggtcaccagctctgattaagaaaggagatttcttcatgctttcaatcctgcatggggtacagtcagtcacctcaccagagaatgacggctggagaagaaaactccaaaataccataaataagagtgtttgtaacaaaagactgtgcacaaggattaatatttcccttcttaagtatccaaagaactctggaacaaattataccattaggaaggttttcgtgattcagttgattttccaaaatgaagctatctcacccagctgggtttggagcaatctgcttattattctgtcgttaccacttactcaagcgagctgtgatatgaatacaagcaaccagtgggctcgggaaggtccgggtctgttttgccatcttccagataagagatttcagtaaaaaactgccatgctgagctgccttatagagctctttgaaaatgttcaagttgatcaagctctttgaggacaaggtagttcgtgcagctcatgctgaagattgcaccatgttggaaaataaatatgaagcaagtcaaactagatgcatacacttgtgtagaaat

SEQ ID NO: 885 - DNA, 1014 bp, Macaca Fascicularis
  misc_feature (1)...(1014): n = A,T,C or G
ctgtcannnnaagtggcagacttaatatggaaagtttttataattatcagtttgaaaaagtattttaagatgatacagaaggcatccaaaacaacagaaaaaaaaaagccacatcattttagatgaattgcgtgccttaaaatggtgaacattagaaaattaaacaagtctgaattccacaagtagttccaagtcaccaagtgacaaaaacaaggttaacgttaaaaaacaacaacagcgacaacgacaaaaaactccaagctgcagtggatttaattatgaggctaaaactacctcatactttcctgggaagaactaattagctatggtttattgtagggttttgtttgtttgttttttaaagcaaattatttccatattccagtttgatcttttttgtcatctttgtttcaaaattccataaaaggtgctcctttcctccctcttttatacaagtttcttgttcatattgtnnnnnnnnnnnnnnnnnnnnnnnnttttggaacattttctatctatattccaaagcatgtaatatatacataaaaatgatttgttaaactggtccttagtcatttgtataattagaattgaagtttagggaaaatttttggaaaaacaagcaaaaaaataacttattccttttttgcatatttgtatagccttctagaaacagaaataacccttttgcatattcttttattgttctgacttttcaagacctattatttttttacataggtcaataaacaaaaggtgtgctactgaaaatgtttatgtattcttccatttatgtcagggcttcatgtgaagcaggttgcagtgttctacttcgagtaatcatactgggcaagatttcggatttttagttatagtattaccatattttattccaggttgtacatttttaaatatttacatttgaaannnngggttcatcttttgattgatggcatattctacttgaattggcagttttttcttaatagtacattaaaaataatgctgtgtcta

SEQ ID NO: 886 - DNA, 2396 bp, Macaca Fascicularis
ctttttcattctgtaacagtcctctacgcagctaagtttctcataacacattatgatgtaggggagggaggaaggaggcctgatgtaggaggtacaccctctccctgaatgaaattcatttggggcactgtctgctcgcatgttctgctctgggacaaaatgggtggcagaagctacaatttgtactaagctaatgaaaagagagaagacaagaatggggaagagaagggcgaagaaggcaaaaagagaagagaagaaaaagagaagagagagaaggagaaacgagaaaagaagaaaccaaatgaagaggatgtgtgagagaaaaaaatacgaaacaggaactctggagttttttgaggaatagttctttaataactttctcatattgttccaagtttctggtcttcactctagcactaattgaaaacaaaaaattattttccaagaactgttactttcctccatattttcgaatttatcaacagagaattgtacagagtgatttattttacaacaataaaattctgtttgtgagcttatagttggctgcttcaccaggactctacaaattattcagaacccaaggagacctagaggatcaagacataatgggagcatttttagacaagccaaagatggaaaagcataatgcccaggggcagggtaatgggttgcgatatgggctaagcagcatgcaaggttggcgtgttgaaatggaggatgcgcatacggctgtgatcggtttgccaagtggacttgaatcgtggtcattctttgctgtgtatgatgggcatgctggttctcaggttgccaaatactgctgtgagcatttgttagatcacatcaccaataaccaggattttaaagggtctgcaggagcaccttctgtggaaaatgtaatgattcagcgtgtgaatggctctctggctgtatcaagggcccttggggattttgattacaaatgtgtccatggaaaaggtcctactgagcagcttgtctcaccagagcctgaagtccatgatattgaaagatctgaagaagatgatcagttcattatccttgcatgtgatggtatctgggatgttatgggaaatgaagagctctgtgattttgtaagatccagacttgaagtcactgatgaccttgagaaagtttgcaatgaagtagtcgacacctgtttgtataagggaagtcgagacaacatgagtgtgattttgatctgttttccaaatgcacccaaagtatcgccagaagcagtgaagaaggaggcagagttggacaagtacctggaatgcagagtagaagaaatcataaagaagcagggggaaggcgtccccgacttagtccatgtgatgcgcacattagcgagtgagaacatccccagcctcccaccagggggtgaattggcaagcaagaggaatgttattgaagccgtttacaatagactgaatccttacaaaaatgatgacactgactctacatcaacagatgatatgtggtaaaactgctcatctagtcatggagtttaccttcacctccaaaggagagtacagctcaactttgttgaaccttttaacatccatcctcaactttaaggaaggggatatgacatgggtgagaatgattacatcagagaacttcagcagtacaacagctagcccagaactgattttttttttttgtaaatttgagacttatgtaaacgtgatttcaaaccataattcatgttgtaaatcagactccagcaatttttgttgtatgactttgtttttttgtaaagtgtaattgtccttgtacaaaatgctcatatttaattatgaactgctttaaatcactatcaaagttacaagaaatgtttggcttattgtgtgatgcaacagatatatagccgtttcaagtcatgttgtgtttggacttggggttggaacagggagagcagcagccatgtcagctagacgttcaaatgtgcagatgattatggaaaataatctcaaaatcttacaaagctgaacatccaaggagttattgaaaactatcttaaatgttcttggtaggggagttggcattgttgataaagccagtcccttcatttaactgtctttcaggatgttccttcgttgtttccatgagtattgcaggtaataatacagtgtattcataagaatctcaatcttggggctaaatgccttgtttctttgcacctcttttacaagtccttacatttaattactaattgataagcagcagcttcctacatatagtaggaaactgccacatttttactatcatgattggctgggcctgctgctgttcctagtaagatattctgaattccattttatcaataaagcttgatttaacaaacaagaaatttaaaaaaaaaaaaaaaaaaaaga

SEQ ID NO: 887 - DNA, 745 bp, Macaca Fascicularis
gccaattcaggccctaattcgatcatgattgtccttgtcatgctgttgaatatcgggttggccattctttttgttcactttctaacttgattggaattaggaaagaagcacaatatgttgaaaatcctgggtgtgaccaatatggaataaagaagaaggcagaaagagagcaaatgaaaaatttcaacttgtatattcattttttacattttgctttgacttttaaatttaggaagtccgtttatacctgagaacaaacgtttaaagttcctgtgtcactctcagtattctcaccgcccctcccaaaccctgtagctccttatgctgggaaaactggttttttaaaaaataataataataaaatatttaatcttattaagtgtttatttaaaatgtgtaatgctttggaaatcatgggtaacagatagcgagaggatatgtttataaagtgagcatgttggtcccatttataaatatatgtatgatttataagcttttttaaaacaaagctcaaattgttggtatttttctaaaatgtgcacagctgtattttacatgaaggctctttctaatgggttgttatactgtactcaacattttggacagcacatgaagtctgccaatgtacttaataaaacatgactttgtttatttaaagtttcttgctgtgaaaaagaactccctacctgtgagttcctttatttataattctcgaaaccaaaatgtataatgtacagttttcaca

SEQ ID NO: 888 - DNA, 721 bp, Macaca Fascicularis
  misc_feature (1)...(721): n = A,T,C or G
tagggtcaagtgtattactataaaacatttnnnttcttatgaagctatnnngttcattagttactcttatttccccttgttgtaattaagtggtgcaagtacaagcatatccccannnnnnnnnnnnnnnnnnnnnnnnnnnnnnnnnnnnctgttcttgagaaacgtgctgtgacttacatatgtcaannnnnnnnnnnnnnnnnnnnnnnnnnnnnnnnnnnnnnnnnnnnnnnnggtgtgtgccagnnnnnnnnnnnnnnnnnnnnnnnnnnnnnnnnnnnnnnnnnnnnnnnnngaaaaggacagttttacatagaccccaggaaaannnnnnnnnnnnnnnnnnnnnnnnnnggtggtggaatnnnnnnnnnnnnnnnnnnnnnnnnnnnnnnnnnnnnnnnnnnnnnnnnnnnnnnnnnnnnnnnnnnnnnnnnnnnntttctgttgtaatcaagtatttagtatataannnnnnnnnnnnnnnnnnnnnnnnnnaaaagccattagaannnnnnnnnnnnnnnnnnnnnnnnnnnnnnnnnnnnnnnnnnnnnnaaataacctcacatattgaacataaactgttaacttactccacaacttaattctaacctgatacttatgaattgcaaagtgattgctgcaaactattnnnnnnnnnnnnnnnnnnnnnnnaatagatcattataaagggaaatcagtaaaatgtcttgat

SEQ ID NO: 889 - DNA, 5166 bp, Macaca Fascicularis
gagaatccaagtgaggagccgccagaggagagctgaggagaagcgagggaggtcgacgacctgggccctgggccgctgaaggaaaggaggtgtaacttctgttgggaaaatgactgacttcaaagttggcaggaggtgtaatcaggctgcaggtcttggggtgattagggaatcattgaggaggagcagacaggtctgttcctttctaggttcctgtagagatctgtatgtagctgttcacttggaagttaattaagaaagagaacaaaaactgttcatttggattcaaggtccatctccactggtggctgtggtggctttggattgttggaagaccatcgccttcagcaggtctgcacttgggaacaatcattctcccccatcccgagcgtgcctctgccctctgtatcattgacagaggctgtatgtttggaaagagaactttgtgactgcagaactgacagttgactctaactcttgctaccaagtttttccattacccagtgaaagagtgttaagactttgacctaggacacattgagaaccaaggccaagactggacagggccatataactgggcttcaaccatgactgggactaagaataagacaagagcccaggccaaaactgaaaaaaagcctgttacacaagctaaagctggagcagagagggaggctactggtgttgttaggcctgtagccaagaccagggccaaagccaaagccaagacagggtctaagacagatgcagtagcagagatgaaggcagtgtctaagaacaaggttgttgctgaggtgaaggaaggagctctgtcagagcctaagactctgggcagagccatgggagatttcagttccaaggccgggaatgagtccaccagctccacatgtgaaaatgaggctggtattgatgcctggttctgggctggggaagaggccactatcaattcctggttctggaatggagaagaggcgggtaatagttccagcactaagaatgataaacctgaaattggtgcccaggtctgtgctgaggagttggagcctgcggctggggccgattgcaaacccaggtcaggggctgaggaggaggaggaagagaatgttattgggaactggttttgggaaggagatgataccagttttgaccctaatcctaaacccgtgagcaggatagttaagcctcagcccctgtatgaaattaatgaaaaaaataggcccaaggactggtctgaggtaactatctggcccaacgcccctgctgtaactccagcagtgttaggatttagatcccaggcaccatctgaggcaagccctccttcatatattgttctggcttcagctgaagaaaatgcctgttctttgccgggggcaacagcttgccgcccttctaggaacactcgctcatgctcacagcctatccctgagtgtcgttttgattctgacccctgcatccagaccatagatgagattagacgtcaaatcaggatcagggaggtaaatgggattaagccatttgcttgtccttgcaaaatggaatgctatatggattctgaggaatttgagaaacttgttaacttacttaagtcaactactgatcctcttattcataaaatagcacggattgcaatgggtgtccataatgttcacccgtttgcccaagagtttattaatgaagtgggtgtagtgacacttattgaaagcttgctcagttttccttcccctgaaatgagaaaaaagactgtaattactctgaatcctccttctggggatgaaagacaacgcaaaattgaattacatgttaagcatatgtgtaaagaaaccgtgtcatttcctttgaactcacccggacagcaatctggattaaagatactaggacaactgactactgattttgtccatcactacattgttgccaattacttttcagagcttttccatttgctgtcctcaggaaattgcaaaaccagaaatcttgttctgaaactgcttttaaatatgtctgaaaatccaactgcagccagagacatgatcaatatgaaggcattggcagcattaaaactcatctttaaccagaaagaggcaaaagccaatcttgttagtggtgtggccatatttattaacataaaggagcatatcagaaaaggctcaattgtagttgttgatcacttgagttataatacactcatggccattttcagggaagttaaagggattattgaaacaatgtaaaatgagccagagatagaatgttttgagccatctctaaactctagcaggctgtacattacagtgtatacattatacactgcatctttaacacaaagtcacctgtgacaggctttaggtttgagctagactattttgggggtatcaaatgaatattataccttgggctgaaaatgtttgatttttatcttgcctagattggcatatttttaacattttacttaagatagcgaaccagttcattttaagtaagctaactttttcattagtatctgcttatacacacctgtggcttaaaatgtcaaaaaagaaaatatccttgagtttgtaatgtagttacagaagtaaggcatacacatatacaaagataacagtacctagagagagagtgtgtgtgagtgtgtgtgtctctgtgtgtgcacgtgcacactcatggccgaatgtgcgcactctacataaaggaggcaggggttgctataggatatttaatgtaagataaactactatttttctcctcttccagctgtatcagatactcattccacaacacagaaatgactcagaatctcagacaaaatgtattatttgttcaattttgattttgctactacattcataactcttaaattgttaggctgtttcatttacataaaagttacctcacaaaagagaaggcaggaaacattttgtgagtgcctattctatgtcaaacactgtgttggcaccatattttacaagtttttttcctcttctcatagtgaacttgtgagctagttacttgtatttttattagaactcattattctgggtaccctccaatgagaattagagagattaaataccttttcctagattcccacagcaggcaggtggcgtagctgttttgtctgacaccagaacctatctcaccacactgctttatagtccccttgaagggcattttgagatggggggccttcaaagctcagagactgcttttaatggtttaattttgcaatagatcatgtccatgccaggtgttacaattcttaacttccttcaaattcatgtgtctattagacatttggctacatctggctggaggtcaggagaaaattctgaggtgaatagatggattttatctggcagtgtcgaaaatagtaggagcccaaaactttgttcactgagtaagatgtagatttggagtcatcagcaagggaaacttgttaggtatcctttgtatctttttctatccatttgtattttttctttcccaaagagccgaaatcattttataccctgaatttaaaaggtaattgcttttttcctccttacgaaatcataccttaatttttttttcttttttaccatttatgatttattctcctgtgtgtcatatgaaaggccaaggggctttatcttttactaggaggcaagcctgggcatttctgcatttgtaccagctaacactacaagataaacttaattagagaaatttagacccagaattgcagcctcaacaacacaaaacaggaaagctagaagagattgctgtgtcaacctacgagatagtgattcttggaagttggtatggaccagaaagcattcccaggacatttaggctatggctgagttttctaagactcatggtgggagttataatccctggtcttagctgatgtgaaagtttctatgtgtgaaaatatggagttatatgttttgagattttctgccagttaagaaactaaaacaagatcgtactgtaaatgtttgtaacttacttccccccagttgtatactgtaaacatctttgcatgtcaataaatatgcctctacaacatatttttgaatcacttaatatttttctctgttaacggttggtatatagtgttgtaatcctttattgcatattctcatacaatatacacattcttttgcaaaactaggaatacagtgttgagacttgccttttcctcttaacagttgtcttttcaatttagtgttatatagatctgtcacatgctttttaatctaataacttgacggaaatataattaccatacattaagctgcatgttgaaagtatatacagtgtgatcaatcttggaatgtatatacacataaaaccataaccacaatcaaaattgtaaacatattcatcacccaccaaagctatttttttttttttgagacagagtcttgtcaccgaggctggagtacagtggtgcaatctcggcccaccaacctctgcctcccaggttcaggtgattctcgtaccttagcctcctgagcagctgggactacaggtgcatgccaccacatccagctaattttgtgtgtgtgtgtgtgtgtatttttagtagaagcagggtttcgctctgttggccaggctggtcttaaactcctggtctcaagtgatccacccaccttggtctccctgagtgtcaggattacaggcgtgagccactatgcccagcttcccccaaaacttcttaatgcccctttgtaatccctccctcctctctctccctgtgcccctaacccaggcaactatgggtcactttctgacaaaatagaattgttttcattttctgtaattgtgtataaatggattcatacagcatgcactctttggtcgggagaggatctggcttatttcacttagtgtaattatttgagattcatccatatcatgtgtctcactatttcattgctttttattgccaagtagtattccaccatatggctttaccacagtttatttatccattcacctgttgatggacatttgggctgttcagagtttggccagtataagtaaagcagctatgagcatttgtgtacaagtgtttttatggacataggctttcatttctttggaatgacatctaacaatattgaatcatctgacccatgaataaaatctctctccacttaaaaaaaaaaaaaaaaaaaaaaa

SEQ ID NO: 890 - DNA, 600 bp, Macaca Fascicularis
tgaagtagccgtccatgcagtcatgtcacagtgggccctggtacaccacgtggcacaggcaggacccgtcaccctgtctgctgcggtatccgctgcagtggccattcccgtgtcagggcatctgggacccaccctggcacgcgagacagtcaggaccataggttcctggagagcagcacagtatcagcgtcttcacacaaaaccactcgaataagtcaggatactagcttttcagctgcagccaccaggcctccaggtgttcatcctgtgcatccagcatctggttgcattagaagtcgctgctctcgcacagcccctccagaatctccagcaggcgaatctcgctggactcatacttggacagcgtcttttcctcccaagccgtgttcccgccgccaaagttcttctttgcggtgtccaccaacccctggttaaacttgtccaccagcccccggcaccgctggcagggcgtcggcttcttggcggcctccggcgcgggcagcagcagcagcagaagcgacaagagccccagcgcggcccggcgaggcaggcgcatggcgggtagcaccgcgggcagacgcagccggagctccaggtcct

SEQ ID NO: 891 - DNA, 3320 bp, Macaca Fascicularis
gtatgcgcgcgcgcgtggggagcagtgtgcatgcggggagtacgggggagtgtgtttgtgtgtgcgtgtgggtgtgagtgcctggctccctctcgctgagacacacatacactcacacatacacaacccgcaggctcgtctgaacttgaagacaccccacattccaagatgcccgaggttcctgggaatgcctggggttcttcgatccggaaaatcctaccggcatcctcctagtgagggattattattattattattttctttaatctggaagagaagagagcaagttgtgctttttcccccttcttcttgctaaatgccatggatataactgaataagcggctcagggctctccccgcgtggacgtccgaggccaccatctgcctgcgttcgccagagccgccggagccgccggagccgccggagggtttagctcgagtctgtctcgggcggggaaggatgcgtggccgagccggggagcccgggcgccccgcggagccggcctcggtgcctcccagccgggggtagatgctgcctcgcccaggcaccgtggcctgagtgaccagaccatggagaccctgcttggtggcctgctggcgtttggcatggcgtttgccgtggtcgacgcctgccccaagtactgtgtctgccagaacctgtctgagtcactggggaccctgtgcccctccaaggggctgctctttgtaccccctgatattgaccggcggacagtggagctgcgtctgggcggcaacttcatcatccacatcagccgccaggactttgccaacatgaccgggctggtggacctgaccctgtccaggaacaccatcagccacatccagcccttttcctttctggacctcgagagcctccgctccctgcatcttgacagcaatcggctgccaagccttggggaggacaccctccggggcctggtcaacctgcagcaccttatcgtgaacaacaaccagctgggcggcattgcagatgaggcttttgaggacttcctgctgacactggaggacctggacctctcctacaacaacctccatggcctgccgtgggactccgtgcggcgcatggtcaacctccaccagctgagcctggaccacaacctgctggaccacatcgctgagggcacctttgcagacctgcagaaactggcccgcctggatctcacctccaaccggctgcagaagctgccccctgatcccatctttgcccgctcccaggcttcggctttgacagccacaccttttgccccacccttgtcctttagttttgggggtaacccacttcactgcaattgtgagcttctctggctgcggaggctcgagcgagacgacgacctggaaacctgtggctcccccgggggcctcaagggtcgctacttctggcacgtgcgtgaggaggagtttgtgtgtgagccgcctctcatcacccagcacacacacaagctgctagttctggagggccaggcggccacactcaagtgcaaagccatcggggaccccagcccccttatccactgggtagcccccgatgaccgcctggtagggaactcctcaaggactgctgtctatgacaatggcaccctggacatcttcatcaccacatctcaggacagtggtgccttcacctgcattgctgccaatgccgccggagaggccacagccacggtggaggtctccatcgtccagctgccacacctcagcaacagcaccagccgcactgcaccccccaagtcccgcctctcagacatcactggttccagcaagaccagccggggaggcggaggcagtgggggcggagagcctcccaaaagccccccggaacgggctgtgcttgtgtctgaagtgaccaccacctcagctctggccaagtggtctgtcagcaagtcaacaccccgggtgaagatgtaccagctgcagtacaactgctctgacgatgaggtactgatctacaggatgatcccagcctccaacaaggccttcgtggtcaacaacctggtgtctgggaccggctacgacttgtgtgtgctggccatgtgggatgacacagccacaacactcacggccaccaacatcgtgggctgcgcccagttcttcaccaaggctgactacccgcagtgccagtccatgcacagccagatactgggcggcaccatgatcctggtcatcgggggcatcatcgtggccacgctgctggtcttcatcgtcatcctcatggtgcgctacaaggtctgcaaccacgaggcccccagtaagatggcagcggccgtcagcaatgtgtactcgcagaccaacggcgcccagccaccgcctccaagcagcgcgcctgccggggccccgcctcagggcccgcccaaggtggtggtgcgcaacgagctcctggacttcaccgccagcctggcccgcgctagtgactcctcttcctccagctccctgggcagtggggaggccgcggggctgggacgggccccctggaggctcccaccctccgccccgcgccccaagcccagccttgaccgcctgatgggggccttcgcctccctggacctcaagagtcagagaaaggaggagctgctggactccaggactccagccgggagaggggctgggacgtcagccaggggccaccactcggaccgagagccactgctggggccgcccgcggcccgggccaggagcctgctccccttgcccttggagggcaaggccaaacgcagtcactccttcgacatgggggactttgcggctgcggcggcgggaggggtagtgcccggcggctacagtccccctcggagggtctcgaacatctggacgaagcgcagcctctctgtcaacggcatgctcttgcccttcgaggagagtgacctggtgggggcccgagggacttttggcagctcggagtgggtgatggagagcacggtctaggtgggggtgggcatgctccctttcctgcgcgcagggtgggagaagaaggggaaagaatctcactggcaagtgtttgtggagtttccatggtgatgtttacatccagggacagttttgtctccctgtcaatggcctcgtgtcccccccccccccaacccccaacacccatatcacctccccaccacccggccggggtgtgctcagggaatgcggactcgctcaaataccggactgagccctgagtgtttggaaaggcgagactccgcctttctaatcacaaatgtagcctacaagcaagcggctttggattgcttatgggtctagtgttgtttttatttcttaatttatttttttccatttcccaaaaaaaaaaaaaaaaa

SEQ ID NO: 892 - DNA, 769 bp, Macaca Fascicularis
  misc_feature (1)...(769): n = A,T,C or G
ggcagcaggagcagaacattatcaactacaagactaacattgaccggctagagggtgacnnnnnnnnnnnnnaggagagcctggtgtttgacaataagcacaccgtctacagcatggagcacatccgcgnnnnnnnnnnnnnnnnnnncacctctatcgcccgcnnnnnnnnnnnnnnnnnnnnnnnnnnnnnnnnnnnnnnnnccaaggggctgagccaggagcagctcaacgagttccgagcatccttnnnnnnnnnnnnnnnnnnnnnnnatgggatgatggagnnnnnnnntttccgagcttgcctcatctccatgggctatgacctgggggaagtggagtttgctcnnnnnnnnnnnnnnnnngaccccaannnnnnnnnnnnnnnnnnnnnnnnggccttcatagacttcatgacccgagagacagccgagactgacacggctgagcaagttgtggccnnnnnnnnnnnnnnnnnnggagacaagaactacatcacccccgaggagctgcgacgcgagctccccgccgagcaggccgagtactgcatccgccgtatggtgccctacaagggatccggggccccagctggagccctggactacgtggccttctccagtgcccnnnnnnnnnnnnnnnnnnnnnnnnnnnnnnnnnnnnnnnnnnnnatgcaagatggagagagagtgcaccctgtggctgatcccatccgtccctcagagcaagggcctgagagaacagtcagccanagtgcttctgaataaag

SEQ ID NO: 893 - DNA, 710 bp, Macaca Fascicularis
  misc_feature (1)...(710): n = A,T,C or G
tagaccgaggccccnnnccgtgnnncngtcccnnnagactgaggccccggtccgtggccctctccccctagaccgaggcctcggtccgtggccctctccccgtagaccgaggccccggtccgtgaccctctccccctagaccgaggccccggtccgtgaccctctcatcttctccccctagaccgaggccccggtccgtgaccctctccccctagaccaaggccccggtccgtgaccctctcgtcctcccccccagagtgcggccaggaggagggcgcgagctcgcgtgccnnnnnnnnnnnnnnnnnnnnnnnnnnnnnnnnnnnnnnnnnnnnnnnnnnnnnnnncctcatctgcagaaggtatctggtgatgcagaggctgtttccccgcatcccacacatgaaagaccccatcggtgacaccttccaacaggacaagctggtggtctgggaggcgggcaaagccggcctggaggagtgtctggtgtctgaagtgcaggtggtggacaaaacttgagaccggggttcagggcctgccgggggctgcctcaatctccctggccgggccaggcacctgcacagcctgtggctgctgnnnnnnnnnnnnnnnnggacgttcctaacgggtggtgggcgtgggagacgcctgtgcaatgtagtcggaagatgccaggaaaaggaaagaacagaacttttgtnnnttacttc

SEQ ID NO: 894 - DNA, 735 bp, Macaca Fascicularis
  misc_feature (1)...(735): n = A,T,C or G
tgagtagctgggattacaggcatgcgcctgtgtnnnttnnnctgctcagacagctcatccacatcacggttattttaatttgcatttgcctgataatatgtgatatggaatgtctatttactcttattattttttcttatgattgaagttataatatttctttaaatattttggataaatcttttgtcagatatatgcactggaaatattttnnnnnnnnnnnnnnnnnnnnnnnnnnnnnnnnnnnnnnnnggagagaacgtttcaggcagggaatgcaatcgatgtgaaggtttgaggtaatttgtttcatttatctttaacaccatgttatcgatggcaaaataacttcattggcttttttttttttaatcaagaaaagaccttttnnnnnnnnnnnnnnnttagtaaacctaatggtgacaataaaagtgattctgaataaatgaaaaccaaaagagattgttctagttttactcataaatataattcttcatatactgagttcagttttttagccataaatgaagacatgggaaaaccataacatgttatttgctgagaagttctggcaaatgaagcaataaaatcatgaaaactaaatcaacatttaaatacagaacgtaaagagataagtccagaagcagaagatctctttgaaagaaaaacctaattaaaaaaccgaaagcacagatattcagtatttcacaaataaacgttacnactttttagaca

SEQ ID NO: 895 - DNA, 735 bp, Macaca Fascicularis
  misc_feature (1)...(735): n = A,T,C or G
gcatgtgnnnnnnnnnnnnnnnnnctgagtcannnnnnnnnnnnnnnnnngaggactgagcaaacacacacacagcaggattttgtnntaagttttcttagggatcttatccaaaaacaccattacttgaatttcccagcttccttttacagggaggcttctttgctatgtgtactcccacctctgtatnnnnnnnnnnnnnnncagaggaagtacagcataaaataataaccagcatttgtagagcacttcttgtgggccttcttaggcaaatagacattctcatggaatgctctaaaattgtaaagttcttgcacttgctctcaagtcatttataatctaattgctggtcttcctggtatgaacaaagatgtttgcttgttaataaattcctaccacatacccagacttgtggtttatttctatctaactagggaaagcactaaagagttttctagtaaggaagaatgatctgagtgtctacctgctttggaaaagatgtctgctgtggataggaaatgattttgtatccaaaagtcctagtactaatttggagtgttgtaaagnnnnnnnnnnnnnnnnnnnnnnnnnnnnnnnnnnnnnnnnnnntaatgttctccatgtctttgaataattaatttttactccattttgactagcttgcaataaagtaggttaagtgctgtactttaaggaagtccatgtacaagccagtgcctcacaatggtcaaatgg

SEQ ID NO: 896 - DNA, 632 bp, Macaca Fascicularis
ttctgtgattatgatttcctctcctataattatttctgtagcactccacactgatctttggaaactcgccccttatttaaaaaaaaaaaagagaaaaaagagtttgttactctattgtatgttacaaaagaactatagactgtggaatgcagtttaaagatgacatatgccaacaaatgccttgtattatatggcactgcctataattcaaatttgtttttattttggaaataaaagttcactgtaattttttttcattctcattgttacatgatttttttaatagaaggaaaagaaaatgtgaaacacaatttagtcctcattatttatttgtagatcctgcagcatcactttgtaattaattttttggacgtttccgttaaatgtaatattgcttctcttgttaccatacagattcttttctatttataaatgtattttgatgggcagtaaaacaaagtgtcttaaaagttttaaatagagaaaatgtgctttacacagttgcctataaaaagtgctctatgttatccaagcaattcatactataagcttcactcttattgttgtatgcaatttttactatcatgcagataagcttaggtaaataagactcatagatcaccttagaaaaa

SEQ ID NO: 897 - DNA, 786 bp, Macaca Fascicularis
  misc_feature (1)...(786): n = A,T,C or G
ggggacagttcaagttnnntagctgtnnntaggggtcactgagcgtctacctgtccttccagaggaggccagctcagaacaccgtgaggagagggccagggatgcaccgcccagaggctgccctcggcgtctcatgggtgcaggacagcgctcgggcttgggctctaagctctgtgtctagtgtagaacatggggaaggagcatcttaggaactgctaaagtaacttcttactgctctcacaattctaaggaagtgggagaacggcctcctacaaacagtgcccaccccagagctgcctgggaaggagcagttttactgaaannnnnnnnnnnnnnnnnnnnnnnnnnnnnnnnnnncccctcctgccctcacctggtcttttccctcttcannnnnnnnnnnnnnnnnnnnnnnnnnnnnnnnnnnnnnnnnnnnnnnnnnnnnncgggcattccctacctgagctgcgtgtctgctttcccttctcccannnnnnnnnnnnnnnngtggggcctgggatgagccctctttgtccctatccgccccccttgccaagccattcctgggtgagtccagnnnnnnnnnnnnnnnnnnnnnnnnnnnncctggacacttgagccacatggcgagacccctccnnnnnnnnnnnnnnnnnnnnnnnnnttgtcgaaagnnnnnnnnnnnnnnnnnnnnnnnnnaagatacacccttcaggtgaacctggcatcagaccnnnnnnnnnnnnngtttgagaaaaaataaaaacaaaaaggtcacctgttctc

SEQ ID NO: 898 - DNA, 672 bp, Macaca Fascicularis
  misc_feature (1)...(672): n = A,T,C or G
cccacccccnnnnnnnnnnnnnnnnnnnnngtgagggcatcaaggctgccccgggctacctggctgctcggggcagggtgtgtgggccaggcccggccgggggagggcagctctgggcacgtcgcacccacaccccccacctgggggagacaggcggttcctccctggtnnnnnnnnnnnnnnnnnnnnnnnnnnnnnntcttggtgactttagaaacaaacacagtggactcagtggctactggtattgtctcttcacacannnnnnnctggggaattgagtgcagggcacagcctggctcagcctgcctgctggtgggagcccttgggaagctgcgacgctcctttatctgatgtggtttagcaaaagcctcccgcacacctccccgtggcctggggtgtggcctgnnnnnnnnnnnnnnnnnnnnnnnnngcggaccgcctgaggttaaggggaactcgagggcggaccgggccctatgnnnnnnnnnnnnnnnnnnnnnnnnnnnnnnnnnnnnnnnnnnnnnnnnnnnnnnnnnnnnnnnnnnnnnnnatgaatgtagacacaaaacagcaacacttgtatgaagannnnnnnnnnnnnnnntatttttttcctgtttcctttccttttttaaaaaatctgaattgtgccctgtactgcagttactg

SEQ ID NO: 899 - DNA, 581 bp, Macaca Fascicularis
  misc_feature (1)...(581): n = A,T,C or G
gacctcnnnnnnnnnacctgccctggtgtcccaannnnnnnnnnnnnnnnntgtgagctaccatgcctggccagagctggttctttttctttagagcaactttttatagatgtcaaggtagaaaacagagaatttctttgtaacttgcagtttctacagttggcagcctcctctgctcaggccttgtcaatgtctggttttcccaccctcccagaaatggggtcttgatctgtnnnnnnnnnnnnngtgcagtggcgtgatcatggttcactgcagcctcaaactcctgggctcaagttgtcctcctacctcagcctcccaggtaactagaactataggtgtgtgctactacaatgactaatttattttcttagagacaaggtctcgctatgttgtctaggctaatctcnnnnnnnnnnnnnnnnnnnnnnnnnnnnnnngggcctcctgagtcactgggattacaataatgtcttgtatgaagtaagtttgtcttgatatgtttcctgctcaaaacaaaatgcaacttgtcattttcaaactctaaaattcttctggtgtatttttaaatgtctaactat

SEQ ID NO: 900 - DNA, 2086 bp, Macaca Fascicularis
gtaattttaaaaacagctggtttatttgaaagtcaggctagctctgcacttttagatgtgtttctcttttttcagacattaactctaattaggatctgcttgtaccttagttatgagactcttttaaaataaggcagttaaatgagaccttacacactaaagatgtgggtcactgttattttatcctttctaaggaaatttacatgcatcaagataaggtgattcttaatctaaatgaatgattttttaggaaagatctttcagaccatggattatcctaatggaaagtatttggttgcagcaccgtaacccaaagtccttcatatccttctgtttaggaaacatgttgcttgtttcttcactgagagaaaagataaatggaatcaaatcttggatttatgttccagtagctactgcttcccctacccaaggatgtcaccgcccacatgggcaggccacggccactagttaaaatgttcccattgttaaagtgtgttatcatctttgagggtatttttgcttctggtctcatgactgaccagtggaaaaagtcctaagctatttttgtgaaatgtattttcagtacaatttgagtcagtgtttagaaaacatcacataataataaaaaggattatatagtgagcaccttttgtatattagtttatacacattatttctaatatccctaaccaccctgccatgtaatgttcttatgctcaatttgcaagaatttcaagatgaggaccaatttttgcaaagtcaaaagttgatcatcgctacaaatggtagggagaacaatgttatgattatagcatggactctggtaccagactacttgggttcacatcggtctggtcaccacaactttctgattattgcaaagttatgtaactgtcagattgtattacaaacacacaatataaagagtagttttcaagaaagtgaaccttgtttccaagaatcccttctgcctctgacatggaatagagtaactagatatgtacagtacatggccagcattttaatatggagtctattagtttaccagggctgccataacaaaacaccacagtctgggaggcttaacaaacaaaaatccattgtctgacagttctggaggctgaaagtcaaagactaaggttgagcaggtttggttttgcccaaggcctctcttcttggcttgcagatggtctcctttttgctgtttcctcatgtggtctttattctgtgcacactcccctctcataaggacaccagtcctattggattagagccccacccttaagatctcattttaccttaattacctccttaaaggccttatctccaatacagtcatattgggggtgaaggcttcaacataggaattttgaggtgacacaattcagcatgtaacacagagggggagaacatttcatttgccatgaatacaatatggctaacactggtgcacacagctaaaaggtgcaaaaggtgacttagttatacagcctgaacgggggcaaaggaaagtcactgttaccctgtgttgtaggtttgagtttcactcaatgtactctctgagtaaagtggattccctttatacaagcagcctatggctgcagggggatctgcctacaggtgtttgctctggctataggcagatcatatactctggaaaactccaggaaaacctggcagatacttttatcagaagtagtgaatttagaaatacatattaagtactgcatgcaggattcatgttagggaaagtgatgtggaataacaggctttgcttcaacacacacacaaatgtatgcatatgcttgcagatatctacaaaaatatggcatatgtaatttatttattgctaactatgtcaggcactgtgatacattatctgtttgattcttactaaaagttgacaaggagaatactattttccctatttcacatacggggaaattgagcccctgagaagctaaggaacttcttcaagacaaaacagtttagtaagtggagtggataggcttctttcattcctaaacccgagctctttcctcaaaccagctgacaacatacatacatacaaaaaaaaaaaaaaaaa

SEQ ID NO: 901 - DNA, 1776 bp, Macaca Fascicularis
ttattctggggtcaggaacacagctggcgccggggcacagaggacgcaatcgactagaaggtcaaacaccctgcttagagcaagaggagaaactcgccactgggatgaagtgtatggtttttctcggttcagggagtttcatcaggaccgcagaacccataacacgtaggcgaacataggcaggaaggactggagaaaggaactggcttatgattgtaagaccacgcccgtctattgtgtttctgtccggagctgtggaattagcgtcagaataattcgtagacggctccaatgttcgggaggcctgcacctgtgggagaaaaataaccttgtgaaacaacttagcatctcctttcgccaccagaggcagcgctatttaaccgcatatctctttgggtctctgcttctctattatgtctagagatttcaggcgtgctaactgctagttaaagaatttggagttgtttgggtattttaaatgggaaattttgcttcttccatcagcacttgctttagaagtggtcaattataatttggtgtttttcagttccacttgtttctctttgaaatggaccatattgattcattaaagaaaggaaatatatttctaggactaaatgaaaagtaatggccatagatcttactattaggttgttagctttccttgccactgtattggttcataaattcttcaagtttataggttatacataagtgagttcgtggccttataaatattcgagaacaactgctctatgtgtgattttagccttgaactattttagtatcattttctcctatgattgagtggcagcatttataatagtaagttgtaaacatcccctttaaggaaaattagagttcaacatccttaagatattaaaatgtttattccattataatgaatattgtatactgtcaaaaaatatcttgtagtttcaaagatgggtgagccaatttcttcagaattccggtgggtgttttgttttaatataaacatttcaattcaatgggaagcagcaaggaattaaagatgaataaggaaagtaaaggttaaaaactgtactgttatgaaaggatttcttgttagcaatttagacaattcagtatcagtttaggaaatatatcacctatcttggttcataatggccaaatacgttgcaatcagaaatacataaagagtttcagctaaggtctcttagagatatctgatgcttttaaatatctttaatcagaatgaaagttgtcattccatgaagaaggcatataaactcactttgttgtactgcattcaggttaatgaggggtgggagggaaggtttcaggatcacatctgtatgcttccatcttatgtttaccataattctcatttttctttcctccgggaaattccttgtatcttaacaaacaacagtaaacccatgagtcatcatcacacttaccttgcttttgctgaggtagacatttgcactaggatttctctcctgccttttctatttcctgatttaaagaacattcatcagttcttctcttcagatgtctgagaatcaccttaaatgtggctttgcatttaaattaggtaacttaatgtcttataagaaagaaacatgaaaatccagaaatcgaattgaattgattttaaaaaatacttagtcacttgggccagctctctacagaccattgcactcttatgactgtgtttgtaaatgtgtccatgtagcacagtacttttaataaaatctttttcaaacttaaaaaaaaaaaaaaaaaaaaaaa

SEQ ID NO: 902 - DNA, 2159 bp, Macaca Fascicularis
  misc_feature (1)...(2159): n = A,T,C or G
taattggcttaggacatggcctctagctgcatccatgttgctgctaaggtcaagattttgttcctttttatggctgagcacctggtgatttttaaaaagaaaagtttgctgaactgaacctgtttacactgaggcctgcacggtggggcttctggaagcagcactcctgcgggggctgcgaccaggccccagctagaggcgcctgggggtcgcgcctaggcagggagaagctccgggggacgaggcctctgaccagccccgagcactcggctcccggcaccgcggtggggaccccaacagcgccacgcgcgccgaaagtactccgcgagctcctgcagattctttttaaagagacctaattttacctacacaaaataggaaacataccttcgaatctagtgtggtcaacttcttcaacgctctccaaatagtattcactagcagtaaactggtttaccgaacctctgtactgaagtccgtgaaaatgtttaaactgaaaagatgcagagagtatgctgcattcctgcctcagccgtgctctgacaggctcacgtgtcgtcttcaccattatcctccccacactaagtggatttacgttccaggaagtggaaaaggcagtgaagaaatcagatccctggcttccaggatgagcctgcttggccccggataatcccatttccctaccaacaactggttcgggaatggaagtgtaaccagttctggacaaggagacctaagtggaagctaactgggccacatttctttaagaagttttctccattccgagagtcagagaagagacaacgtctcttcctcgggacactgctgtgtctgaaggcggacactgcggtgtctgaaggcggacactgcggtgtctgaaggcggacactgcggtgtctgaaggcggacactgcggtgtctgaaggcggacactgcggtgtctgaaggcggacactgagaacagctgcagacatctcctagcagcctgagaatgaagccaacaccagggctggaggaacagtgctagaaagtaggtccctgatgacgttttgagccactcagtcaaccctgaagcctattctatctttgggcggcctgttatatgagaaacattgtttcattcagaatttctttcttgtattcaaaatcctggataatcactgatgaccctgaacaaaaagcccagaaatcagactattttctattagacggttttttaaaacttgacaattctaagagtccagtgtttccttcctgtaagaagctttttttgattggctgaagcaataccttccttttgtatgctcgttttttatgctctttcctagggtacagtggggtttataatctgtgggatcaaatagtacttacaacattttaaaaaatggaagtgtccccttaaaaataaaaattatgatttagtcaaacaagcccatatttaaaaaataaagcccactagacatattaaacattttaatttatcttctagaacatttctctcttcaatccattttttaacctaatcttataagaacaatattttttaatggcaaacaataggctgctactttttaacacatttcccatttgccccaagaaatgagtgctggcagtgagctgcaccttttttttctgaatgggaaatgggttcaacacacagaaatcacagtaagaactatgaaggaagagcaatgtagcaatagaagtttgacgcacaagaaaaaaaccaaatatatcaagatatatgttattacacaatattagtgaacaatctgcattatctcatgaaattttatgatttaatttcaaccactatccaatttttgcattacaaatataatcttaaagaacaactctgggccgggcgcggtggctcaagcctgtaatcccagcactttgggaggccgagatgggcggatcacgaggtcaggagatcggnnnnnnnnnnnnnnnnnnnnnnnnnnnnnnnnnnnnnnnnnnnnnnnnnnnnnnnnnnnnnnnnnnnnnnnnnnnnnnnnnnnnnnnnnnnnnnnnnnnnnnnnnnnnnnnnnnnnnnnnnnnnnnnnnnnnnnnnnnnnnnnnnnnnnnnnnnnnnnnnnnnnnnnnnnnnnnnnnnnnnnnnnnnnnnnnnnnnnnnnncaaaaaaaaaaaaaaaaaaa

SEQ ID NO: 903 - DNA, 223 bp, Macaca Fascicularis
caatgcattccaacgtgaaaggcagagagagatttttttttcaaaaaaaaaaaaaaaaaaaaaaaagttacattgctgcaccatacaaacgtgtccctttatgaaggcattcgaaccactagatggggccgttttacaaatagtacggtctttgtgagtgggaaacgcatggccacagattcaatgagctgcttctgttgcttctctttgtgtgaaaacgtag

SEQ ID NO: 904 - DNA, 752 bp, Macaca Fascicularis
  misc_feature (1)...(752): n = A,T,C or G
ctatacttaaaaatcttgtacattataannnnnnnnnnataaaaagaaaattgattgatagaaaaagactaagggaatatatgaaaatattaacaatgtttatttttgattaatggaattctagatgactttaattttctttatatatttcagtatttttcagattttctatatgctttccttttaaaatcagattctagtttttaaaatactgatacatccattttgatataccatgtgttcacactttaaaaaatacacatagcagagtattggaaagtacgtaccaaaacattgatgtggctaccactgggagtcaggagcatgagttaatcttctcccttcttactgcttttccaaacattctccagtcagcaggtactacatttataatggaagaaattttttaaaaaattttgagctgtacactttcaagtaagatctgaatgctaatgctggcttgtgcctctttctgtgtggtttggtcattatagataatgccaagtttcagtttccccatctttgaaaaggagataatatgttatctcttgggagtagttctgaatatgaaaagtgtgttgatacaagaagcactaacaatgtttgtttcttaaaagtggcctggtttcccttttttatcaagagagcttaacagattaaaaaatgaaattagtctattttctacttgccagcagagtatctgtcttattttaggatgcagggtgagactcaccattcaactgaacaattag

SEQ ID NO: 905 - DNA, 785 bp, Macaca Fascicularis
  misc_feature (1)...(785): n = A,T,C or G
accagcaganaatggtagagccagcttagagtccacaggnnnntagcaggaattttgttttatcgggagaaggcagttaaatataccaagaaaaaaatactatttttataagctatgaggaaggcatttggaaaatgatattctaccacagaattcgatggactccttagggcccatgcccaaatcttcccatnnnnnnnnnnnnnnnnnnnnnnnnnnnnnnnnnnnnnnnnnnnnnnncgatgaggcggtggctnnnnnnnnnnnnnnncaatgtgactttgatatccacctgcaccacctctcactgggctctagcaccaccctcccctcgccgcacactaatcccaccacaattcgnnnnnnnnnnnnngaaacaaagtgtgcggacccaaaactgccaagcctgagtctgtcccgtgcttctgctgctccatcctttgagttctgcattgccatcctgccgtcgagggctggaggcctgcttnnnnnnnnnnnnnnnnnnnnnnttccctgcccctccacatcgcccgccagtggtgttgggttttcgttctgcttccaacctgagtaaagtgtgtgtgctgagttcatcccgtgttcccccatggtcatggcctcccggccccatggggacccctctctcatcccagcagtgactggtgacagcgtgcaggtgcagtgctagctcttcgttccctctaaggggtgtgcactctttttattcctactcttgcaaaaacagatacgattatgatttcccatggaaatgaaaagtctattaa

SEQ ID NO: 906 - DNA, 1961 bp, Macaca Fascicularis
agaatgaactctgtagataggtcagtcagcattttctgagtttgaagttcttagatctctttatagggtttgggaaattgcttgtattactcaagcattaaaacaatttttttacattatttttaaaggtatgtttgaagtaaatagtattttgatggcttagcattaggttattcttaactctcttttactgcttaatttttctagatttcaaaaaatatgaatacaaacaaaaatttttcatggtgagcaactgtgtaaaaaaggattcgtatatactgattaagaaaaagtaatccctgtgacaactctgggcttttctgattcatgttgcttaaactccctaatgaaagaatttgtatgatgattgctttatagagctggacccaaatcgcacttctaaaaacacagtagcacacaaacacttcctagattctaggaatctaggaagaataaggagtggtagtgataatcctcttgaaagaaaaacctttgtctccagtgtttgatttgctgcaattctttcttttgaaagtcctatggtctaggaataggctttttagctgtgattgtacattagaagctccaagaagttctctgtgaaaggattatacctatattccaagattattatgtacacaaaggtactgatttttttcccctttatttttcctattttgcaagcagcttcagccaaattataaattgtaatagtttttgtgctaccttgtaatacagtttttaatactaataagaatttgtctcatttacaaaccaaaaatttaggaaggaagacagagtatcgaaagaaactgcctaagatcttaccactccaagtatgatcctcggatcagcagcattggcatcatctgaaagcattttagacaggcagaatctctggtctcccctctctgcattccccacccggtgaaagaatgagaatctgcatttcttgagatcataagaataatgacatacagatgagattaaggtcatgcaaataccaagtttaaggctggtggttcatttgtcttgttttggtcatattgagtcaggattgactaatgaactgtagaggttttacattatgcaaatgctcttaatttcctgtattaggaattagacactccccccaagtcttaaataatgttttaatcttgcatccttttattataagaagattagtaatgttctacagataataacaacaactggtatagtgtattttatttacattcttcattcttaggagaaaatgctgagaagcttctgcagttcaagcgttggttctggtcaatagtagagaagatgagcatgacagaacgacaagatcttgtttacttttggacatcaagcccatcattgccagccagtgaagaaggattccagcctatgccctcaatcacaataagaccaccagatgaccaacatcttcctactgcaaatacttgcatttctcgactttacgtcccactctattcctctaaacagattctcaaacagaaattgttactcgccattaagaccaagaattttggttttgtgtagagtataaaaagtgtgtattgctgtgtaatattactagcgaattttgtagattttttccatttgtctataaaagtttatggaagttaatgctgtcatacccccctggtggtaccttaaagagataaaatgcagacattcctttctcagtttatagcttaaaggcctgaggagcactagcaacacttggctatattggtttgctagtcaccaacttctgggtctaaccccagccaaagatgacagcagaacaacataatttacactgtgatttatctttttgctgagggggaaaaaatgtaaatgttctgaaaattcactgctgcctttgtggaaactgtttcagcaaaggttcttgtatagagggaatagggaatttcaaaataaaaaattaagtatgaaaaaaaaaaaaaaaa

SEQ ID NO: 907 - DNA, 769 bp, Macaca Fascicularis
  misc_feature (1)...(769): n = A,T,C or G
gaaatgagaagtatagnnnnntttttaatatcaaaaatggttttaatactaaaactagtaatttaatactagttgtttataaacattgtaaaatatatcttttaaacaaattatcttagtagttaattcataagggtggttttgggtaggaatagcagagtaccttcagagggaaaggggagtaattcagaagtgatagcattttatttgtttgaatactctgccagtaaaatcagctctacttagaaagttatctgttgtgtagaataatgatgtagagtttactaatcagtgaggatgtcttgtttttattttctgcaaactctgcctcactttaaaatgcattttaacaatacctaattaaaaataattttggttctgaaaataaccttattttttgttgagttagtgacttcatttttcttgtcacaatataagcttttgagggatttttttaaattggtgcttttaataagcaaatcccagggttttattttcttcagtgatacccctcttaaatgtatttgcacatatatatatattttttcttatgcatgctcgatgcattttcgtcctgagaaaaatgttctctacagaaactacccgtgtgtaaaaagaagattggcttaaaatggctactgtgatgggaacagtgtcttagggagatgcagcttggacttgaggtaaattgaatactttacaaactgtggtttagagtttgctttaatgacattgtatgtaaaaggtcacatgatagctgtaattttgt

SEQ ID NO: 908 - DNA, 677 bp, Macaca Fascicularis
gatggacagcagcagcggctcctgcagcccgcccgtccttgtgctgtggcagccgcccccagccgctcccctcagacttcctccctcaagaccccagcttcttccccaggccctagtcctctccgctcaagcctcacgtccctccaggcctggcagcccagcaccccccttcagatccttgtgaagccgggacaccagacccacatccctgccgaggacccctcctgccctcagcccccctgcctgccctgccaccctcttctttagactgttggtctgtatccgcccccactcgccccagcacagtcttagggaccttgaaggatgtgtttagaaactgatgtcatttctgacgttggagccgcggggcctggtggggggaaaggggcagctgtggggatggccgctgcctcttgaggtgccccctactctacaagggccccgtcggctgtgggtgggaggggccgcccgtgctgctgagtcagagggggccggcccggcatcctggaggagggcgggcagccggcagtgccgccgggattgcacggagccaggcgccgcgagccacacagccgggagcccgcgccctcaacactcattgcaatctccagcattcccccccaaacctaaaaaaaaaaaaaaaaaaaaaaaaaaaaaaaaaaaaaaaaaaggccaca

SEQ ID NO: 909 - DNA, 783 bp, Macaca Fascicularis
  misc_feature (1)...(783): n = A,T,C or G
aattacacatgcctgtcagcaaaancnttgtgagatgcactctctctgtatgtttattaatttatgtaaagcatatatccctttacttttgtactaatatattaggcacattataaaaagtacacagcatagaaactttaaatgaataagacacaaaatattataaacagaggtctggcattctctctctgaactcctgagggagaccttgggtacctcctggtatgtacacatctcactttgaacacctttgctttaatgcaaatcagcnnnnnnnnnnnnnnccccaaaccactgtgcaacatttggcctgcagaataagaaagtcctaaggcagaatccccaggaacttcaaatctgggagatgaggcaagaaaactcactcacgaacaacataaatgtaaataattcaaaaccctaaaggagagctatccctagacagtagtggctacaggtgctaagcaaaggtcaggtacactggacagagccatgcaattgttcaccttccctctctgggtctccagaaaaggannnnnnnnnnnnnnnnnnntctctcctgattggaattctttgaaccctcgaagtgctccagtagtactaccccccacgcagaagtgggcccatgtcgcttgaatattatttttgatttgaccaccaagatgtaatgatgattctattccattttgaaaagggtctgagaaagtgtataggtctaattatatatacatatttatacatgtgtatttttgtttattgttacattttgacattggacttctataa

SEQ ID NO: 910 - DNA, 638 bp, Macaca Fascicularis
gcctgcctttcggatcctgcaggaaaagcccatgtagttaagcgctttggtttaaaataaggcaggggaaagggagggctttccaaacacatttgggggttcgcgcgagcgctttgtgctcatggaccagccgcgcaacttttgaaggctcgccggcccatgtggggtctttctggcggtgcgccgcctgcagcccccttaaagcgcggggactggagttgttgagcagccccgacgctgcggtccatgtagccgctggccgcgcgcggactgcggctcggcgtgcgcgtgttcccggccgtcccgcctcggcgagctccctcatgttgtcgccctgcggcgccccttcgacgacaggctgtgcacggtctgcacggcgctccgcggcggagcttcatgtggggctgcgacccgcgcagccggcgcctcgctgagggaacggacccccggtaaccggagaccgcctcccccccacccctggcgccaaaggatatcgtatgttcaggtccaaacgctcggggctggtgcggcgactttggcgaagtcgtgtggtccccgaccgggaggaaggcggcagcggcggcggtggtggcggcgacgaggatgggagcttgtgcagccgacctgagccggccccg

SEQ ID NO: 911 - DNA, 744 bp, Macaca Fascicularis
acaacacaatctcagattagtacaattagcttcagagttgatattaatagaaattattccaaaattattcttgtcacaagtaactactatcccacataaaaagggaaaaatcccacccaatcaaagaaaaagtatcctctgtatgtttccatggcaatgagttgtttatgtattctcaaattttttctggctagttatccaccacttctccaatggagtcattcaatctcttggagaaccatatagactaatgacagcatctggggcacatggacatatcaagttcatggtggacattgctattataaaaaccactcaggtcttgagaattcctgtgccgaaggatcccaaaatgctttataaaaagcattagttatgcctcaaaactgccctttgaggtaggtcagtattattatccccattttagcagaaggaaaactgaggcacattatagttcagtgacttgcccagggtcacatagcaagtcagtggcacagtggtaggaaaggccctggccttaaccaccagcaaacaggaccaccttgcttttttaacctttcatgatgacccatttgaactacgcttacagagaatacacttaagatactagcaaaccaaggagaaaattttccattttaaatgctacaaccatcttttaacctaaaacaaaaacaaaaaataaaataaaattataaatcaaatacattcaaattacttccaccctccatcaaacgtgggcactta

SEQ ID NO: 912 - DNA, 722 bp, Macaca Fascicularis
  misc_feature (1)...(722): n = A,T,C or G
ggtggaggggacagtgttctggatagacctattatgtgaaaggcagcttcacccagttttctggactctcatgctcgcatctccaacctgggagactgcaggaagaacacctacctggcctggtggggctggcaggatggtggaggtttctcaaggagctggagaccttggggagcccctctcggggaggaaagagcttccaggatgcggacgcagcacagtggaagaggcctgctccacttgcctgggaacctgggcaggaggcacagaggaagccacggcctggagctgcagctcccccggcacctctccctgtcccagcggcccaggatggcctggtgcccccacctgctgcagcaggagccccaannnnnnnnnnnnnnnnnnnnnnnnnngggtggtcctcatggacagtgaggtgtgcaggggtgcactgagggtggtgggaggggatcacctgggttccaggctgtccttgccgagcatctttgagcctgcctcctggtggaagcagaaaaggccagaccctgctgagttagaggctgctgggatccactctgtccacacagcgggagggctgctgggagcaggtggtagagaagtgccatgtttgagttgannnnnnnnnnnnnnnnnnnnggggactggtnnnnnnnnnnnnnnaggagctnnnnnnnnnnnnnnnnnnnnnccttgcttggctcactgggaccaggaaagcc

SEQ ID NO: 913 - DNA, 782 bp, Macaca Fascicularis
  misc_feature (1)...(782): n = A,T,C or G
tatcactagccagcnnnnnngatttgnnnctactccccataagtcatagtaccataagtaggcttctggnnncagcaatttggtctttgtgcccaagtttattgtgaggatttcctgaaaactttataaaaggtctcttcctactccaggcctctaatgtttttcccctttttgcttcagtccactcgcagtcgtgtaggcctagttttcaaacctgcacatgtgtccnnnnnnnnnnnnnnnnngcaggcctcaggtagctgggccagtttgggagcctcaggnnnnnnnnnnnnnntctggggctgcctctgcacccctggtgtgggcttcagggttggagaagggctgggaccaaccgggtgagatccacacggctctggatgtggctagaggcaaatacgcgcttgaattgctttcccttttgaatctggtatgaaacatgcagtttccatttctagcccaaggaaagaccaaaacatagggaactaaaagcatttatctttgtcttggaagtagctgttgaagnnnnnnnnnnnnnnnnnnnnnnnnnnnnnnnnnnnnnnnnnnnnnnnnnnnnnnnnnnnnnnnnnnnnnnnnnnnnnnnnnnnnnnctaaannnnnnnnnnnnnnngaaattttgcttaccttagaaagtttctagtgatctaaatgtctagttttgtattcttttgtgtatgttcactggttctcagtattaccacttgaaaaattctctgtacagagggggtttgtgcnnnnnnntgggacgtctcatgcag

SEQ ID NO: 914 - DNA, 731 bp, Macaca Fascicularis
  misc_feature (1)...(731): n = A,T,C or G
gctggccggnnnacgncgtnntcggcttccgggacgaggtgaaccgggcccagagcagcgagccgggggccggnnnnnnnnnnnnnnnnnnnnnnnnnnnnnnnnnnnnnnnnnnnnnnnnnnnnnnnnnnnnnnnnnnnnnnnnnnnnnnncaaggcagctcgagccgccccaggagcgcgagaaaccaaanagtgggcaccgccccccgcgaatcgggttgcagcccccggcccgcgtctccccgggcgcccgcagtgaccccgcagccctggacgcgaacctgcagagccacgggtgtttgaggagcccgcgtggggccggagccgcgggccggcactgtgtccgggacggagccacaagctgtccccagctcagggaggcccaggggcggcagagggagcggcaggcagcgaagcccacccgtgaccacgtgtgnnnnnnnnnnnnnnnccagctcagccactcagtgcgggtctgagcggccaggacaccaggctgccctcaccgcagctcccgtctgccggccctgcctgctcccgtggtctgggatgtggccccatcagtcacaagnnnnnnnnnnnnnnnnnnnnnnnnnnnnnnnnnnnnnnnnnnnnnnnnnnnnnnnnnnnnnnnnnnnnnnnnnnnnnnnnnnnagggtgtgggcctgcgtgggcatgaccgtgtgtgtgacacagagtgatgtcgctgtgacccgtggctgcactccc

SEQ ID NO: 915 - DNA, 717 bp, Macaca Fascicularis
  misc_feature (1)...(717): n = A,T,C or G
tgccaccatcatgctggccccagggctgagcacacatgaagactgtcttgctggagcctgggtggccaccgnnnnnnnnnnnnnnnnnnnnnnnnnnnnnnnnnnctgggtgaatggggaccgctcctctgccaacctgctcctgggaggaggcatggtgctagcagtggctggcggccacctcagccctgagggccgctctgtggctggtcaggcaatgctgttggtggtcgcagtgaccatcctcattgtagcngtcttcacggccaacacttatgggatgtggggggggacgatgctgggtgtggcaggcctcctgagccggctggaggaggacaggctgctgctgctaccgaaggaggatgtctgtcgctgggccctggctgcaggcagctgggcttactgccgggccctgcatacacagcgcctgcagtgggaatgacagttggatacagcaaggcagggtttctgccctgctgaacactccctctcacctgcctgctcctggcgccttctcccctggaggtagactctcctgcccactgaagtgggcgtgctgcacactgactggtcaggagcagagtctgggtgctgtcctttggccacgtgtggggacttgggtagaccagaatgaaaggggcagggtcccaaacacgtttgggggacctgattctgggctggacatggttgtggatccagagaagaggcctgactcca

SEQ ID NO: 916 - DNA, 713 bp, Macaca Fascicularis
cacaaagtacacatatatgccctgcatctagccttgatatttcttctgctcaagtcaaaagactccagaagcaacagcttccaccttcaagcaatccagactcaaaaagccatcaaaactaagaatagcaaaagctaccttcttgattcagtgaagttgctgctagcactaaaagaaagagaaattacacttttgttcttcagatatggttaaaacaaagaaaatgttgtcaacgttgacaccaacatagacatttgctctataacatataaactgtcttttagacaggttatgttaaaaatatcagaatgccatttttgtaaaggatcttttttaggatagacgtggtctcatgcttcctttgttcacctccattttaaaggagcattgtaacccctatcctcacccctacaaaaatccagtggatgcacttcgaaattacttgtcattttatatgtgttatgtttattatgagcaattttcactggatgatgagatacatggcgatactatgtcagtttattctctgtgaatgtgtttgtacatagacaggaagctatttatttgtacataggctgtttggagtacgtacttctgtctcacatggacttcattctgataaagggtgtttcttcttgtttcactgtccacacctttgtgcttctactactgataatcaattcatagaatatcactttatataactaagtctc

SEQ ID NO: 917 - DNA, 572 bp, Macaca Fascicularis
agagaaccgagctgcctgtgtgggattggggtgagtgttggtcttacctggctcctccctgtgtgcacatgctgtccttggtgttttttctgttatggggggtggctgctgcagggccagcttatggcgaggccaggtctctgccagcagtcaggtccatgaagcaatatggtcagcggaaggaaaagggttttggagtcagacacaaaatttccactctcccacttcatgtgctttccttatctagacaagttgctgaacctctctgagcgttagttttctcatctgtaaaatgggttctgagaaacatatctagtagagcactctgatgtctgattgcctaattcaggataactcctctcccacaaagggcaccccctccactccatttgctttgcttccatgatggacaacgtgattcagaaacctttttctacccatggcaaaggtccagggtagtgaggtcttgggggctgagtgaagccagggaggtgagtattggaaccctctgttgtttgcctgatccataacccaggtcacattaccatggctgcaacattacattacatagt

SEQ ID NO: 918 - DNA, 732 bp, Macaca Fascicularis
  misc_feature (1)...(732): n = A,T,C or G
cagacagtnnnnngcttgctcgaaagtgtcatcaatttgtaattttagtattaactctgtaaaagtgtctgtaggtacgttttatattaaggacagaccaaaaatcaacatatcaaagcttcaaaaactttgggaaagggtgggattaagtacaagcacatttggcttatagtaaatgaaccgatttttattaactgcttttgcccatataaaannnnnnnnnnnnnnnnnnnnnnnnnnnnnttcatgattacgattaaagtaccagattataatgccagaatataatgtgcaagtaatcgtggatatctctgacaaagtgtctcaaaaataatatacttttacattaaagaaatttaatgtttctccggagttggggctctggcttttaaagtttgtctaatcagtgttgattctagatgatcaacacaacggaccactcctgaatgagactaattttgtctttcaatttactgtcttaaatcagtttattaaatctgaattttaaaacatgctgcttatgacagaatgacacatttgatgtaccaattaagtgttgaaaaatatctttgcatcatagaacagaaatatatatgttgaatgttaacaggtattttcacaggtttgacttgtttgatagttactcagacactagggaaaggtaaatagaagtgaacaaaataagcaactaaatgagatctaataattggccttcgattttaaatatttaat

SEQ ID NO: 919 - DNA, 762 bp, Macaca Fascicularis
  misc_feature (1)...(762): n = A,T,C or G
atcaagtgagnnaannnnngnttagagaaagcctgttnnnnnnnnnnnnnnnccatgactgcagtaacaaagtnntgcaaatttagaggctgaaaagaacacaagttttggaagctagaagtccgacatgcgtctccctgggctagaatcaaggtgtgggcagggccacttnnnccgagggctccagaggaggatcccttccttgccttttccagcttctagaggccgcctgcattccttggctcatggcccctccttcatcttgaagcaacattgtatctttctgacctcagcctctgtcatcacatcatcattctccgattctctattctgcctccttcttccatatttaaggaccctgtgattacatttgacccacctggataacccaggggaatctccctattttaaggnnnnnnnnnnnnnnnnnnncgttccacctgctacctgaatgcccctctgccacagaaggtaacatagtcacaggttccaggggttcgggtggggccattcttggggcgtcattaaacccccaagctcgtggatgtctctgggggctagctgccacgtgttacagccgttacgcctgaaatgttttctgttttagtggtgccttcccgaggttccctttaaacatggaaaacttgaggaagtgaaacacattcattcatttgtcaaacattgagccccagggagccgtgctaggctctggggatgcagtggtgggcaaaacacagtccctgcctcatgggattgaaatga

SEQ ID NO: 920 - DNA, 608 bp, Macaca Fascicularis
  misc_feature (1)...(608): n = A,T,C or G
agcacgattctcctggtgacacggcgctcagcccgaggaacctgggacgagagctgctctgtcctgcttggtggcgctcacaggagtgccttgcgggctctgagcagcaggcacaccgtcctcccctcctgccagcctggttctgccnnnnnnnnnnnnnnnncccccaccagcaacgcccacggccctggccacagccccacgtccaggctgccatgtcccggcgggcagtgcccaggcccagtgtatttttagcagacttgctgcactataaatagcggcaggccgggccttcctgcatctgcactctccgaacnnnnnnnnnnnnnnnnnnnnnnnnnnnnnnnnnnnnnnnnnnnnnnnnnnnnnnnnnnnnnnnnnnnnnnnnnnnnnnnnnnnncgggggtggccctggggaggcctccagggactagggagatgcggctgggaggagcctgttcttgagtctctgcagaagcaacagggccctnnnnnnnnnnnnnnnnnnnncttcgtccgggtctttctcagccacgtccgccagccaggactgggnnnnnnnngctcgtccagnnnnnnnnnccagcaggcgtgcggcaggcacgctg

SEQ ID NO: 921 - DNA, 765 bp, Macaca Fascicularis
  misc_feature (1)...(765): n = A,T,C or G
catnnnnnngnnnncagccagtgggagccgcgtggcctgggtgagccacgacagcaccgtgtgcctggctgatgctgacaagaagatggccgtcgcgactctggcctctgaaacgctaccactgctggcgctgaccttcatcacannnnnnnnnnnnnnnnnagcgggccacgactgcttcccagtgctgttcacatnnnnnnnnnnnnnnnnnnnnnnnnnnnnnnnnnnnnnnnnnnncgttcccaagcagagctnngcgagcggcttaacggcccgcgagcgcttccagaacctcgacaagaaggcgagctcggagggcggcacgactgcgggcgcaggcctggactcgctgcacaagaacagcgtcagccaaatctcggtgctcagcgggggcaaggccaagtgctcgcagttctgcaccactggcatggacggcggcatgagcatctgggatgttaagagcttggagtcagccttgaaggacctcaagatcaaatgacctgtgaggaatatgttaccttcatcctagctgctggggaagcagggagaggagtaggggaggctaatggttgctttgctgaatatttctggggtaccaatgtgagtccccataggggctgctccctcaaagaggggacagatggggagcttttcttacctattcaagaaatatgtgcctttttcttaaaaaaatgctttcatttatgaaaaaaaaaaaaaaatgcccccaaagcactatgctggtcatgaactgctcaaaat

SEQ ID NO: 922 - DNA, 407 bp, Macaca Fascicularis
  misc_feature (1)...(407): n = A,T,C or G
nnnnnnnnnnnnnnnnnnnnnnnnnnnnnnnnnnnnnnnnnnnnnnnnnnnnnnnnnnnnnnnnnnnnnnnnnnnnnnnnnnnnnnnnnnnnnnnnnnnnnnnnnnnnnnnnnnnnnnnnnnnnnnnnnnnnnnnnnnnnnnnnnnnnnctgacttcgtgatccgcccgcctcggcctcccaaagtgctgggattacaggcgtgagccaccgcgcccggcagattcttattttctgtagggaagtaagaagttgcagctcagtgcacataaagttgagactgagatggagacatccagccccacctctgtggaacaggaaagatgactggggaggaaacacaggtcagcgtgggaacaggggtcacggtggacacgggggtgggctgtccctccacctcctcacatt

SEQ ID NO: 923 - DNA, 355 bp, Macaca Fascicularis
ctgtttctgaagccagcaaagcaaaaccaccttaatgtgccacatggaagtgtaaggccccctcccattgagccaacagcccagtgacccctgcttagaagggaaaggataatgggaggacagggaggcaggacgggactgggccagctgcagcaggggtgggcaagagtcctctcctcacagagtcagggaaggggcggtttcgcttctcaaccctcctctgaaactgtgtcccaccccttgctgtggctctgaaatgtgcccggcactgctccctgcttattaccacaaggagagctcctcaggctggagcagcctagagcctttctcttcctaattctgtgcaagcattgct

SEQ ID NO: 924 - DNA, 3061 bp, Macaca Fascicularis
acattcatgcaaaggagttcgcacagtgctgggcaccaccaggttctggctgctgtgtcccatgtggttgggatgccgtggtgggcccagagccggatgggatgctgagctgggactctctatcaggtcccggtcaccttccctgctgagggcatcagaccctgagacctggagctttcagcctgacgtctggcacagcctcagacgcagtgatcatggagcattctctgggaagatgcgcctcaattttgtcctgccctagcctggaaaacacagagaactctgaagatagcctagcctgagttcaccagagccatggggaggagccagcccaggtatcaaagaggccctccagagtcctcaatctgtgatagccctccacctagctattctctcacaaagcacctggctcttctccttctgagcactcatcccaagggacgtccgggacctggggtggttccaggacggaggcctatggctgctgtagttgccctggggttggctggagccgggacttctctggagaggcacagagggaacttcacgggaaaccacatttacatccaggtgaaatcggttaggctgatcatcaaagcggtaggaaggatcccagagaggaaatgagagatctgtcatgttgcttaactccctggtcagtggcttctattgccttgaggataaggtctccaatcctacaggcctgccctgcctgactaggctgcacacccaccttgtcatgtgagggcctctgtgccgccagctcagctctaggcccctcctggatgccccttctgcctcagggcctttgcacattgttgctcttccgaccctttaccttctacaactcctcctcaagcttcaggcctcaggtgaaagtcactctttgtgagaagccccccctgacattcctcccccagccctcatccagaccagatgaggatattttctcttccccttatcgtgtatactccttcaatttctccttcagggcctaagcacagttgtaactctttatttagtgtccatcattccttttttaagaggacagtagccatgtctgcctgattcaccatgacattaccagtccaatgacaaggacatagtaggtatttctaaatatgtggtaaatgatggatgggcattttggcccacccattctaacgggtgccttgaagatggcagaagttacagggaaccagcatatggcttcgcatttggaagatctttctagtagagttggccaagaaccaaatgaatgcattgctttagggagtagtgagctccctgtcgccggaggagtgcaagctgagactgaatgactgtatgtggagacacttaagaaggaatctgagtttctggtgtggagtgagtatagaccctggaacagtctttccgaccttgtgaagattccctttggcccctgcagtcctgagtgagaggcgccagctcacagctctgtcttgagagcatctcctctcctttctgaagatggccctgaactgaatagtgaagggctctcgccaggtctgctctgcaaggctgatcacccatcctccagctgctgggactcttagctgcggatggctcacagctgcattctggagactgcctccctctgggtcacatctgctgccatgggtgactacaaccaatgacaatctgatattaggatatgaaggctcaccccgtgcctcaatttgggacaatgctggaggaccatctcagctgcagagactccccataggatggctgaggcctcaggtccccagtttgtgatggttttgcaacctttctttgtctttcatggtccggatgcttttgaggaatgctggcctgatgttttgtaaaatagcccccaagttggatttttctgatgttttcttatggtttgactgagttatggacatctggaggaagaataccacagaggggcttcggagactctgacccatcagttaagatgccacccagaagcttgccggggtgcaccagctgaacatcaactctactcgtaaccaaaacaagcacttggaatcatgctgggaatataagtctgcagaaccaaaatccagtttagacgaaggatcacaggttgagactctgaagcgtgggacggatttgctcacgcagccaaatcgcactgaggctctttctgcccctttcaccctttccttctcgttatcatcaccgtcaacaccgatcctcctgcgctggctcaggcttcgcggcaacaggattgaaaacacagcttttgttctgtgtctccgagaaggctcagctgctctgagcacccacagttcctggtctggactcccttgtggtttataacgcacttgagtcaatgcggggtcagtgttaggatcagtggtgatgagagttagaattcagtctggggctagggccatcgggcgttcttacagagtcagggatcagactgcattcagagtccggtcaccaggtaagcaccggaaggtgggtccggctcactaaaggctgtggccaagcctctgcccacagtgagggaggcccgtgtctgggagaccaaggcagaagaggaagaccgagaaagcagaacatgtctgtttcctccagctaccccaggatggctgctctgagctttcacgatgctatgggcccgtagttcaggggtcagcacgtagtgcaccaacagccagccctctgggcttgactccatggtgggcccaccctgcggctctctctcagggtgcggtgtcttactgtaatatctatcaactttgtcataaatgcatgttcttagcccaggggagggtgagctatactgaggggaaggggcccagcattgttttcgggtggagagtcaacatatgaacacgtgtggtcattgatgataccgtagaccaggggcgtgaaacctggggcttgagggtgggcactgcaggccactgagggtccacaaatccacctggaattgtgtgggatttgtgtgtgtccaattttatgtggttttccatcagattctcaaaggaccataaccaaaaaattagtttagaatccttaaaaaaaaaaaaaaaaaaaa

SEQ ID NO: 925 - DNA, 2010 bp, Macaca Fascicularis
actaactctttatcactggaaggaagtggaagtccagactccccagcagcctgcattggtatcaccatggcagggagcggggagctattcattaccagcagatgaggatagaagttcatgctccctgggtagtctccactgaactgagggaaggcattcagggaagggcagctcatcaccacagggtggaggtagaaatccaggctccctgctcgacttcctgggagaccacctcagcatggacggaaaagagcacctcattacctccgggtgaagatggaaatctatgttttcaacctatgcttctcagccttttctacaaagtaaaggtattatgggagataggttgggacagagaaggaaagccaggaagaaaagacagtatgtgcaaaagcatggagatcagaattcgaagaggatactgctaaggtaaatagagcaaggagatccagcagtaaattaaagcatatttggatcttccacaagaagttttagattttcatgtcttacatgtcaacagggtctaggggaaagagtccagtcccagtaatcaggagccctcagttctgattctgtttttacctctctctagccaaggccaggtttgacctttagtgataatacaacacaaacatcatttcctttaaaacatcagtatctgaaatgtccatccttactgaacattcttacggtatcttaatttaacttatagaaggcaagaacagctttttcttatatttctcctcctgaagtcatgtgccatgattcaactttctctttgttcataaatatatggaggaccttaatccaaattcataaatctttagatatctgttcaaatagcaaaatattcccaacccagtacctctcagatctcttaggaaaccccagttcttatctccactgctgatgtcctggtagagcaaacttctcccaataactcactccctcttcagccaaattaaaacttagatttattccaaatgactctgacatgtcattagaggaacagttactagctatgtgcatttgacctaactctacctttcaacaagatcatacaatgattgacttagccaaggaaatgcatggcagcatcgtctcagaatttttctttttctttgctttctatcttgaccaaaaagttatgagctttaaaaatgccaaactgtgtctttgtcttgcaactaatgtagctgagttcacgttctaatatataatggactgatacaatttttttgtctcttggacagtgaggtaatatgttggaaagctgggggtacacattctagtgtggagaccccatcctccatatgcttagtttattactttaaatcaggcaagtcctaaggaacttcggaagatgggatggtcatccctagcagatacaggtaatagaaagaggatcaagtagggatctctctagattattgttccaagagaaggttttgacaaaaatagtttgtagcaaatattctgtaagataagaaaagctttggatttggcgaaataccatttgagacttataaaataggaagtcctaggtacaaggtgatctttaaaagaaattctaaggtcaaacagaatgaagttaaatgttacagactgagtgtttctgtcccccaaacttcatatcctgaagtcctaaccctcaatgtgatggtatttggaggtggagactttggaatgtaagtagatttggataaggtcatgacggtggggcacccatgatgggtttagtgtccttataagaagagaaagagaccccagcttgctcaagagctctcgctctcactcccgctttctttctctctctctctctctctgtctctctctctgtctctctctccctgccatctgaggacacagtaagaaggcagccatctgcaggctgggaagacagccctcacagaacttgaccacgctggcaccctgatctgggacttatcctgtcactggaactgaaaaataaatacgtgttgcataagcaaaaaaaaaaaaaaaaaaaaa

SEQ ID NO: 926 - DNA, 730 bp, Macaca Fascicularis
  misc_feature (1)...(730): n = A,T,C or G
cacgtgtaannnacgctcttgccagtggatgatctggaatgcgaccggagcacttgnncngaggaatcccagggtgattgtgtaggggagcaatctggtctcctctcagggacaggcctcagttctggggcagcccattatctgtcgcagacatctgctgtgtccctggggctgtggaaggcaggggatgcatgggtgtcccgtctgtccctggtgagaagcaaagctagctctgccttccacatgcatctcaggatgccaagaggcctaggaacccagaaaccccctggaggagctgtgtacacgggggtgcccggaagggcacagctcctgcccccaggcctaggcatgctgcttgcttggccatccccacttcctcctccaccccaacacatgcaggctaggccttgccctgggacccggaggccctgcctggggctggggcctgtccacagccaccaaagtctgacagactttctgcatttgagaaacatgataaagggccccgcagcccttctgcacccaggacagcctgcccagcccagccctgcccccgagcattgcacagcctgtctgggggccagaccgtcccattgtccatccttgttgtccatgagtccttggcctccaccaagcacgtgtggccattgtgtgcctgccttagtaactctgtggttttgtgaggagcagagtgtgtgtatggtttttgcctcagaaactatactcttct

SEQ ID NO: 927 - DNA, 635 bp, Macaca Fascicularis
  misc_feature (1)...(635): n = A,T,C or G
cactgggggcggaaggaagtggagctgnnnnnnnnnnnnnnnacatgaagctggagggtttgggattttgttttttgtttttgtttttttnnnnnnnnnnnnnnnnnnnnnnnnngaaaatgctgtgggatagnnnnnnnnnnnnnnnnnnnnnnaagtctgacactacagcgttggcacagtgccatnnnnnnnnnncctgtgcccaaggaactctgactannnnnnnnnnnnnnnnnnnnnnnnnnngtcatcttaannnnnnnnnnnnnnnnnnnnnnnnnnnnnnnnnnnnnagtcttgaaactggattcatggatttgaagtaactgtaaaccctaaatcttcattttcatcnnnnnnnnnnnnnnnnnnaaacctcagaattatagggcctggcctgagctgtttaattcaaaagatactattcaatttaaagctatttttcctcagagtttttgttttctatatattaagcctaaattaagttttnnnnnnnnnnnnnnnnnnnnntccccactccatccccactgaaatttgtggaagaaaatttagtacttggctctgaggttgccagttatacaataatctattttgcatatgaaagtttgtatttaacttttttgttcattaaa

SEQ ID NO: 928 - DNA, 736 bp, Macaca Fascicularis
  misc_feature (1)...(736): n = A,T,C or G
ctcacccaaaggcccctcccttgtcccagcaggagcnnnngctgctgctagggcccggcccggccattgccgtgtgcacccgcttgaggaggggggcacgctgcctgtgttcgaggggctgctcagaggaggcaaacccagccttttgcaattagggcctgtggagaacccagacctcgaaaccccacaggaagggtttggttgtcaaggtgggtccctctgatgtgaggtgccatcctctgagcccaggtctgaccccctactcagtcccatgagtctggagaggccccaggggacgacccctcatcgggggcagcttcaggtgtagaagttgaggggacagcaaggggcccagacacccccggccttcagaacagccatctgtgcccagctctgcaggccgggggcacccagccgagcccagggccagccagtgccacccaccagctgaggcctgtaggtcccggagaccgtctgtggttgtggctttgtcaccagattgcagagctgaagggagccctgtgggtgacaaacactaggggcccctccagaccctacatggggggagggccgaacaaagcagggaggcccacggttagggaccaagcagaactgcccaggagagacacagggacaatcagaccagggtcctcgaggctcgcctgagagggaagggcacggatgacgacctgtctggtggttcctctctgtcccaccacttaactgggagacactg

SEQ ID NO: 929 - DNA, 555 bp, Macaca Fascicularis
  misc_feature (1)...(555): n = A,T,C or G
gtacagcannnnngagnnnnngtgcactgccccaccctgccacaggcaccatccagtcctggccatgtgaccacccacnnnnnnctgggcagcaggcacannnnnnnnnnnnnnnnnnnnnnnnnnnnnnnnnnnnnnnnnnnnnnnnnnnnnnnnnnnnnnnnnnnnnnnnnnnnnnnnnnnnnnnnnnnnnnnnnnnnnnnnnnnnnnnnnnnnttttgtattaaatatattgtgaaacaaacccatctgcttctaaagcagtgattttggggagaagcaatctacttgctgctgcttcctttctggatccaggttgtgtccttggagagtggctggtccaggtcctattcctgcccttcagcctgttatttcatgagggacagaaagataaaatcagcccttaggatagaggtctcagcctccctttcccagatctcccagtgagttttaaaagaaacagggagcaggccgggcgcggtggctcacgcctgtaatcccagcactttgggaggccgaggcgggcggatcacaaggtcaggagattgagaccac

SEQ ID NO: 930 - DNA, 691 bp, Macaca Fascicularis
  misc_feature (1)...(691): n = A,T,C or G
gtgtgtgaatagtaatacacagtnnnnagtnnnnnnnnnnnnnnnnnnnnnaaattgagttttcagggaaaatcagcaagtaaatgaaatataaatttttggtaaaaagtatcaaacattcatcttgcccatttttcctgttaaactttattatctaatcaaaacatagttttccataagatgtaataaaatatagataaggttggaatatttgaggatccatttgtggaactgagtttaatgagacttcattggtgatacacttgagttttactgggtaattagctgataatgttnnnnnnnnnnnnnnnattcaagtagctttnnnnnnnnntggcaagaaaaacacaaaacttttgggtaaccagcattcttaaatgcatggttttgaccaggtgaatcctttagaagtggtttctgttttaaaagtatgtacttaaaannnnnnnnnnnnnnnnnnnnntagatcccagcagaataccaaaatcctattttttttggctgagtatttgtatatgcttaatgactgaaatgaatttggaggcactgatgaaagtgattttttaaagttctcaggtactgttcagttatttaatgttaagtttagtatcaagatgcaattgtttttaaaatgccaaaatgccgtttgttatacannnatattttattacatttgtaatatctttgtata

SEQ ID NO: 931 - DNA, 1922 bp, Macaca Fascicularis
aatctgcatagctttcggaggcttgagaatattgagtgcacttgacgaaactcttaagtgaccgagttaagatctgagcatcagctctcggactgcacagcccaggtcccaggtcccctgtgacccacagactcctgactaacactcagttacaagaccctccacctatatgctgccccttcctgtgggctgctacacttttagatccttctcccaggttctccaagtactgagcttgtctgtcataggcaatggcattttggtattggaggttgtctgttgctgtaacagaggcctgaatggacagaaagagagtggctgagactcctggccttcccccaggctgtccaccctgagaatgggcccaaattagcctcctcccaccccatctccaccccagggccagcaattatttctgagctcactgaacccctagtctaaatataggtctaatagccatttctcatttcagaatggggaatctattctgagttttagttggatatagatcagactccccagatgcacaagatgtgaaatgggttcattacccctgccaccaccaccactcaccccttgaaaatgaacttcctaatggaaagtaactggcccgctactacagtccagcggggtcagctcctggcagatggaagcgggaagctctgccttacatctgcagcctagaaagaatgaaggctggcacagtgcagctgggtctcccgactgtccttcctgtcccacccagagaaatgcaaggagggacattgctgagcactgacaacagaatttaattgtcacctaatagggggtatattcactactccctttatgcataggaggaaaccgaggctcaaagagacacttttgacaagtggctaagccaggagttgaatctaggacttcagaagactgtgctctctccattctctcagagacgatgtgcacacaactctttactcaccctcacaattgtttatattaatgataaatagaaatggtcgcagtaaactctagtggtttcataattcatcattagaagttgtgacaatttcctttcttagaattcaaagtatatttcagattgatatcatcgtactttttcaagatcacaagagctagggaaagggcagagctgagggtccctatcatacagatagatgaagtaacccagatgagaataaaattgagggagatcctggagtgagactcctggagatttttctagccataccatagttagttatgatggaatcttctaggtagaaaggacgatagagatcaatttatgttgaacactgaaagctagacagatgaagacaattgctaagggattgcagcaagtgaggaacaggtctaggattacagcccaggtcctaggaccccccgcccagtgatgtcccagcataccatgactcctccacatggaaactaaactgatgcaaacatagtgcatgatagcatctgcacatattgggactgtaggcagaggtgccatggtcctcgcccagtaacttttgtagagagatagagtcttctgcatgttgggtggaattggtgtctgggtggacaggtgacatcactgaataagtgcattgctaaacaatgactttcccacccgatatgggatggttaattttataaggagaaaactcccccatggcccagggctcacttccagggtgctgctggtcagaaggtgaaccaagagggagagaccaagcagccaagagccctttccatagttccagaatattagaaatcttgtgggtataaagaaaagttgggccaggtgtggtgattcatgactgtaatcccagcactttgggaggccaaggcagtcagatcccttgaggtcaggagttcaagaccagcctggccaatatggcaaacccctatctctacaaaaaaaaaaaaaaaaaaaa

SEQ ID NO: 932 - DNA, 713 bp, Macaca Fascicularis
  misc_feature (1)...(713): n = A,T,C or G
gaccaatttttggattatttttngtctactgtcattccgttgatgannntagatatnnnctgcattaaatatcacctctaggcagagaaatgcccccacaaatatttctagctcagatttttcctccaaattctacaatggaagatcacagtgtgaactctgcatctccacattaaagtctaaacgacattcgcacttagcatgtctcaaagaaacctcatgtaaaccacagccatcctgttctgccttaactttctgagtctaaggaatgataatttcacatctcataaacccgattgatataattgtcaagaaaagattgacattttgttaaaacttaatagtcaagtgnnnnnnnnnnaagcaaactttcatatttcaaatctcttttgcacgtgtaactctgacttcaagatgtgaaataatcattgggtcagttatttgtaaatactaaaactgctatgnnnnnnnnnnnntttgtcaccatccatttttataaaactcttacggttaaaaaagaaaaaaaaaatttactcagaatttcataaagccaannnnnnnnnnnnnnnaacacttatgatgtcaaaaaattgtatagggacgtctaatcactaattttactattttttctctcaaagaaatgctgaagggaagaattcaggttgaatgaaaggaaatagtaacttatagccatatagaattataaagatttc

SEQ ID NO: 933 - DNA, 704 bp, Macaca Fascicularis
  misc_feature (1)...(704): n = A,T,C or G
agacaactccctcatgcatnnnctgaggaaacttacagnnntngtnncttcagacctccagcaccctccctgccagcttagatgaggcgctccctcccgttcccacaacgaccccacattagctgccttcctgaccctacctgaggacaaggctcgggtatatgggagatgcagcgctctcaagggtcttctccccatctccctccatcnnnnnnnnnnnnnnnnnnnnnnnnnnnnnnnngcctcaacatgtgccccatacgtgtcacgggatgacacagagcaaaagcccagcacccccagctgctcctgtcctctgccccattttatcacagctctccagaaagctgttttctctgtccatggcctcacctcacccaggccactggccttggtccacataaaggggacctgaaacttcttccctgaagcctctagcctgnnnnnnnnnnnnnnnnnnnnnnnnnnnnnnngtccagcctgtcaggagctgggaaatactaagtcaccctcttctggttatgtttaattttccagtttttctcaacattactgaaatgtctaaacgtggaaaagttgacatcattttacagtgaacaccacatacccaccacctagattctaccattaccaatttcctgttccgtactctcatattcacatctatccaactattcatccctgcttcaatccatcctactttt

SEQ ID NO: 934 - DNA, 1216 bp, Macaca Fascicularis
  misc_feature (1)...(1216): n = A,T,C or G
gtccccgctggtggcggccgactcgctcctggagcatgtgcgggaggacttctccggcctcctccctgaggagttcatcagcctttccccaccccacgaggccctcgactaccacttcggcctcgaggagggcgagggcatcagagacctcttcgactgtgactttggggacctcacccccctggatttctgacagggcttggagggaccagggtttccagagatgctcaccttgtctctgcagccctggagccccctgtccctggccgtcctcccagcctgattggaaacatttaatttatacccctctctcctatctccagaagcttctagctctggggtctggctaccgctaggaggctgagcaagccaggaagggaaggagtctgtgtttgtggtgtgtatgtgcatgcagcctacacccacacgtgtgtacccggggtgaatgtgtgtgagcatgtgtgtgtgcatgtaccggggaatgaaggtgaacatacacctgtgtgtgcactgcagacacgccccagtgtgtccacatgtgtgtgcatgagtccatgtgtgcgcgtgggggggctctaactgcactttcggcccttttgctctgggggtcccacaaggcccagggcagtgcctgctcccagaatctggtgctctgaccaggccaggtggggaggctttggctggctgggcttgtaggacggtgagagcacttctgtcttaaaggtttttttctgattgaagctttaatggagcgttatttatttatcgaggcctctttggcaagcctggggaatcagcaaaggggaggaggggtgtggggttgataccccaactccctctacccttgagcaaggacaggggtccctgagctgttctgccccacaccgaaggagctgaggcctaggtgatttatttattgggaaagtgagggagggagacagactgactgacagccatgggtggacggatggtggggtggggcctnnnnnnnnnnnnnnnncagggccccagctgccccccaggatggatatgagatgggagaggtgagtgggggnnnnnnnnnnnnnnnnnnnncaggaggggtggtgaaggcctcccccagcccagaccctgtggtccctcctgcggtgtctgaagcgcctgcctccccactgctctgccccaccctccaatctgcactttgatttgcttcctaacagctctgttccctcctgct

SEQ ID NO: 935 - DNA, 677 bp, Macaca Fascicularis
  misc_feature (1)...(677): n = A,T,C or G
gcactgnnnnnnnnnnnnnnnnnnnnnnnnnnnctgtgtgtnnnnnnnnnnnnnnnnnnnnnnnnnnnnnnnnnnnnnnnnnnnnntgaggtttggtcaggaaaaccaatggcagtgcgctnntgnnnnnnnnnnnnnnnnnagagggtgatgttgagaaaggcagtccctgggggtgcttctggagtgtcagtagcccctggctgcttagcgtgtcctctccctcctgccccttctgnnnnnnnnnnnnnnnnnnnnnnnnnnnnnnnnnnnnnnnnnnnnnnnnnnnnnnnnnnnnnnnnnnnnnnnnnnnnnnnnnnnnnnnnnnncatttaccatcttagccatattgaagtgtgtggttcaggggtattaaatacattcacaatgttgtacagccatcacccccacacatttccagaactcttttcatctacagctaaaactctgagcttcaaggtggggtgaggggggaaaaaacaaacaaaagaaaactaaaactgtccccataaacaccaactctccattccctttttccgcaaccccggcagccactatnntagtttctgtctctatgattttcactatgctactttcctcacagaagcggaatcacaagaatatttgtctttctgtgactggcttatttcacttagcacaatatnnncaaggttcat

SEQ ID NO: 936 - DNA, 2470 bp, Macaca Fascicularis
aatacagaccccaggggcttcccttgttgctttcagcacgtctgaggttgggcccaggcttctataattttttaaaagctccccaggcagttctgatgaccaggtggatttgaaagtcactggtttagaccccctcagtcctctcctgggcttacagggcagcatacagatcctccatgcacctccctcagtggcctccaagtgccaccaccacatacgcccgtccatgtggaatcacaggagcccctgaagggagaaaggagccacacagggcgaggggtgggcttgcctctaatcttaggggagggctctgcagaagaaagaggcaggattggattgattgcagtaactgagcctcgttctgtcctctgggcatcgaactgcctgttccatctcctccctcagcgggatgccagtctgagctcctaggagcatgctctcccagtggccttactccccaggccctacggtaccaggcacatcgcatctttcatcttcctagagctccaggcctgttgccccagcttgtgaaagggagaggggctcctgcctcccatctccacagctgggaaaatggaagcaccgaataccaaatcgggagaaaattcccgcctcccagctctggtctgggagtggtccttctgctccctctagatggctgtttcctatttcctttccagtacctaggacatacagtttctccagcaaatgaacgcatggatgaatgaatgaagatgctacagtcaggactaaacacttggggaatacagtgatgaatgggacagttttagtccctccacccaccccacccctccatccttgtccttgcactgaaggtctgggcaggggatagttgaaggaccaggcactagagtccattccaagacaccctctctcacttcagtccttagtggagcaatttaatcatcttaaaagttcagatttatccagacccactccagtttgcacttacgtggccctgaagggcctggtccagctccgggagtgggtaatgattgccgtcgaccacacagaagcctcactctgaagcaccttccttcctgctctgtgcctaagccatgtgggacaggaagtccttggactggcaggtgtcctttttaaagcccctgcaggtgattctcacatgcacttaaaatcgaaaatccctggcccagttgtacatccctctgcccaacaaatgtaccatggcccatacaaacccaggagaagcaggcggtaggaccccagcatccctcacagcctctggccatgaccctggccaagggcttgcctgcccaggtgtccaggtgtccgggcattccaggctgggggtcggcaggactgggtggctccctcaggcccccggggctggctgtgcattgacctgagcccctgaccacagttcgaggagatccatgaggtgatcgcgcgctacaagacgctggtgagcatgcaccacgacctcatgcagtctgcgcaggagggccaggagaagattgagcgcgccaaggcccggctggcgcgctacatggaggaaaaggatgatgagatcctgcagcaaaacaatgagctggcaaggctgcagatgcgcttcgaccatgcccgcagcaatgtcatcatctgggtgaggggcccggggcgggccagggggcgcctgggcactgggtgagtgagggccctaagcatgcatacacacacacacacgcacgcacacatacaccacatgctgtgctcatgccccgtccttatcccctccccaggaatctcgctgggcacacatccagaacaccgcagccaagaagacgctgctgcttggcactattaagatggccacgctgaacctcttccagatcgtgagcaagcagctgaaggaggtgaccgaggtggccctggaggacacccacaagcagctggacatggtaggaggaggggacaggtactgggcccgtggggtcagctgggccgaggaggttgccagtggttgggtagaagaatgaacccgacagagcagcagagcagggactctcaaaatttaacaacatcaggatcacctgggagggtgagcagtcttactgggccccacccccagagtctctgactcagtggatctgagatgagaacccaggaatttacattttcagcaagttcccaagtgacatggctggttcgggaactttgagaaccgttgcattagcagcaaaaccctttttagccccagtctagagagcagtagcaggaacccactattgaatccattagttgtacaaaacagccttattaaattctagtgagatactgtggcctgctgaaggcttgagcttgagacccacactttgttaaaaggagaaactggggccgggcacggtgactcacacctgtaatcccagcactttgggaagccgaggtgggtggatcacctgaggttgggagttcaaggccagcctcaaaaaaaaaaaaaaaaaaaaaaaaa

SEQ ID NO: 937 - DNA, 1505 bp, Macaca Fascicularis
gacgcaacgcagggggaaaaaaagtcctttccgaaaggagcagcgccgagaattcaccggagctcggagaggcgaggcggtagcgccgagctgaggccgaaccggagccgggcagcgcggacccgcccaggaagaggcagctccggggaccccggcgagtccccagcagggcccctgggcgcccggaagggtctccagccacctgcccttcccgagaggagagagctctgggccttcttcctgccagtctggtcttcgagtgccttcaggacagatagaccttggcacaggctgtcctgagattcctgccttctgtggagcatggcacccacaggattccaggacggatcgtagacccgagcctccaggagggtgccctgtgctgctcactgcacagtccctctcagctcccctgccacccagcctccaaggccggctcccatcccggaaatgccctcgggcacctggatgaggccatcccagagcgggacccaactgtgccacccaccaaccctccccctgtgtcccccgcccgctcgcatgtcctgctgccagggcagactgtagaatgtctgtgccccagatccacgtggaagaagtgggtgcagaagagggggcaggagcagccgcaccacccgatgaccacctccggagcctgaaggccctcaccgagaaactgaggctggagacccgcaggccctcctacctggaatggcaggccaggctggaggagcagacctggcccttcccgaggccggctgcggagccacaggcgagcttggaggagggggagcgtggggggcaggagcccttgctcccgctgagagaacccgggcagcacgcccctcctgccaggagtgccagccggggcaccacacccctgtccactggcaagctggaaggctttcagagcatcgatgaagctatagcctggctcaggaaggaactggcacatcagatgtccaagtcaggaggccctgagcagccagaaagcctgtgcttcaacccttcagaataggatacttgcaaaaggtcacacaggaggttgctagcaatgcctcgtaaccatttagcaggggctgggcagctgtactgtttcaggatgaagatagcaagttgctcagagccatcagcaaggcactggctgagcggggatttggttcacaagagaatttctagtcccagcctctgttcacccaaggctcagtcttctctgcatagcccggggctttcggcctgtctggcagcagccctgcaggaggaagattcctgttctattcatctgggcagatgtggcctttcgggagttactaaagaatttataaacaaaagaaccagcaaaggaaatacaccataacttgatgatcgttatttctgagtggtaatatttcttttgacgtttctatagttttcaaaattcctaaaataggaatatatcatgtatcatcaaggggaaaagagaatattaaaagagcaaagaaacaaaaaaaaaaaaaaaaaaaaaa

SEQ ID NO: 938 - DNA, 669 bp, Macaca Fascicularis
  misc_feature (1)...(669): n = A,T,C or G
gtgctgtcatttgacgcagagctttctgggtactgtagtttcncaggttccaacatggtaaaaagagctatcccctgcggctcttcggaagggaaagcccagctccatctcctgggctctcagggaggagtcctgaccccgcacagtggcgcgcgcttataatcccaaattttgggaggctgaggtggcaggaatgattgagcccaggtggtccaggctgcactgagctatacctgcacctctgcactccagcctgggcaacagaccctgtctcaaaagaaaagttaattaagcatttgtgctgttaaaggagaagaccgcccccatactgttttatgcccaatttctgcctccaaagaaagaagtaaaaactaaaaggcagaaatgaaatccacaggcagacagcctggcgccacaccctgggtctggttaaagatcaacccctgaactaaccggttatgttatctatagattccagacactgtatggaaaagcgttgtgaaaatccctgtcctgttctgttcagttctgattaccagtgtgtgcagtccccagtcacataccccctgcttgctcaatcgatcacgaccctctcacgaggacccctttagagttataagcccttaaaagggacagggattgctcacttggggagcttggttgttggag

SEQ ID NO: 939 - DNA, 713 bp, Macaca Fascicularis
  misc_feature (1)...(713): n = A,T,C or G
cctagagctgaggtcactnnnnngctatgacaannnnnnnnnnnnnnnnnnnnnnnnnnnnnnnnnnnnnnnnnnnngcagctgagctgagcctgatctgagggagggggtggggtcctgtccagatgcagaaggggagcttgcctgctgctctcacacaatgcagtctttgtttctcttccttgaaccagtatttcccaagattgagtgacagcccaggagaggatatgggtctatgcagagacctgggatcttcttggccattaaagtgcattattcaccccgacccagcgggaacnnnnnnnnnnnnnnnnctgcctctgcacacgtgctgagcgtgctgttgtgtgtatgggaggaccgtccctatggggcatgtgtgagctccgctgctgggtcaggctnnnnnnnnnnnnnnnnnnnatcccnnnnnnnnnnnnnnnnnnnnnnnntgtctctcctgcagcccaaagcacttcccgtggttgctgtagctgtctcattggagcagtgtctctccaagtttgaggatttgaacaaagaactgggactggtgacttgttaatnnnnnnnnnnnagggcagagagcaatcatctcagcttgtggaggcctttctttccctggatgctgcttctcagctaaatcaatctctcttcatgtgtgtacttggccctctgggtttccacctgacttttataccttcccaccaaga

SEQ ID NO: 940 - DNA, 704 bp, Macaca Fascicularis
  misc_feature (1)...(704): n = A,T,C or G
cagcttggaccccaataatttcatcctagatgatatgatagnnnnnnnnnnnnnnnnnnttcttcactgcaggacatctcagagcttttaacataactgcatgattatatactctaagcaacagagagcttcatgactgagtaagggttttgaagtcagcagtgaatcaagtgcccacagatttgcaggcttaagcagaacaagagaagattgatatttttgcatttgctatagcaacttactcctataaaataaaactgatgatgtttgcaccttgagactactctcaaaggtgtcttaaagtacaggttaatggtgaacattttcccccagtggtttcacctcattcctccnnnnnnnnttaccccttccttccnnnnnnnnnnnnnnnnnnnnnnnnnnnnnnnnnnnnnnnnnnnnnnnnnngaacttgccttcagggttagcttcatgtaattttaccacttccccatccccaccgcattatgtcaagattcaagttataaatcagcattttaggctttgaaagagatttcatgagtaatttgannnnnnnnnnnnnnnnnnnnnnnaatagcaactgtctgacttgataactccagtgccagtcnnnnnnnnnnnnnnnnnnnnctattcagtaaatgtctgatgaaagaaattggacttttgccctttaatattgatgatgcaattttgaaatgttg

SEQ ID NO: 941 - DNA, 600 bp, Macaca Fascicularis
  misc_feature (1)...(600): n = A,T,C or G
tgtgtttgaggaacaaacagcaagatgaccagcatggtcagaatgaagaatgagggaaaccttgaatgagaataaagcaattccatcttggatgctaatctgccatgttctgattaatcccacttccaagaattcatctacgatttgtattttatcttttaaaaaaaattattttttattttttattttttgnnnnnnnnnnnnnnnnnnnnnnnnnnnnnnnnnnnnnnnnnnnnnnnnnnnnnnnnnnnnnnnnnnnnnnnnnnnnnnnnnnnnnnnnnnnnnnnnnnnnnnnnnnnnnnnnnnnnnnnnnnnnnnnnnnnnnnnnnnnnnnnnnnnnnnnnnnnnnnnnnnnnnnnnnnnnnnnnnnnnnnnnnnnnnnnnnnnnnnnnnnnnnnnnnnnnnnnnnnnnnnnnnnnnnnnnnnnnnnnnnnnnnnnnnnnnnnnnnnnnnnnnnnnnnntgtgcctggccgtacacatccctactgaagcacgcattaccctttccctatgctatataagccctggtcaggaaggtggggttaatggtgcagggatccactatcatgtcttggtgtcatcccctgatttggttcctg

SEQ ID NO: 942 - DNA, 811 bp, Macaca Fascicularis
  misc_feature (1)...(811): n = A,T,C or G
cacggatgccactcaggaggaggatgtggacgacatggaagggagtggggaagaaggggacctggagggcagcgacagtgaggcggcccagtgggctgaccaggagcagtggttcggcatgcaatgagggggcggcagctccatggccgcactggcctgccctgctctgagcacttccgtggactgaaggaaccgtaggagcctgctctcaggaggacaatgattcagcatgtgattgcagcaggggtctctgccccctcgctcccgattcctagtcgtgacttcatttctaaaacagagcctgaccaaccttccatgtatctccatcctcccctgctccagccagggaggattgagggagtgccccaagacccacacacatgttggggcttctgggccaagagtactttttatatnnnnnnnnnnnnnnnnnnnnnnntcaaggaatagacagtgttctgtgacatggatgggtttgaaagagttacccaccatcccagcacgatagtgtcatctcccaagttggatggcagcacgatctggccctagggagcttcctgttcccagaagtcactgtcctgggctatccagacgtccctagtaatcttgcttccttctgcaatgttagtaatgccttaagctgacagttgctattttgcagaacagttttcctctttgcttagctggtaacttccctccgagcctgggctgatctgagaaaacaggtgtgatgagagcatgaacagagatgcacctggggcagttccctaataaaactggtttgtacagtcatggtgttggggtgatcaga

SEQ ID NO: 943 - DNA, 727 bp, Macaca Fascicularis
  misc_feature (1)...(727): n = A,T,C or G
gtccttccacagttccatannnnnnggcctgaacaaacggggacctggtgttgaaggatatctccagagcagacgatgggctatatcagtgcacagtggccaacaacgtgggctacagtgtttgtgtggtggaggtaaaggtctcagactcccggcgtataggcannnnnnnnnnnnnnnnnctgggctctctgctcgcgctgggctgcctggccgtaggnnnnnnnnnnnnnnnnnnctgctgctgcgggggctccggggctggcggcgcccgcggtgccttcggctacggcaacggcggcggggtcggcggaggggcctgcggnnnnnnnnnnnnnnagatcaggtaaaannnnnnnnnnnnnnnntgctgctgtgcggcagggaaccggcgccctgcccacctcactcctgcctgccaccggccggctgggccccccaccccaaccctgcccgccatcgccacggagtgctgggactgcggcatgtcgacctgccacccaacgcatggcttttccctccctttcccaccctagtcttcacctctgctccctgccttccatttccctcctannnnnnnnnnnnnnnntcttgtctagnnnnnnnnnnnnnnnnnggcagggcctatgttttttcacgtttcccctgtactgcgccggtgagaactctgacatgattatttaagatgaactaataataagaatagtgctaataacttatatagaag

SEQ ID NO: 944 - DNA, 723 bp, Macaca Fascicularis
  misc_feature (1)...(723): n = A,T,C or G
catgtgacttcagtgagctccaacnnngaggccctgagatggccccagctcctgtcctcagcctgcccctcattgtgacttatgaggagccaagcctgttgctgccaggagacttggggaacaggacacctgtgggccctcagttcccctctgtcctcccgtgggccatcccagcctccttcccccagaggagaacagtccaccccacttggcccggaccccgggcttagcccctaagccctcctttaccctaggccttcctggactcctccctccagctgtggaacctgagttccccttcccttctcaaagcaagaagggagcgctgaggcatgaagccctggggaaactggcagtaggttttggtttttattttttgnnnnnnnnnnnnnnnnnnnnnnnnnnnnnnnnnnnnnnnnnnnnnnnnnnnnnnnnnnnnnnnnnnnnnnnnnnnnnnnnnnnnnnnnnnnnnnnnnnnnnnnnnnnnnnnnnnnnnnnnnnnnnnnnnnnnnnnnnnnnnnnnnnnnnnnnnnnnnnnnnnnnnnnnnnnnnnnnnnnnnnnnnnnnnnnnnnnnnnnnnnnnnnnnnnnnnnnnnnnnnnnnnnnnnnnnnnnnnnnnnnnnnnnnnnnnnnnnnnnnnnnnnnnnnnnnntcgccctggcctagcagtaggttcgcaactgtctcatagaagagccctggagaagacagtagaatgagcct

SEQ ID NO: 945 - DNA, 247 bp, Macaca Fascicularis
tagtcatctccaaaaagagtaaaaagaacgactttttgtagggtggtatgaaattgtgaaggggagagtatataaaattccagacacaggtgggtagagatgcacatatatatatacacacacacacacacgcatttgcacagacacacatatatatcaattctcatgagtgtattataatctctggtgggggcaagggtctggaaggcctgaggggcatttcagatgagaatggagaggtagagag

SEQ ID NO: 946 - DNA, 727 bp, Macaca Fascicularis
atgtccattcacactcctcataagacatactgagactggaaggaaaaggttaatggacttccagttccacatggctggaggcctcagaatcatggcgggaggcaaaacgcacttcttacatggtgtcgggaaaataaaatgaggaagaagcagaaactcctgagaagcccatcagatctcctgagccttattcactatcatgagaatagcatgggaaagacgggcctccatgatttaattgcctccccatgggtccctcacacaacacgtggcaattctgggagatacaattcaagttgagatttgggttgggacaaagccaaaccatatcatgtggtcattgacttttcgtgaagttaggcaatatgcctaaggtcatatacattaatataagtgaacaaatacttgaaatcagatttccctgctccaatttccaagctagtgtatgctttattctgcttctttcatgtgttacttacttctttctttaatatcttcttaacagacaacattttaagccaaataaaactgaaaccttaataatacaatatcattggttgaagatgttctcctctattctagataaatgttttttattaaatgaaacttatggcatatcattcagaaatgttttcaagtttctaaatgcactaacatttaaatagttaatgtgatattttatattaccttagtctcctgttaatctgtaattaaatttgttactttt

SEQ ID NO: 947 - DNA, 754 bp, Macaca Fascicularis
  misc_feature (1)...(754): n = A,T,C or G
actganngnnnnncaggactccttaactgtttccagggtttggctcttcatatcnnnnnnnnnnnnnnnnnnnnnnntatgctaggtgctgttataaaatcacaccattccaaaagaccccaagtagtatagagaccaaaatgaggcaaaaataaaagagatgaaacaggagagtttatttcttgcatactttccgaccttcatcatacaacctctcctaacctccccgtagtctttaaaatgtttaacttgcctatgagctaacatgtaataaagcacgtactcaattatatgaatagaagtggagagccagaatgctacaaaagaaatcacggctgctagaagtatcctccatagaaacatcaacatgattgtggatcaaaatgattttcactggatatagaatttgtatgggccatatttattaaaagagttctgtttggtcacatagagttcttttgggatttcatcccacttttcaggacttaatttgtttgggtttgcttacctaaccagcaacaacaacaaaataagcagttccaaaatctagtttattacataaatctctatgaatccttgagggcctatatctatattataaataaatacaaatatagatttttaaatatctatgggactttgccatttacagccttaattataaaattatgagattatattctctccattaccctttatttctgttaactttttaaagactggaacattctgtggatgttgtcaaagtttgagt

SEQ ID NO: 948 - DNA, 743 bp, Macaca Fascicularis
  misc_feature (1)...(743): n = A,T,C or G
tgatttgtaaagtgatgttcctcttccttttttacacttttcagctcatatttaacctctgtttggaaaatgattcttgtaactgtacatttttttgcctcctaataacaatgacaacaacaaaaataaatgaccagttttgtgttgggggggtgtatggtgccggttacttcttctcagttggcatgggttgccacagggccaccagcacacccctgcacactgggcaccaacagagccacggagcgcgnnnnnnnnnnnnnnnnnnnnnnnnnnnnnnnnngcacaaaacggcctcccacacgtgcgtccaggctcttgcgccacctcctnnnnnnnnnnnnnnnnnnnnnnnnnnnnnnnnnnnnnnnnnnnncagctgccacgtggggctgcaaagctctgttgagggaactgcccaggactgggtagaggtggcaagggacagggctgggtgctgttttgtgtgcgaactgagctgcgctctccttaggcccagttcaggcctcagcccctctttcccaggccctggatctcaccggcagccaaggttgagccagaaccagcaccctgtccttctggcccccagttcctaccccagaaccagttaactgtgctccaggggtagggctgggcccacagagcctggggnnnnnnnnncgcctttgctgcctctnnnnnnnnnnnnnnnnnnnnnnnttcctggtnnnangcctgccctcgctcctctgctgtgatctagt

SEQ ID NO: 949 - DNA, 745 bp, Macaca Fascicularis
  misc_feature (1)...(745): n = A,T,C or G
ttttaaggtatggcagtttccttcatccccttttnnnnnnnngtacatgtacatgtatgaaatttccttctcttacccaactctctccatacatcacaagatcaaagaaccacacgcttagaagggtaagagggcaccctatgaaatgaaatggtgatttcttgagtctcttnnnnnnnnnnnnnnnnnnnnnnnnnnaggacttagagagttgcgagtgaagactgcagagggctaggaaagtattgtatacaggttttgaggccacccatgtcacttatcccgtataccctctaccatccccttgtctattctgatgcccccaagatgcaactgggcagctagttggccccgtaattctgggcctttgttgtttgttttattatttggacttcccaggaannnnnnnnnnnnnnnnnnnnnntggggccctcctgggatcaagcccctcccaggccctgtctccagcccctcctgccccagcccacccgcttgccttggtgctcagccctcccactgggagcaggttggggcgagctggaggcccgggctggaggggcagtgttgctgttcatagattttgttccattggcgttgctctgttggatttaatttcagtcttcctgattcttcccttctgtaaagtgtacattaccaagttccttgtttttttatatatatatataaatatatatatatacaaactgtactctttttgcctttgtacattcaggcaagaagagaa

SEQ ID NO: 950 - DNA, 653 bp, Macaca Fascicularis
ggcgtgagggaggccagagctacctgtgcacaggtacctacatgctctctgttcttgtcaacagagtcttaccagcaaggggtcctgtctgccaccatcctctatgagatcttgctagggaaggccaccttgtatgccgtgctggtcagtgccctcgtgctgatggccatggtaaggaggagggtgggatcggccagatgatgggggcaggggatggaacatcacacatgggcataaaggaatctcagagccacggcacagcctaatatatcctatcatctcaatgaaaccataatgaaaccagactggggagaaaatgcagggaatatcacagaatgcatcactggaggatggagacagccagcgaaccctactcaaatcaggcctcagagcccacctcccctgccctatccctgctgcgccatagcccctgagaccctgaaaatgtcctctcttccgcaggtcaagagaaaggattcctgaggctagctccaaaaccatcccgggtcattcttcatcctcacccaggattctcctgtacctgctcccaatctgtgttcctaaaagtgattctctctctgcttctcatctccttatgtgaatacttccctctttttctatttccctgaagattgagctcccgacccccaagt

SEQ ID NO: 951 - DNA, 641 bp, Macaca Fascicularis
  misc_feature (1)...(641): n = A,T,C or G
agaaggccaggcatgatggcttacannnnnnnnnnnnnnnnnnnnnnnnnnnnnnnnnnnnnnnnnnnnnnnnnnnnnnnnnnnnnnnnnnnnnnnnnnnnnnnnnnnnnnnnnnnnnnnnnnnnnnnnnnnnnnnnnnnnnnnnnnnnnnnnnnnnnnnnnnnnnnnnnnnnnnnnnnnnnnnnnnnnnnnnnnnnnnnnnnnnnnnnnnnnnnnnnnnnnnnnnnnnnnnnnnnnnnnnnnnnnnnnnnnnnnnnnnnnnnnnnnnnnnnnnnnnnnnnnnnnnaaaaaagaaacagcaacaaaaaaacgagaggggagggagagtgatggagggaaggctgctactgctataagctgggggtaattggtggtggttggcgctggggtggcagcggcgacggtgggattacagggaaatgtgtggcttgctgacagggtcatgtgcactgacccagtgcgggcagaggcaggtgctgtcctggccatcccgcttgaggatatgtgacctcaggccaatcacacgatctctttgagctctgcttccctcatctgtaaaacacggatcctcatggtactttccttgtagctctgccctgaggatgctgtgcatttagcaatggctgttccacgagtgaggg

SEQ ID NO: 952 - DNA, 372 bp, Macaca Fascicularis
atatcttttactacaaaagtcccacaaaagtatgagaatgaaaacgtataaacagtgaccaaacaggcaatcttaaatgggaatatcgttaaggagagcactgaagctcatggcactatccagtaagtaaagaaactttgactaagaaataataataaatatatgtaaagaaattaactttgagtaatctcagtaattactcttctttgtttaaatgtttccaaacatagttttagtataccgggatttttttttttttttttctgggaagaatactcactccgtagtttgacatggatttgtacaggaatacacccggaacatgagaattcctaacgacaaattccatacaattcctttgccattctattc

SEQ ID NO: 953 - DNA, 756 bp, Macaca Fascicularis
  misc_feature (1)...(756): n = A,T,C or G
gtccatgggaagggatgggcccgcaggtgcctgtttggttgatgaagaggggaactctttcactacgaatgccagattgaaattcatcacagcaaatgcctaagttctgagaacaatataatgtatttacagtgagcttattagtatcagatgcaccnnnnnnnnnnnnnttgttctctcaccagtttgatttctaacctcctgaagagcaaaacctgccaccgaccgaggagcaacaggtagaagagaaattctaaaatgtcctgaagagcgagaggctctgtggaaaagactagggcttgtgcaggcgggggagctcaccgccctggggcagcaggcgccgccttgagccagggcccacaggaggcttctgggcacagacacaccctgcagacaggtnnnnnnnnnnnnnnnngacatttctaggatctggactgtccatggggagtgnnnnnnnnnnnnnnnnnnnnnnnnnnnnnnggggcannnnnnnnnnnnnnnnnnnnnnnnnnnnnnnnnnnnnnnnnnnnnnnnnnnnnnnnnnnnnnnnnnnnnnnnnnnnnnnnnnnnnnnnnnnnnnnnnnnnnnnnnnnnnnnnnnnnnnnnnnnnnnnnnnnnnnnnnnnnnnnnnnnnnnnnnnnnnnnnnnnnnnnacttgggaggccgaggcaggagaatcacttgaacttgggaggctgaggcaggagaatcccttgaacccaggaggcagaggaggttgcagtgagccactgctct

SEQ ID NO: 954 - DNA, 693 bp, Macaca Fascicularis
  misc_feature (1)...(693): n = A,T,C or G
aataaacttttattttggtctaatttgagatttacagaaaaatggcagagagagtacagagagcttctatgtgcccctcacctagtttcccccattnnnnnnnnnnnnnnnnnnnnnnnnnnnnnnnnnnnnnnnnnnnnnnnnacgttggtaggtaccattaagnnaaatccagcctttatttnnnnnnnnncagtttttccctaatgtctgctttnnnnnnnnnnnnnnnnnnnnngcacacactannnnnnnnnnnnnnntctcctttgcggtctctcgcctgtgacagttcctcagacttcccttgtttctcatgaccctgacagttcnnnnnnnnnnnnnnnnnnnnnnnnnnnnnnnnnncctccattggagttggtctgatgtttctcaagcacctttctcatcacannnnnnngggtggttgtaaccaccacatcacctatcccaggcagtgctcaccttggccacctggnnnnnnnnnnnnnnnnnaggtttctccactgtcaagttcctgtttttccctttccatactctgtgggttgaggaggtnnnnnnnnnnnnnnnnngagagagcannnnnnnnnnnnnnnnnncttcttgaagatttgtttcttctctcctgtttattcagtcatttatcagtatggactggtgtacctacaggcatgtcttggggacattgcagtt

SEQ ID NO: 955 - DNA, 518 bp, Macaca Fascicularis
  misc_feature (1)...(518): n = A,T,C or G
taaagggcactagtgttactgaatcccagagnannttaaaatcttagtagtttgaattgatgtggcttcatggtatgatagcgattatttgttaattttatgtgaaaatttagtctgaagattcattagttatgttattgaagagcagtaatagcctgaatataaaatgttagatattttatattttaaatgtatatctgttttatagataggaaagccagcagtttaggataacttatagttccgacgactaagatgaaatcactcttccatcctgtaaatatttacggannnnnnnnnnnnnnnnnnnnnnnnngaatacagttacagagaaaagaagcatttttcttgtcctaattgagtttatagtctagaagttggtcattcagannnnnnnnnnnnnnnnnnnnnnnnnnnntaccatgttaagtaaacaggagatacaaagataactaaagcattaatttataatctgtgggagagttgtaatgtggtaaaattataagagaaattaggcc

SEQ ID NO: 956 - DNA, 740 bp, Macaca Fascicularis
  misc_feature (1)...(740): n = A,T,C or G
gagaaaggttatggactggaggtggacatgtgggctgccggtgtgatcctctatatcctgctgtgtggcnnnncgccatnnnnnnnnnnnnnnnnnnnnnnnnnnnnnnnnnttaacatcatccagctgggccactnnnnnnnnnnnnnnnnnnnnnnnnncaatatctctgatgctgccaaagatctggtgnnnnnnnnnnnnnnnnnnnnnnnnnnnnnnnnnnnnnnnnnnnnnnnnnnnnnnnnnnnnnnnnnnnnnnnnncggctggcaagaccaatacnnnnnnnnnnnnnnnnnnnnnnnnnnnnnnnnnnnnnnnnnnnnnnnnnagccagcacaagagggttgcnnnnnnnnnnnnnnnnnnnccgcctcgggaatctgttcagcccccagttctgctcaaggacagaaaaaaggatggaagtttgagagaaaaacaatgaaagaggcttcttcacataattggcgaatcagagggagagacactcagtgcattttaaagcatatttaaaaaattaagtaaatgttaaatgtcaacatatttttagatttgtatatttaaagcctttaatacatttnnnnnnnnnnnnnnnnnnnnnnnnngaggaattttggtaataatgatgtgttttgcttcctctttgtaaccaagtttattctgtactacaggagtggtgcttaccagggtctaaactccccctgtgagattaataaggtgcattgtggtctttct

SEQ ID NO: 957 - DNA, 683 bp, Macaca Fascicularis
  misc_feature (1)...(683): n = A,T,C or G
agtgcggccctgcaaccaacccgaagccactggaatatcactttccccacctctgtgccttgatttttctatttaaaatgaagttacactaactattgaaattcaaagtaataacaagtatttctgactacctctcaggtgccaggccctgtgactaggcaaagatgacatggtccctgctgtgacagatcacagagcgctggagaggcagcctcttaacaggcagcacagtgaagtgagtgttcagaaaggggaagagcaggctgctgtggggctgtgtggtgatggggcttagcctagttcgggggcgagggaagcctccttcctctcccgaaagtgacatgtaagttgaaaccttcaagctgtttagaggttagtctaaaggaagagggtgaggaagcactctaagcagaggaaatgaaatgctcaaaggtcccaagatggaaaaaaggaactgagtgaggcccnnnnnnnnnnnnnnnnnnnnnnnnnnnnnnnnnnnnnnnnnnnnnnnnnnnnnnnnnnnnnnnnnnnnnnnnnnnnnnnnnnnnnnnnnnnnnnnnnnnnnnnnnnnnnnnnnnnnnnnnnnnnnnnnnnnnnnnnnnnnnnnnnnnnnnnnnnnataagcagctactcaggaggctgaggcaggagaatcgcttgaaaagggaggcagaggttgc

SEQ ID NO: 958 - DNA, 233 bp, Macaca Fascicularis
tcttcccatccatttcaccacccatccccttccaggccgcgctagagtactggaccaggcattgggatgcctgggttcaaatctgcatctgccatgcacttgctttctgaccttaggccagcccctttccctccctgagtctctattttcttatctacaatgagagagttggacaaaaaaatcttggcttcctttctaacattaacaccctaaagtatgcctccaattcattc

SEQ ID NO: 959 - DNA, 731 bp, Macaca Fascicularis
  misc_feature (1)...(731): n = A,T,C or G
ggannnnnnnnnnnnnnnnnnnnnnnnnnnnnnnnnnnnnnnnnnnnnnnnnnnnnnnnnnnnnnnnnnnnnnnnnagagtgaggctctgtctcaaaagaaaaaaaaaagaaaaagaaaatgttgctaagaagtattttcttagcttcttaattaacacttcaacaggttctctgacaaatcaatcacaaaaacttgacctcccttcagttatccaggatgaacaaataagacatagacaaagtgaacaaaatagacagagttgctggcctggtatgacttgtgttttatctttactttgtttccagtatgcgtttatctctgtctatccaaccaaccgttcttccttcaagttctttattaaagccattaagagtaatagcaaagactttggcaccaacttaataccatcctcctatccatccacacattcaaccatcctccacccaccctcctacctactaatccgtcctttcaggtgatgagccagctctcgtctccaacttttatttttaagagacagggtcttgatctgtgacccaggctggagtgcaacggtgcaatcacacagctcactgcagcctcaaactcctgggctccagcgatcctcccaccttagcgttctgagcagctgggactacaggcaagcaccaccacgcccggccaatttttttaaaaaataataatttttgtagagttgggggccttgctatgttgcccaggctggtcttg

SEQ ID NO: 960 - DNA, 674 bp, Macaca Fascicularis
ccaaccatggcctgtcaccatgagtgtgatcagctttctccaaaaccacgtgggttgcagtagctaaggggtggtacccaaatgttaggaacagtgttaggaaagggcaaggaaaaagaggtgactgggtgtctgatgagaaaccagtaaatgactaaaaaaaaaacagtaaatgactaaaaacatgactaaaaaactatatgtaatatataattatgtgtgtatatctacataatatctgcaaattctaatttatatatgtgtgtgtatatgcacacacacacacacacacagtccagacatctccctcataactatcagttcctatgaaaaccttaagtggaagccaatttcccatagtaaataatttaggagaaaattataatgcttaaagtgttgctcaaaacccctaacttattactaaactataattggaacagtaaaatgcatatatgtaattatcctatcatgatttaaaaattgcttaaaccattgctgcgtaatactaatcaaacttacggctgctaacaaaagttgtgaattattacacgacccctttgtaacgtgctgcatgttttttgaaacatctctatgtgtttctatttgttccactgctggtatttggaatgtaatttaacagttcccacacatggtttggttataaattctgtatg

SEQ ID NO: 961 - DNA, 1325 bp, Macaca Fascicularis
attactagaaatgtagctgtggtttccagctggcccatgtcagtacgtctagcttttcttcctcgccacggaagcaccatgggagaacgaagcccgatgctgagcatgctttggccaggtgggtgccgctgattcgcagacctcagcgactgtgttccgcctccacagaggccaggggtgtttgtttccccagtgtggtcatatatttcagccagttttgtgcactttgccctcttaatttgcttcactttcaggctcagtgaacctgacctgcaagtcgccctccagtttccctcagcaagtactcactgggcagccccaacatatgagatgtgtgcacagaggtgaactaaattactaaaaactattacttttctaaaatgcttcctggcttccagaactcaccatctgggagaaaggtcagatgcacacggagacaactcaacaacacatatgatcatcagtgatttaaagaaggtactggaaatcatggaataagaacaagaagagattactttctagggctctcagaaagtttctaaaaagaggtgccattgaccctggccttagtattgtgatggagacattacagagctggtaggaaggagaaggagaccttacagagctggtaggaaggagaagaaggagaaggaacaactggagcacacttggggtgaaaggagcggcacttttctgtgggagctgcagactcggttttggaggaagagttaggagccaggatcttgtcaggaataattctgtgtccaagtgcagaatcgtggttttctccatgactgccagtaactccatttctcaatcatgatggtaatgctttttttttttggctccaaatcccagagattggcagtactgaagacacattacaataattaacttttcaactttgagatgattaatttttacaaagtaccaagaacagctgtttggcatgtagcagtgcggcatgagtgtctcgtaaatgaattaaacaaaatatctctccaacacacacacggtaattcttgctgcatgtcagcctccacttctccctccattatctggtgccgtgaagctgaggcagccggcttgagcgaaagctttcagatctcactccaacaaagagctttgattgattcacttagcataaagtgttttatctggctagagaaatccaatcaagttttattaattactaagaaaaatatctatgcaatggattaatctttgatcaaaactatgtgtgaattggaaacatattacacatatggagagcagttttatggaataaaaatgatctatgcgtggcataaaaaaaaaaaaaaaaa

SEQ ID NO: 962 - DNA, 1515 bp, Macaca Fascicularis
  misc_feature (1)...(1515): n = A,T,C or G
aaacttaaaaagcaatttctaatccaaaaatagaaaagaggaaaaaggaaacaaagaatacaagcaacaaatggaaaagagatgatggatttaaacccaactgtagctatattcatattacatgtaaatgatttaaacaacccagttataagacagctgcacttcttggctcttcagacactcccctcttattctgagtttgcatcttaaaattcctcttgccctaaacagtgagtcagccttagttcatgtgttaatgccttctgagatttgtgagggagacttcatttacgggtataaagcctttccataatgccccagtgcccactgggtaggaattttaatcttcacaataccttgtgtttaccccataagaaagaggatgaaaacgaagaaagataaaggaaagtacacattctggtctctggccttggttcaggggacaagaaaggttaagcagtggttcttaatggggtaatcttgtcctcaaaggacatttggcaatgtctggagacatttttgattgtcatggagggggtaatgtgaggaagggtgctactggcatttggtggctagaggccagggatgctgctaaacatcctgtagtgcacaggactgcccaccacagtgaagaattatctggcccaaagtgtcactagtgcagaggttaagaaaccctgggttacagataggataagagtgggaatgggaagttcagaaaccatttcaggggcatgccttcttttgttttagataataggtttggagacgatcggaggaagtttccttctcaatctgagtatactcaaatacttcccagaaaatattgcattgtatatacttctagcatgtatcacattgtattatagcttaccagcttttatgtatctctcatactgtaaatatgataaacttgaggacagatattatctggatattcatctttgtaccccaagatcttagaacttaaaacaatgttaacctgtggtgcctttcaaatctatgatcatgtgaaccggatgaataaataaactgtcttaatattgtatctgtaactcacacttattaaacccagaataaatttctggggatcctagtggatctatctgtggtgcctcacacctgtcttcagtgtggaaaggcttagtatataactgcttaggctgggcatgnnnnnnnnnnnnnnnnnnnnnnnnnnnnnnnnnnnnnnnnnnnnnnnnnnnnnnnnnnnnnnnnnnnnnnnnnnnnnnnnnnnnnnnnnnnnnnnnnnnnnnnnnnnnnnnnnnnnnnnnnnnnnnnntcatggtggcatgcacctgtaatcccagctannnnnnnnnnnnnnnnnnnnnnnnnnnnnnnnnnnnnnnnnnnnnnnnnnnnnnnnnnnnnnnnnnnnnnnnnnnnnnnnnnnnnnnnnnnnnnnnnnnnnnnnnnnnnnnntatctcaaaaaaaaaaaaaaaaaaaaaaaaaaaaaaaaaaaaaaaaaaaaaaaaaaaaaaaaaaaaaaaaaa

SEQ ID NO: 963 - DNA, 151 bp, Macaca Fascicularis
ggcacatagagccctctaaaacagtgcgctgggggagaaaaaacagacacgtcatacgcccctcaaaaatcttcttttgagatgcgctttgcacacctctcacaagaagaaaaagtgtcctctcatatgggagagcccctttttttttctt

SEQ ID NO: 964 - DNA, 742 bp, Macaca Fascicularis
  misc_feature (1)...(742): n = A,T,C or G
cgtaaagnnnnnaaggagtaccctggaaaggaagtaaaaaaaggtctagataacctctacaagaaggttgataaacatttatgtgaagaagagaacttacttcaggttnnnnnnnnnnnnnnnnnnnnnnnnnnnnnnnnnnnnnnnnnnnnnnnnnnnnnnnnnnnnnnnnnnnnnnnnnnnnnnnnnnnnnntacaatggannnnnnnnnnnnnnnnnnnnnnnnnnnnnnnnnnnnnnnnnnnnagtcccactaaaccttgggaaagaagaaaagataaatgaatgaagcatttgagtataccagacactataccaaaataccaannnnnnnnnnngagaacccagacttaaaattttatgtattattaaatgttagataaatgggtannnnnnnnnnnnnnnnnnnnaaatgtaaaattaccaacctatatagcagttttatttgccctannnnnnnnnnnnnnnnnnnagcatttatgtcatcctaaaatgcctttagcatttctcaatgactggatgggaaattttcctttattgcctagctgcttgtgtttcagtnnnnnnnnnnnnnnnnnnnnnnnnnnnnnnnnnnnnnnnnnnnnnnntctctgttgnnnnnnnnnnnngtaactactaaaatactgtacaaaattgtttttttcacactaacaaatgtgtatatggagaagagggctcatgtgatcatttgtaaagttagatttttgaggattatgtgac

SEQ ID NO: 965 - DNA, 676 bp, Macaca Fascicularis
  misc_feature (1)...(676): n = A,T,C or G
tcaggatgnncagaatcccnntnnnnnnnnnnnnnagggagcctgtnncatggagnnnnnnnnnnnnnnnnnnnnnnaggtgagcgccnnnnnnnnnnnnnnnnnnnatcaagtagaggctcggatacacattgtcctggcaaacctcaacgagattgccaagcataaagcctctcaccaacaagcagatacacgagcnnnnnnnnnnagtttggtcagctcctgacacatttggataccacccagcagatgattgctaattccatgaaggacaataccaccctcnnnnnnnnnnnnnnnncaacnnnnnnnnnnnnnnnnnncacggttgaggnnnnnnnnnnnnnnnnnnnnnnnnnnnnnnnnnnnnnnnnnnnnnnnnnnnnnnnnnnnnnnnnnnnnnnggggtaatccctacccctgggaacnnnnaacagcttacatagggtttcccctttactgtaactctagcatccccatcccatttgacactggggnnnnnnnnnnnnnnngcatgtggggtttacacccctcccctgatgaatagagtggtagctaggggttattagaaggtggtctcccctcaggcctgggggataaggnnnnnnnnnnnnnnnnnnnnnnnnnnnnnnnnnnnnntgctttgcctggtgtggggaaggattgggtcttgtcc

SEQ ID NO: 966 - DNA, 2359 bp, Macaca Fascicularis
aagaagcttttgggtatcttggagaagtggcgtgtactggctctgcggcccgtggctgtgatttcggtagaaagttcgggagtatctgccgtgggattccctgggctgggctgcaggggccacctccctcccgacctcctcccaccagggagggcagagccgtgtggcctcaacagtccaagtcaggacggtcccagtgaagacaatcctcaccgtgacctgctagtgaaggcggcggtggccatgggacagggcagccactgagaggtgccgggtcgtgggaatgtcggtgggttttctccctggccccctctgggcactggctgaggcacctctgaaggtccttcctgctcccactgaagctcccggctccgctcagaagcactcagaggccttcagggaggaggcagtctgagttcaccctcctgttccatttcagcagagttctgctaacagatcagaagacatgcacagagagggggcactcaaacccccgggaggcagcgtcctgcacctgccagccccgcgtccctcgctcctgccacctgtgtgggctcctgacagccactgccactgctgctgaccctggctggacgacgggtctcttctgccctcccctgcatgggtgtctggatctgaggctgccccacgtccctcatttctgctgctctggctgaagtccaccttctgcaggacaacaaggtgctggtgggactgggggcaggtaaaaactccctcttcccacttgggctgctgggagcggggacgggggatggccaggcccagcctcaggagacaaaccaattccctgtgagtcactgcaatccggggatagtttaaacagcaccaatgtatccaacacagattttaaatgtcaaaacatttaaaataccaacctcaccgacacgggcggcaaaaatagctacctctgggggccggtggtagctgccccggggccggtggtctggtcccgaccccctggctgcccctgtggaaggatcctgcagtttccagagggagggagcagaggctgccacagggccgtgtgtggggacagaggcagggcagccccgccttgcagagggagtgtggccctcccccgcctcccccacctgcccaccctggagactgaagctcagtaggattggggggtgaggagaatgcaccctgactcccggggccagccttctcttcccagacgcacagctggaagcagggctttggctcatggtgtcctttcctgtaatctctcccgctctgggtaaggagctgcccccacctccacgacaagcaaagggagcacgtccgtgagcagcgcggggctcggaggaaaggctgcgatgctgccggggtgagggaaggactgagcaggcgcaaggacaggccccttcctggacagacagaaggacccgttgagatcacctctgtacatccagtccccataaaacactagagctatgtgcatagacacacggactctacaattcaagtgggaaatagtctcagaatggccaggaaggctcttgaaaggcagcgtggcaggtcgctgagacaagggagcctcagccttgccagccactgggatgtacctgagtgtcactgagagtgaccttaatgaggggaattcggcattgactgtgccagatcagacagaagctccgtctgtgatggagacagcatccagatcatcggggagaagactggccacccaggcatggtgctggacagctgatggcctggaccacagcctccttcccctggggagccatgcaccctccatccagctggcatgtggcccagacctggccaatcaacacatcccaacaggcctgggtggaccctcattggacaggtcagccaaagatttgcaccaatcacatttgtctgattagggccggccccaggcctttgttagacaccagcttcgcctgggctcactgagcgggaaatgcatccgtggccatcggtgccgttttcctaccttttagggaagacctgcctaagaatggagccagcaccggtggaacagagcactccaggacgtcgtttgtgctcttggatcaagcggtgcctgttggactttcagtgtgtcttgagcgaaataaatattcctttttttaagggataagacaatttgacttagttcctggagcttgtaccgtaactcatagaggtcttacaccaaaaaaattccagatggtgagaagattgaaaagattaaaacctaaaaccaaaaaccttcatggaagttttacatttaaatgtatgtatttttaaccttttcccacagctttattgagggataattgacaaataaaaattgtatctattggccaggtaaaaaaaaaaaaaaaaaaaa

SEQ ID NO: 967 - DNA, 697 bp, Macaca Fascicularis
  misc_feature (1)...(697): n = A,T,C or G
tcacctataggcagccatatgtgacatccatctcctaccgtccctcctgttaccgcccatgctactccatcctgcgccgcccagcctgtgtcacttcctactcttaccgcccagtctgcttccgcccgtcttgcactgagtccgacnnnnnnnnnnnggattgcaaaaaatccacttccagccaagtggattgtgttgactcaacccccnnnnnnnnnnnnnnnnnnnnnnngggtccctgccagcccactgaggccaaacccatcagcccaaccaaccgtgaggctnnnnnnnnnnnnnnnnnnnnnnnnnnnnnnnnnnnnnnnnnnnnnnnnnncagctccccaattcttgcaaagcaagccaccagctagagacaaaactacactgtcctccccaaagctcattatgannnnnnnnnnnnnnnnttcttnnnnnnnnnnnnnnnnnnntctgcttacacctcaaagaactcatcagaannnnnnnnnnnnnnnnnnnnnaaatgaagcccttctggacagtgagagggagacattccaggttcttgtcttctgctgcaattaagctnnnnnnnnnnnnnnnnnnacatcatctcaggtctctttcctgcacgtagtcttttctgtcaccacgtatgtgctctcttgnnnnnnnnnnnnnnnttccttagggacttctccaatcaagtaaaaca

SEQ ID NO: 968 - DNA, 733 bp, Macaca Fascicularis
  misc_feature (1)...(733): n = A,T,C or G
taacataattgttgacaggtcattatattatnttntagtttctctcagtgaataattatagttttataggaaatgtaagaattcattctgaaacataattcttggtatggacaaaattgcagataccatttctgttgaggctgcagatttccttatttcagtggttcagattagtattaggtcggtactaggaagttttcattaatttaagtacttgagactcttgaagaaaattcagaatgaagttctggagaaaggtatgttactgtagtaattactctttgagcaggttttgttttttgtcattagttctgccctttttaattaaatatttgagttcatagaccgaaaggttttacttggcaaatttgtgtgacagactccgaacaattcctttactatgaagtataatttataaaataaaatatacccattttaagggtgcagtttgagttttgaccagtgaaactacaatcccaatcaaggtatagatttcgtcaccatctgtatccctccatatccctttgcagtcagttcatccctaccctggcccagatggtcactgatcttgtcatgccagttcaaaaatttagtggaatcagatattgtaagcattcttgtgtaatacttcattctctctcattnnnnnnnnnnnnnnnnnnnnnnnnnnnnnnnnnnnnnnnnnnnnnntcagtatttttgtatatacttttaaagcctattcacttgttga

SEQ ID NO: 969 - DNA, 1846 bp, Macaca Fascicularis
aacagtgttcttagaggtagccacacctcagcaaggtctttctaacttggaacagcaaagttcaaatgaacgaatagacacaaactgtgaaagagtcctgaacccattacaaggtggttctttacagcacaattgccctctgaggctacttgaaacaaggcatgggacttaaaggagaaaaagaaggaaatggaccatctcttctaacacctggaatgtgatccaagcctggagacaaattgagggtttgcggctagaagacagtaaatctagcaatggagcccacatatgaggaatacctagcaaatcatggaacaatagtaaagccttattactggctaagcttctctctagattgctctaattgtccttaccatattcgaacaggtgaagaagcgagagtttccctcacagaattttgtcagatttttggattcccttatgggacaacatatcctcaaacaaaacacctcacattttatgaattaaaaacttcttctggtagcctggtgcaaaagggccatgctagcagttgcactgggaattacatccatccagaatcaatgctctttgaaatgaatggttaccttgactcagccatatacaataatgacagcatcaggcatatcattctgtattgcaacaactccccttgtaatgaagctaaccactgctgcatcagcaaagtgtacaatttcctgattacatatccaggcatcactcttagtatttatttttctcagctctatcacaccgagatggactttcctgcctccgcatggaaccgcgaagctctccggagcctggccagcttatggccgcgggttgttttgagtccaataagcggcgggatttggcattctgtcctccacagctttgttagtggtgtctcaggatcacatgtttttcagcccattttaacagggagagcactgactgacaggtacaatgcatatgaaatcaatgccataacaggtgtaaaacctttcttcactgatgttcttctccacacaaaaaggaatccgaacacaaaagctcagatggctttagagagctaccccttaaacaatgcctttcccggacagtcttttcaaatgaccagtggaatacctccagacctcagggctcctgttgtttttgtgctattgcctctcagggacttaccaccaatgcatatgggccaagacccaaataaacccaggaatatcataaggcacttaaatatgcctcaaatgtcattccaggaaaccaaggaccttgaaaggcttcccactagaaggtcagtggagacagtggaaatcacagaacggtttgcaagtagcaaacaggcagaggaaaagacgaagaagaagaaagggaagaaataaaatctaccttcccacagcatgaaaccaattcccagcggacttattagatagacaacaaaaatctggaaactttctctcttagggctgagccaagaaggagataaactgatgcactaaaagcaaaccttgaattatttaccatatgaactgttataaagtcacactcttttaaacataatccaaaatgtttccataagcaacttgatctctctcctttgaaagtggcagtatcaaaatggaaccattagcagcttgctaatattttggtgcagaaaaggaatctcattattctattctactcacatcaccttttcacaacaaaagcccatggacaaaatagctacctaaattgatttcagtaaaaaaatttactgtaaaactgaaaaacagcctgaagctactgacattaaatgctgtttgcaagagcaaaaaaaaaaaaaaaaaaaaaaaaaaaaaaaaaaaaaaaaaaaaaaaaaaaa

SEQ ID NO: 970 - DNA, 768 bp, Macaca Fascicularis
tcacatatcactatctcttcatttatctctcatgattttatattctcaagaatgcctaatcagttgctctccattctgcatcctcccagcctcagctttcttcctcaatctctctgcccagcacttcctgcacacctctcagtcactacccgcctttatgtgggaggaagggaaaaaaaggaaattagctccagactcaggctgctagatatgattcagtctaaagtttgttggaagtatggagcccctcggtattagtgaggaacaggtggtacaaggcaaagtagcagaggagggatgtataaataacgctggtggtaagagtagtcttcacctctattattcatcaactgaatgacacctctgagtcattcatcaactaggagagaggtggtgggtggtacccagttccactaaccgctgccaccacgagaatcagaacttttatgagttccccaaatatcagagagacaccttgatttgtcatctgtccatccagtgtcattccaaatgactgacaattttagaaaacacttggaaaaaacatatatgaaaagcttattttaatcaccatagcctcagaatctatactcctcattgcatgtatgattttggacaatttacttaaccattcccggtctcagtttcctatatgtaaaaggaaataatatagcatctcttaggaatgttgactaatagctcctaagaagaatgttaaaaggttgagattaatcaataaatgtaaagtaatgggaacagtgcctgaca

SEQ ID NO: 971 - DNA, 759 bp, Macaca Fascicularis
  misc_feature (1)...(759): n = A,T,C or G
agcacttttgcttgagcccaggagtttcagaccagcataagcaacaggcaaaaaccccatctctactaaaaatacaaaaattagctgggcgtggttaatnnnnnnnnnnnnnnnnnnnnnnnnnnnnnnnnnnnnnnnnnnnnnnnnnnnnnnnnnnnnnnnnnnnnnnnnnnnnnnnnnnnnnnnnnnnnnnnnnnnnnnnnnnnnnnnnnttatcaaaaagaaagagagagagagagccctttctggtgtaacccttacagaaaagtaacctgaagtccttgttcccaccttacaaaatccaccgttctgctatttcccagtgggatttgagtccaaataagaacatttatgataggaacagagtgacataaacagcctaaagagacgatttgttagattaagtttgacctaaagctacctccttacatatttaaatttggtctaaaagtttcttcgtacatagtgaactgtaatctaactggatgtgtaaacagactataacctactcttgtaacaaacagctgaatcttagccaattatagcagccgagtttcagtcaatcacaggcagtcaactgttcacaccatgttcaaataaggcaaacaccgagctgtaactaacctggctatttctgtacctcacttctgttttctgttcactttcctttttctgtttagaaatcctctctgaccacgtggcagtgccagagtcgctctgtacctatcgtggttctgggggctgtctgactcctaaatc

SEQ ID NO: 972 - DNA, 774 bp, Macaca Fascicularis
  misc_feature (1)...(774): n = A,T,C or G
atcagagactgnnnnncnntnnggctttatgcagttgtggaaactgtgaaaaagcttttacaccaagaaagaaatcaactttacttacctgcaggagtctacttggctgattaagatataagaccttcagcctactccatccaatgcatccatctgtcttcagaagagtttagaattctgttctggtgctgtgcaaagagtaagaccaagtgctaacatccagatnnnnnnnnnnnnnnngagaaagttcttcatggatctcttgtgctcctacacatctcacagatggagtatctggggctcagggagatgactgacttgtccaaggtgtcaacattaatcaatatggagcctctgtaaagaattttggaaagtatttatagacccccagatgtataaatgcattgattttcaaataacaagacacaatggagagaaggtcaaccacaacacaggtgctttactcatcttgctttcggcacttcatgcttgcattttaatgcattctatatacctacaagtggctgccgggctggtaaccattacttgttgcaaaactgagaaatctgaagcaagttaaggagcaaaagacatgtannnnnnnnnnnnnnnnaaattatatctggaagtcataaaagtgatgactcatagtaatgatatctcagtgtagaaaaaaattttagaaagctaaaaaagtataatgtttaagagcttgggctctctgtattagacaaaacctagaactgaatttnnnnnnnnnnnnnnnnaagatat

SEQ ID NO: 973 - DNA, 1671 bp, Macaca Fascicularis
tactggaacactcaaagcaatgctcaggctggaaacagaagcttccgagaggcagccgatgtgagcatgtgcgcacagattcgtctcccaatggcatggcagctctaggaaaattgttttgaacagacttgaatgcacaagattaaagttaaagcagaagtgagaacaaaaaagcaaagagcagactctttcaactgagaatgaatactttgaagcccaagattttaaagtgataatgatcagagtcgtacctaaaagagactaaaaactccatgtcacgctctggacttgtgacatttactcacagcaggcatggcaattttagcctcacaactttcagacagataaagacttggaggaaataactgagacgactccctgacccaggaggctaaatcaattcagggggacacgaattctcctgccagcatggtgaactccacccaccgtgggatgcacgcttctctgcacctctggaaccgcagcagccacagactgcacagcaatgccagtgagtcccttggaaaaggctactctgatggagggtgctacgagcaactttttgtctctcctgaggtgtttgtgacactgggtgtcatcagcttgttggagaatatcttagtgattgtggcaatagccaagaacaagaatctgcattcacccatgtactttttcatctgcagcctggctgtggctgatatgctggtgagcgtttcaaatggatcagaaaccattgtcatcaccctattaaacagtacagatacggacacacagagtttcacagtgaacattgataatgttattgactcagtgatctgtagctccttgcttgcatccatttgcagcctgctttcaattgcagtggacaggtactttactatcttctatgctcttcagtaccataacattatgacagttaagcgggttaggatcatcataagttgtatctgggcagcttgcacggtttcaggcattttgttcatcatttactcagatagtagtgctgtcatcatctgcctcatcaccatgttcttcaccatgttggctctcatggcttctctctatgtccacatgttcctgatggccaggcttcacattaagaggattgctgtcctccccggcactggtgccatccgccaaggcgccaatatgaagggagcgattactttgaccatcctgattggcgtctttgttgtctgctgggccccattcttcctccacttaatattctacatctcttgtcctcagaatccatattgtgtgtgcttcatgtctcactttaacttgtatctcatactgatcatgtgtaattctgtcatcgatcctctgatttatgcactccggagtcaagaactgaggaaaaccttcaaagagatcatctgttgctatcccctgggaggcctatgtgacttgtctagcaggtattaaatggggacagagcacacaatataggaacatgcataagaaactttttcactcttaccctacctgaatattgtgcttctgcaacagctttctcttctgtgtagggtactggttgagaatatccattgtgtaaatttcagcttatgatttttaatgagaaaaaatgcccagtctctgtattatttccaatgtcatgctacttttttggccataaaatatgaatctatgttataggttgtagacatt

SEQ ID NO: 974 - DNA, 2407 bp, Macaca Fascicularis
aattctttttaatttcttctctggcaattctttcccggattctttgctttgcataattatacctacaatgaaaccttggaagaaaagaatatgaataaattgttaatattaagtcctagagaaattaatttatgaaattctctataaatcacacagaacttaaatacttacagatgactaccctgagactgaaaaatatgaatgttctaatttatagtgctatttttgggcagtattggtgtcagaatactatcaacacattcttttttattaggaaagaaaaggatgtctacataacagtttgtaaatgataaaatccattagttttcagtcttctgatagcattgtttattataagaaactagtatttgctctcattaacaggataataatgctatgtctacatataattatttctatcaccttaaatagttcactgcagaaattcatgtataaatggaaccatatagtatgtacatatcgtactcttaggtccggcaaatatttgaggctcatccatattttcactgatcagtggttataaacacattcttaaagtagcattttcagatatgaataagcagggatgaaataagtattagggtaagggaaatggttgaggctttcctaagtgaagtgtaaaaaccacagctttctttttaatggaatatctaatacgcatttatgcgttcaagcattttaagacagatttccatgaaaatgtccttaaaagtcaagattcttcattgagggtgagtatctcacaatgggagattgctctgaaaacgtgctttttgaattagataacctatcatgaatacttagcaaacataccagcatcccaaagtcaccaagataaaccctcctactccaacatcacatgatcttttaattctacctgtcaaaaataagcgtaacagtcaattagaatataaatgcctgttataattgcctgttatatacattactccatctagaaaaaaaatctttcatcacatagagaaatgcattttttagtacatagagaaataaaataaacacagatactcactagtgaacaaaaaatgtccaaagccagccacaacagatcctaatgaaccatacaatattgaatcccgggcgcagggaatattttcaacatctaaaaatcctaggagcttaaagtcctagaatgaaaaaaaaaaacctagattgagtaagaaagtatttcattttggggtggtttggcaaaaatgacaacaccatttattttgttgtagttaagggtttaaactagaatatgtgccatgtgaaaacctaaatcagcttgtattgtctttgtccagctttggtgtgcagtctgaatctttaaatctgaaagccttaaaaattggaccagaacacccttaagcaatagggtaacttttatgcctatcactgaaattgaaagcagcatagtttgcttcaataactccaataatttgggaagcagaaacggaagaagtaatttgagtcatgtttgcttatgtagtgccatttaaaaacctttcatattttattaactaggttaacattaactgtggttgtaagagtaaatgtttcatgttaagataaacatggacaatatattaaactctagtctcttttcttgcctgtgaagtgaggctgcacttgattatatttgattctttgttcataatacatggtaacgatagctaggtgtggtgaaaaacccgcggatccaaggagcgggatttttctctcagatctgccgctaacttttgtattctataggctacttttatctccatggtctcaatctataacatgaacggattgggttagatgactgaagtttcttcaagtgctaaaatgacttctttttctacagtcttcattggatttatgtatttctttttcccaatatgtttaactgggatgtctgtcactctagggcggcaagacagacatttgaaagaacagtcacactgctgaactggcatttctgtcaacacaaaagtttagaaaagtcattgtaattgttttctaaaacttgattcagtatgtatcagattttcagtaaggctgcttttaaaaggaaccactctgtccatttaaaggtttcatagttatcttcaatgggttagtatttggggcaggacattaaaactagaagaggattctataggatgaggtgatacctagaaggtaatatattgtaaggcaaaagacgttagaagaaatggggaaaggacagtaaaaggcaagtcagattaaaggttgaaacatgaagatatatattctcaattgtatttctgcctatgtttgcttctttggctcaagcatctgttgaaagagacaaaatgtgatttggttcataataaagcaaaaattatttactcttgaaaaaaaaaaaaaaaaaaaaaaa

SEQ ID NO: 975 - DNA, 3092 bp, Macaca Fascicularis
atatactcactcctttgacagccacgcttctatttctttttaaatctcaaaggtgtgggcttacaagtcctgtcttagtaataaacttttgcagagaaaccctgagatggtgtaattgcatcctttcttggcaccttaaatcaaattaactaaatacttagtgaggagagaaaaggaaaacacatttttttgcaacgtatctgactgggtgagaagccactgctgcagcataaagaaccgacgggaatctgggctttcccactctggaagcgaaggggggaattatgggttggtggtcggcttcatgttaggaggacacccctccatctgttcacagctcagcctgtttccaatttaaagcccagatttcaatacaaacctcaatttcttttccccattttaaatgcaaagcaagacttgtgaatcatagtgtctctgttcctgggattcagaccaaattttcccccaaaattctcaggctgtttgtttgaatacctgcttacagtggcacacaatgggcagctttgagaagaaaaattgataatcttcatggaagagtaatttgaatgaaattacacttgacagctcgtctccaagcaaacaagaggaacgagggagcctgagctaagctctgaggacttgcccaagccactgctgttggagcttcccagggaaaaaaaaaaaaaaaaaaaaacaccagtttttccaacatctaattgagcttttgattaattccgtgtaccagattctactgaagaaaggtagccatggaagagaatatggaagagggacagacacaaaaagggtgttttgaatgctgtatcaaatgcctgggaggcattccctatgcttctctgattgccaccatcctgctctatgcgggtgtcgccctgttctgtggctgcggtcatgaagccctttctggaactgtcaacattctgcaaacctactttgagatggcaagaactgctggagacacactggatgttttttaccatgattgacatctttaagtatgtgatctacggcatcgcagctgcgttctttgtgtatggcattttgctgatggtggaaggcttcttcacgactggggccatcaaagatctctatggggatttcaaaatcaccacttgtggcagatgtgtgagcgcttggttcattatgctgacataccttttcatgttggcctggctgggagtcacggctttcacctcactgccagtttacatgtacttcaatctgtggaccatctgccggaacaccacattagtggagggagcaaatctctgcttggaccttcgtcagtttggaattgtgacaattggagaggaaaagaaaatttgtactgtatctgagaatttcttgaggatgtgcgaatctactgagctgaacatgaccttccacttgtttattgtggcgcttgctggagctggggcagcagtcattgctatggttcactaccttatggttctgtctgccaactgggcctatgtgaaagacgcctgccggatgcagaagtatgaagacatcaagtcgaaggaagagcaagagcttcatgacatccattctactcgctccaaagagcggctcaatgcatacacataaatgcatcttcctgttctttctaccatttgaatgcattggtgtttaactaagggccatccaaccatccaacctttaaaaaacaaagtgaaagtgcttctcatcaatgatatgtaaggtgacttatgaatcacctgagtacaattctttgttggttagcacttaatttcccaatttattaaattgatgtaagtcagatcttttctacaagctcctatccagcctttttttttttttgaaatttctcaaactcatttactagttctgtaaaatcaaagacactaacattgtcaaatgcaaagatttgtttgatttttaaccacttcccatgtgttatacataacaccttttgcattatttcttatgttttgaaaggaaaatagctttttatactttttagttttgatttcggtaactagtttaactacaggtaaccttcaaagggaccattgtacattatgaacaatagacagagatgacatcatgatgactcttgaaatatggaaattttgtctgaagatcaggggccatattactataggccctggttcatgttttcatcaatctaaggtgcaatttctaaatttgtaagagtaggtttaaaaaaaagaagtgcttcttatctttgttaacattgtactttttcttgatgttcttaaaaggtatttatctcagattactcatgtttatgttgtgagcatgtagaaacagtaatgctaatgcatggctagttgcctttttaagattgtgacaccaggcttacctttttaaagtttagtatatagagacaattttaatggaaataactactgtagactattggagaatgatctctttgtgatttaagaagtggctggattggaacttttaatatgctaatgtggaaaattaattacctttatgaaggtggtttattacgaataagcacactaacccctcggaagttgttttacctactttaaaagttttaatggattgcacctctgtaaactattcctaaaatgtgtatgatatatttgaaaaggctcccattaatataatagctttgcttgcagccttccaatctatgttggtttacctgtagtgttttctaaagtgtggtcagaggcccctatagaatgtattgtttgaaagtgtagtgatatatttgtgtttttatttcaagtaagtcattttaaccgaatgttccttcatattcatttataaaaagtacctgtatcaaaggaattttaaaaaaagcaatcagtattattggaccaaatttggtgtttgttttaaccttgactctcttcttttgattatttctaatgctacaagaatgctgtaaagtgtcttctaaaatgatgtagcctgacaagacatttttgtcagtgtattaaactaggtagtattgtgcactgatttgaccattgtgaaatcctttctcagtgtaactgcatttctaataaaatttattgagtggaaaaaaaaaaaaaaaaaaaaaaaaaaaa

SEQ ID NO: 976 - DNA, 739 bp, Macaca Fascicularis
  misc_feature (1)...(739): n = A,T,C or G
gcccatcatnnnnnnnntcagctgtgtcatatcggtnnnctacnnnnnnnnnnnnnnnnnnnnnnnnnnnnnnnnnnnnnnnnnnnnnnnncaagtcaccnnnnnnnnnnnnnnnnnngagaccctgagcgtggctggaaacatctttgtgagccagaccgnnnnnnnnnnnnnnnnncggccctacttggcagacatgacacnnnnnnnnnnnnnnnnnnnnnnnnnnnnnnnnnncgccaccattgctggcagcctgctgggcgcctacatctcctttggggtaggcagagccctccttctgctcggctatgttgaggacctgaaacccatctttgtgggagccccacacagctcctggccagagcagccctgggatcttctctcttgggcctgctgtgctggcaagaggagtggcttcccctgaaccaggctggaccatttgctcgggctttgtgcatggccgcctggggcaaagnnnnnnnnnnnnnnnnnnactgagtgcatactaggtgccaagcagtatgctaggtgttttaatagccccattttnnnnnnnnnnnnnnnnnnnnnnnnnnnnnnnnnnnnnnnnnnnnnnnnnnnnnnnnnnnnnccaaaattcatgctcgtttctccagtctcacacctgggctgtccctagagatccgtcctactccttccctcctccccttccccatactctctctgggcccaagtcctgcctctgctcctaaattat

SEQ ID NO: 977 - DNA, 689 bp, Macaca Fascicularis
  misc_feature (1)...(689): n = A,T,C or G
tagtaagagttctgcctgtcagctgcaaagtgctgggtggaaggtccctgcttcccactctccttttcccgcctgccagccccacagtagtgctgcctgggcttgtgtttggccatgaagccccnnnnnnnnnnnnnnnnnnnnnnnnnnnggcatccagatggcaagtggtggctgggcatgatcttaatcggattctccctatgcacagtcttgactcaaaaactgatttcaggtgtgtggataatacaatgatggtggcaagaaagaatgaacgcttttctattggttgttggaacacatttaaattgccatatggagaaagcagtgttttgattnnnnnnnnnnnnnnnagtcttcacaacaatannnnnnnnnnnnnnnnnnnnnngcctagttatctacgtctctgagccctgcctnnnnnnnnnnngtaaacaaatgtgtcactgtannnnnnnnnnnnnnnnnnnnnttttatttgatttagctgtaatacgggttttgcaaaagacctaaaaatagaaacattgcatatgtggctatgtttgtatttatagttactatgagatacacatttgctcaggtggatttttaatatcccgaagctacaagtatnnnnnnnnnnnnnnnnnngctttcactgttttcccctgtgttttctcatgatcttcaatttaactacttcc

SEQ ID NO: 978 - DNA, 461 bp, Macaca Fascicularis
atcatggtatttgtaacctggagagaatactagtgcagttggtcttgatatcacctcattcacaaccagcttaaatggcagtatccctctgtgaactcagctgccccttctgtggatctaggctgagctctataggccagcctcttcatctcagcccttctaggtcctgctgtcagggctgagctgccacttcacttttttcccagagtagtgcacgatgcctctctgaaacctgagctattgtgacattttcttttttaattttataatttttatgatttctctaatttttgattttacagacagactctcattatattgtccagactgaccttgaactcctgggcccacacagccctcccacctcagcctctccagtaattgggactgcgggcatgcaccactgtaccacgctaaaccgtgacattttcttgtggttaattatctcacccttgagactc

SEQ ID NO: 979 - DNA, 1644 bp, Macaca Fascicularis
atgcaaaaagtggggcctggagatggggctgtcatttttctccaaacacttgcccatccaggaaggccagccctgggcatcgaagactccagctgacatcatctctaccgttgagttcaaccacacgggagagctgctggccacaggtgacaagggcggccgggtcgtcatcttccagcgggaaccagagagtaaaaatgcgccccacagccagggcgagtacgacgtctacagcactttccagagccatgagccagagtttgactatctcaagagcttggagatagaggagaagatcaacaagatcaagtggctcccgcagcagaacgccgcccactcgctcctgtccaccaacgataaaactatcaaattatggaagattaccgaacgagataaaaggcccgaaggatacaacctgaaggatgaagaggggaaacttaaggacctgtccacggtgacatcactgcaggtgccagtgctgaagcccatggacctgatggtggaggtgagccctcggaggatctttgccaatggccacacctaccacatcaactccatctccgtcaacagtgactgcgagacctacatgtcggcggatgacctgcgcatcaacctctggcacctggccatcaccgacaggagcttcaacatcgtggacatcaagccggccaacatggaggacctcacggaggtgatcacagcatctgagttccacccgcaccactgcaacctcttcgtctacagcagcagcaagggctccctgcggctctgcgacatgcgggcagctgccctgtgtgacaagcattccaagctctttgaagagcccgaggaccccagtaaccgctccttcttctcggaaatcatctcctccgtgtctgatgtgaagttcagccacagtggccgctacatgctcacccgggattacctgacagtcaaggtctgggacctgaacatggaggcaagacccatagagacctaccaggtccacgactaccttcggagcaagctctgttccctgtacgagaatgactgcattttcgacaagtttgaatgtgcctggaatgggagtgacagcgtcatcatgaccggggcctacaacaacttcttccgcatgttcgatcggaataccaagcgggacgtgaccctggaggcctcaagggaaagcagcaagccccgggctgtgctcaagccgcggcgtgtgtgcgtggggggcaagcgccggcgtgatgacatcagtgtggacagcttggacttcaccaagaagatcctgcacacggcctggcacccggctgagaacatcatcgccatcgctgccaccaacaacctgtacatcttccaggacaaggtgaactctgacatgcactaggtatgtgcagatcccggcccccaccacccagccttgcgcaagtcatccccgacatgatcttcacgaccgcaacgcaaggaggggaaggaagtcacagcgccaacgaggacagccgcagaggtggcagtgtgtggacacagggagcctgggcccccatccctgccccagcttccctaggccagaattgtgtttggcagtaattgtctgtttaaaaaaataaaaaggaaaggaagcgttcaccgccacaaatcataaaatgaaaaaaaaaaaaaaaaaaa

SEQ ID NO: 980 - DNA, 641 bp, Macaca Fascicularis
ctttaaaattatatttattgaaagtataactttcatacaataaaactcattactaccacaatcaagaaatacaacttttttttttttttgttaatcactttaagattttcatcaggctccattgcagtgaatctccccatccaccacctcctctggcccttggcaaaaatcaatctgttttctgtcactatactcttgcctattctagaattttatataaatgagattatacagtatatagtcttttatgtctgtcttccttcacttagcttgactctcctgaggtttatttatgtcattatgtatatcaagggtttgttatctttattgttagagcataccactgaatgcttatggtaaagcttatttacctagtcatctgcagacaattaggttgtttatgatttttggctattgttaataaatctggtataagtatttaaatacagatatttctgaggatatgtgaatatatatatatggagagagggagagaaagagagaaagagagagacgtaagatttggtccattactccacatctacataaacacttggcatttgtattttaaatttttgccattctagtgttgagtcatggtatcttactgtagttttaatttccccaataactaattagat

SEQ ID NO: 981 - DNA, 1800 bp, Macaca Fascicularis
  misc_feature (1)...(1800): n = A,T,C or G
gatacaggcaatttcaaatcctgtccaggaaatttccaaacgttctaaatatgttctataagcggttttaaagacttatcaataaagtgatctgagtaacaaaacatggactgaaagatcgaattttgtattttcaaaaatattttggaattcctttgatatggaaatcaaatataacagcggcgatttttttttaagtcttgcaagcacagagagcatgatattattcaaaactgctcaagagcagcaatgattattttaagcttatgattcaacgggtacattaattaaagacaccaccaacccaaattgacagatcttgatatcaatgagtccagaagaattaaaataatagtcatataaaaatagattaaagaggtgaacaacagcatatgtcagaaggacaaatgacaagcaagcagcagttcctgactcccctccctccagctccatctaggaaaccaattttaggaacattgagtgccagacccttcctaaaacccctggtgtgcccaagtctaaactagagaacgaatactcagtatttctagaaggtgtttccaccccgagaactgcaagtgttctcacgttctttgcgttcgtcatgacctccaagtgtcccactggagctgtcattcccgtagttccaaagagaatactcgagcgcggagcgattccattgccatttccttccagtagccaggttttgaccacttgctgaggggtagacaccagccccgcggcagcgctctctgctgcgaaaagctgtctacggagcgagacggaaggaaacagagaaaataaaaatttgataacgacatgcaactcggttcctgagaggacagagacactgacttatttttgcatcccaggcactttgtagagggcctttagcacaaagaaatcccggctcttccagatgttaaactccctgaatagaaggacagcgtcttctttttcgttatccatcgtgccagctctcctctagcgcctgctggggtagggtggagtggtgggggcgggaccggcacccagcaagtgcaccataaatatctgttggctggatatatgaacaaatggaattaaatcaattggcctaattctgttacccagactggccccccgtgactctagacttctaggctgataagttctttgaatacagacactgcattttttaatctttgtaacagcattgcccatccccagctcattgacaggcacggagtgcccaatatgtgcttgtgggctgaatgctggctgttttctaggtcaaccacctcggtcggtagcttgctatttttcctaagtttacacgctgatggaatcttattgctactttgtctctgcccccatttcatgaggagatcactctagagacagaatcttgctatgctgcccaggctggacnnnnnnnnnnnnnnnnnnnnnnnnnnnnnnnnnnnnnnnnnnnnnnnnnnnnnnnnnnnnnnnnnctaccacacccagctcttttgatctaatttttatcatgtcaaagttttgtcatcttgctttaaaaaattatcacaagcattctctcttgttactgagcctccttctacaacaggctgtctaatggctgcagcgtttttattgtatggagaaactatacctcattatgcaaaactctctcattgaaaatattcacatagtttctaatgtttctttatcatacggatggccctggactcacaatggtttgacttaaatttttctagtttatgattggtgtattgggatattaaatgtattttcaactttcaaaaaaaaaaaaaaaaa

SEQ ID NO: 982 - DNA, 762 bp, Macaca Fascicularis
  misc_feature (1)...(762): n = A,T,C or G
gatagcgctactcntgtaacaagtacagaaaatgaaaccagagggatggggacactagaatgaaaaccagtgttagggtaaagtcaaaacagaccatatacataatctgtgtatgggaaaagaaagagcgaagttaccttacttaaagataataggacaagacaaattacagattgtctcagagaaaacaaatgagttactctctcagacaagctgtaggtcctacataaatgtccagcaggacattagacagtcgtacagggtacagaataattcttcgttgtgtggcactaaccnnnnnnnnnnnnnnnnnnnnnnnnnntggctgcatccactcagtgccgggagtagtccccagttattnnnnnnnnnnnnnnnnnnnnnnnnnnnnnnnnnnnnnnnnnnatttttttccactgacctagcgaatatctagcatccttagattggctcaactgttacttccctaaggagtccttctatagaataggtcagatacttgcctcccgaactccttatttttaaaatacttggcgccttgctttgataatttgtattatgtatccaaactgaaattatctgctttccgcattagaatgtaagccccctgaggggtgagtcagtctgtnnnnnnnnnnnnnnnnnnnnnnnnnntcagcccagcagcatgctttgtacactgatatattgggtaaattttgttgaataaattaagctcaactatttatatttcannnagttgagttgtattgcttcttgttc

SEQ ID NO: 983 - DNA, 203 bp, Macaca Fascicularis
  misc_feature (1)...(203): n = A,T,C or G
caaactccgggccacaggaggaaataggaccaagacccctggacctggggcccagtcggccctcagagccctnnnnnnnnnnnnnnnnnnnnnnnnnnnnnnngaggacgtcacccccatcccctctgacagcactcgcaggaaggggggtcgccgtggtcgccgtctgtgaacaagactcctcaaaatatttctgtaaaaat

SEQ ID NO: 984 - DNA, 707 bp, Macaca Fascicularis
  misc_feature (1)...(707): n = A,T,C or G
aaagtgtttttgtatataatgtattttttcacttttggaggcttctttttgtataacttcaataaagattgtaagcaaaggttgaggctttgatggttttttttcttaattattggctgaaatctgccttggaacactcctggttttacatagtagccaaaggttttgttctggccttctgtactgatctgtgttcctgatcctaattcttatctgtnnnnnnnnnnnnnnnnnnngtgtggctgtaggcctttgttttccaatggtgctatattctgttttcaaatacttcactgaatcnnnnnnnnnnnnnnnnnnnnnnnnnnnnnnnnnnnnnnnnnnngctacaaaaacaagacttggtgaagatcttgctcttcggtgctgaaaatggattatggacttcggctgtgagccaggcctagaatggtacttgtcctatatcaacctagtcttcaactggggctataatccnnnnnnnnnnnnnnnactctgaagnnnnnnnnnnnnnnnggaatgattcctaaggaaaacggtctgcatctgagctctggtttgaaagtagccaagggactgatgatggtggacactccagatgcggttggaagcatatgtggggaggctggctggttgagttttgttattttctgtatagaaaggttgagatatatcaacacttggaattgttacccatcaactgaatgact

SEQ ID NO: 985 - DNA, 775 bp, Macaca Fascicularis
  misc_feature (1)...(775): n = A,T,C or G
ctttagcagaatgtgactccagcactacatttccatccacaagacttgagttatttttgaacagctttatgatatgcttaggtaggcttataactttgctcctccaaacaatacttttctttggaaaacaagccctgtggagagttccttctatcaagttgcttcagtttaacctatttctagaggactagtacatgcaaaattggcaactacaggggatgaaaagttcaaaaagtagatcctacaagatgtaacaaatacttttctaaacatccaggtatatatagctcgagaacacttcaataacaagatttggtctacttagaaatccggcttgatagctaaacactgtagaccacaaagttaacatcatgttacatacatcttacaacacacgttaccccagtctgttaaaataaaccaatgtgaaactaaaaaagcattactagctctgctttagtgcctaaggtaccacagcatcacttagaaatagacagaaatcttatcttccccttaaagtagttgttgtcatgccatacagactttttaatattaacaaaaataaagaaaaacatcctggaaaatatattatcagaagaattgtagagtattgaacaggtaagtcatccctcagccggaggttagtctacttcttccatgcgtgatgtgtcgtcatctccttcgaggggcggcatttctnnnnntacagctgcactggtatcatcagcagtaggatcatctttcatcatacccagaccaagtttgatcatcctgt

SEQ ID NO: 986 - DNA, 153 bp, Macaca Fascicularis
gcaacagagccagagtctgtgtctcaaaaaagtgtatataatataatcttgttctcgagggagagggggtaaaagtgttgttttgcccactgtgtgacactggtgagagccccactaggtatgaggcactgtttagatattgttttcaggcag

SEQ ID NO: 987 - DNA, 478 bp, Macaca Fascicularis
tgacatagtaaaaaaaaaattacaggtacccacaaaacagtgcctgcaaaggagcaggtgaagaacaaggcacccagtaagctcacttagccccacatatctggaaaggctctgaggttccaaggtctctaccccaccaggggacacccagtaaacatcatgcggagagtttaagttgcactcagctggagttgatttgccctcagaaaagtttccaatggtcaagaaataccactgggtaggaatatctctgagcaacttcattgctgactgggcaaactttgtaggataaggtgtcatgtgatgctttgcagttagctaagctaatgttaggctggaccatgaaaaacaaaaatcaactaacacgcatttggccactgcagtcccctggcattgagcaatagagcaactgtgctttctcaccactagttgtgagtgtacttccaactgagtatttagaaatcagagattgggcgtg

SEQ ID NO: 988 - DNA, 793 bp, Macaca Fascicularis
  misc_feature (1)...(793): n = A,T,C or G
aatcagtcannnaattcatggtgtgactcnnntgttgctcntttcatatttaatgcagagattnnnatataaggtccatgcttcaaacataattatatctttctatatccagcnnnnnnnaaatatatagggttaagaagtatttnnnnnnnnntccttgtttagtaagttagtaaaaactgggatgactagttgccaagatgtcttgtaactgcatagcagatgnnnnnnnnnnnnnnnnnnnncattcacttcagcacaagactgtacatttcaatctgatattctactttgccatttaagtacacaattaaaatcagannnnnnnnnnnnnnnnnnagtattgtaattattagtttcaaaaagaattattttgaataggatgattaaaccagtgagaagaaagaaacacacataaatgatattttgcagtttatctgtattaagaaatgcttcnnnnnnnnnnnnnnnnnnngtttttggattgctgcataagactttctttccatttactttatgtatttttaaaagctgcaggtaatttttaaggtttgatggaattataatggaagccttgtataagttaaatgaaactagtaaaggagagcttactttgtctataatgcattcaggattataaattagattttaaaatgaaatgtctgatttgtaaaatatttaatgttatatcagacttaaataaaattttctgtgagaacgcaaagtaaatgcatttgatttttaatgaatgttctgaatgaaatatgaatttttgtctttcagtctctgtagt

SEQ ID NO: 989 - DNA, 2167 bp, Macaca Fascicularis
tgtccaaattatgttggaaagaggaaatttgtcatagctgaggggagagagaataggtactaagttggcaaatgaccaacatagtgtatatgtctactcacatccactccccagcaaaggagctttatttcaagaagagcaatgcaccatctcatcacagatctgcagcagagaggtttggaggctcaaacccttctctttgtgtcgttgaatttttcctccctgacctctaatttgtttggtttggctgtgaaaaaataaccttcactgcagctttctaccgggaagctaatcattgacgcataattacaatgtagggcagaaataagtacccagttgattttgttgttgacttaattgaaatactgtacgtttctcaggcccaccctcattagttccgcactctatccttgtactttatccctaaagagagggaactctgatgcccaacactttattgatccagcccttgaaatctcatgattgatttttgccagcattgtacaacgtgtttcctctgtttagacactagataaattttgcagtaagcaattatggataaattttaccataagcaattaaaaaacaaccaggtttcttaataacattcctgggagacccactgaactgccaaaaactacttttaaaagtgtgttaagagaatttatttcttgatataaattcctataacaagagacacattgagtgaaactttttcctcatttactaacaaacatttactaataaatgttacttaaaaaaaaaggaggacaacatggtggacaaaaacacagactctgaagcccaactacccagcttaaatctcagttatgccactaactgcgtgaccttaggcaagttcttaagctttatgctttggtttccttttctgtgaaatgaggataagaatagcatctacctctcttggcctttgtgaatgttaagcgtgaatataaagaaaagtgcacttagcacagagtaagcccattgtaagtgttaacacgtttatatttttacatgccttcttttttgaagtagcacctctatttacacatattttctctaatctcccaaacacccctgaaagattatatagtattgcaactattattaactcataatagctaacattaatggagtgcctactatgtgccagacactgttctggctaccaaacaggcattatgtcattgaagcctcaaaacaagtcacagaaatatgatttttctccttttacagatgacaaaaactgaaggacagaaagatcaattaaattgcccagtgacattcactttgtttggtagtggcactattgagactggaactcagtcagcttgactctcgcatgcttaactttatgctacttttgatatgcacatatatagactatgatattaaatgacttgtttacaatctttccactacgccttgttccctttcctcagtttggtcaataagcatggtaaaaaatctactctctgtcaaaaaacgtgtgggaagtcagagattgtgatccatagaacatagcagaacttgagaaaatgaggagatatgtttaaaagggtactaataagtattccatcgaaaatggagtctacagagcactttcatatttaactgaacagaattaagacgttaattgtctcatgagtagtacctgctttatagaagcttgctaaaacagggtgcttgtggtaggatgcaaagtaaaatgctatgttcatggacaagtgaggaagacactcagtcccacctgccggactctcttgcgcctcacatatcaccatgtcatagtcttcaaatgacattcttactgctttagatcacagaggccttttattcaaatgaaatattgtaaggggaggccaatgtctgaaacagacacatgttttattagtactcatttctacattcagcattatagaaaagttacaataaagccctcaaacaagatcaggttaaaatacaccaggcttaaaggtttgcttccaggttttcatcattttgcctttggttgcccattcctgataaaatcttgagtcacagatagcagtagtcatacatgctaacagctcttgacttcccaaatccaagatttcttctgtatcagtttaaatagctgtgggagtttctttcagccaaaaaaaaaaaaaaaaaaaaaaaaaaa

SEQ ID NO: 990 - DNA, 729 bp, Macaca Fascicularis
  misc_feature (1)...(729): n = A,T,C or G
gggtggccataggactggcctnnncagggacaagtaggtgttccgggcggggggcctgggccctaccctcacatagccacccttctctnnncagctnnnnnnnnnnnnnnnnnnnnnnnnnnnnnnnnnnnnnnnnnnnnnnnnnnnnnnnnnnnnnnnnnnnnnnnnnccagagccctcataccnnnnnnnnnnnnnnnnnnnnnnnnnnnnnnnacaacctgtcctacatgatccctaggcccttggggaccctgctgagggaggtctcagggacgctgcagcacttagacctgaaccactgccnnnnnnnnnnnnnnnncctcagtgccctcctgcccgccctgtgccgctgctcccacctcagttccctgagcctctccgacaaccccatctccagtgcctgcctcnnnnnnnnnnnnnnnnnnnnnnnnnnnnnnnnnnnnnnnnnnnnnnnnnnnnnnnnnnnnnnnnnnnnnnnnnnnnnnnnnnnnnnnnnnnnnnnnnnnnnnnnnnnnnnnnnnnnnnnnnnnnnnnnnnnnnnnnnnnnnnnnnnnaagcagctgcaggcnnnnnnnnnnnnnnnnnnnnnnnnnnnccccccgctgnnnnnnnnnnnnnnnnnnnnnnnnnntgaatgaagagcaggagccaggctcagggaacagaagtcagagagggcagctggaatcacagctggggccacatgttgttgcaaggannnnntaa

SEQ ID NO: 991 - DNA, 696 bp, Macaca Fascicularis
  misc_feature (1)...(696): n = A,T,C or G
catataggaattcagctccacaaagcttcaggcctgaccacagctggcnnnnnaggttgtttggtgttgtgggcacagaggtggcagtgtctctacaggcacccgggaagctgttctactttggaactccgtgcaactatccgtctcgaataccagggcagggcaaggcggacggatgccgtccaaccaattatctcacttgttttgtgttctgccatcctttttttaaaaaaaatacacccccaccccccgccacgcacaccttacagttcaaaaggttggtttatttctattttcaaattccctaattctaaaaacagtgccaggtggcccagagataccatctgaagggaaagaatggcaaagctccgaggaggctggggatggggaggctgaggcagggttgctagagaactgtcannnnnnnnnnnnnnnnnacatctgccagggcctgcctcaagaagcccagcccannnnnnnnnnnnnnnnnnnnnnnnnnnnnnnnnnnnnnnnnnnnnnnnnnnnnnnnnnnnnnnnnnnnnnnnnnnnnnnnnnnnnngtgactgctggaccaggctgagctcgaggtcacacgtgaagggccctgctgtggtcatcttggtgactcggtcannnnnnnnnnnnnnnnnnnnnnnacgtcgctgaggggcagttcaccaccaccctcgttctcca

SEQ ID NO: 992 - DNA, 717 bp, Macaca Fascicularis
acgcccacccagctgaaaggttgacattttttctcatgtcaaactggacttgggatcattcagtataatctccactactgttaagatcccaggaagtgatcaaaagacctgaggtttgtgaatcaccaccttgggcctatccagaaaaggctgagtgtttccaggtaatatgtgatacgaataaaggtggaagtggagccttctttgcttggttctttggcccaccctaaaataagggccaaaagtaaaatcgtacactgaataagaaaaggtgttgtgttcatgttgctgaatagttacaaaatcaaaactaaaaccctttttcctttctgatagttgaaagttatcttgataccgtcacagaattgaatttgagaaaattatcgcaagcccaggaggtaatttcaggtgttagcattaaattaacaccaccccttcttcctacccccagtctgggtttcaagaaaaggagggctgaagagtaccaattttgttagtgctcttcaatattgaagaactgagggcaggaatttatctttgaggacaaaagttgattcttcagctgtataggagaaaggtgactaaaccactatagaccatcactatgtgtttttttggtttctgtgtttaccatgcaaccctgtagtcatattgtcattttcttaaatcttagcaggagctgatcgaaacaatcctattggttcattaaaaatctca

SEQ ID NO: 993 - DNA, 721 bp, Macaca Fascicularis
  misc_feature (1)...(721): n = A,T,C or G
ttttcagatcatttantacacnnnatatgaaacttcctgtagacaattgttatttgaattgcttcttcaatgcagttatataacttggaaannnnnnnnnnnnnnnnnnnnnnatttaaagtcatttgaaattatataagtccatttgaaaatgttttaccaaaaatgtatttatgaatatgcagttaatgctaaattccaccttgatcattcattnnnnnnnnnnnnnnnnnnnnnnnnnnncagagagaacaccaaagctgccatgagcattgaattagataatgtctctgtaagattctgttacacaattatcctgttactgacttatannnnnnnnnnnnnnnnnnnnnnnnnnnnnnnaacattctgcattaacatctaaagatataaattatctttaacagtgtttaaaattaggtaataattagtccaaacctcatcatggaatagatcaacataaaataccatgtggctgagttgaaagcaagttctttcagtttttattttaattctcattaaaatactctacaggcagttttggagcatcacttggggtccttctcatcttattttcannnnnnnnnnnnnnnnnnnnnnnnnnnnnnnnnnnncattattttctattttgggattctggcctgcttcattgtagtgttagtttctgaatcacagtagctaaactattgagtgtacatgtattgactcttgtgatttggaa

SEQ ID NO: 994 - DNA, 765 bp, Macaca Fascicularis
  misc_feature (1)...(765): n = A,T,C or G
tcatggattattgacccgtatgatgccagagttggtcgttggcttttnnnnnntaggagatattttgctctcctgcagaacaagcttaataacattaacnnncaaggtagttttggaagatgagaaattgtgcttttgttttggcaactgaaaactttgtccaacggatactatgtgaggaaggtggtttaaggagttttagggccctcttgtccttctttaaggctctgcaaaccttattttggaaaacttctttttctcccttttatttgaatttcctcccagaaattatcatcttggtatcaccgagacaaatctagtatcaatatgcttgcctgagaaactaggattatgtctgtccacataaattgcaagggagaaggtattctgtttatttcctgctgatgctttcatatcaccatgtaactgcacatattaaaattataatgcaagtaaaaatttattctcttcaaaatcttattcttcaaatactattcagaaagccatttggcacaagtacagaatttaacttaacgctccaatctgaaattcactgaatgcattcaaactgttagaaaggaaaataaaaatggaggacaaacacatttttgttttgtttctgaaaacaatatttaaggtcagaactgtttaaaaagaagcactgctaaaaagttataggattcagagaaacatagtatttttgtacagtatcttataaaatgttcagacctctctctacattctctttacaatgtaatgtctctt

SEQ ID NO: 995 - DNA, 738 bp, Macaca Fascicularis
  misc_feature (1)...(738): n = A,T,C or G
atgcacaatgatttgtactgnntaataaaaacacagtgtatactttgtatgtgtcgtgcattcagtggtcttcatcctcactgacacagtggttcgagatcaagnnnnnnnnnnnnnnnnnnntaagatactagtttcagtctctcaaagccagccaggctacacacagaaaatgtttactcaatcattcaaaaaagtgaaaagaagagaaagtaactttgtttggtaaaacaccagtactccaaccttccagaaagccgctaatcttcattgcttttaatgttctattttgtggcatatggttttctgttacttccattgtcaaaatgccatacccaaatacacagcaatgaatggcacacaagtaatccacataatgcataagccacaccaaaaacatgctaaatttaaatctgatccaaatgagtccatacccattttcatcattggcatttgaacaaaagacttacannnnnnnnnnnnnnnnnnnnnnnnnnnnnnncttttgtaattcttgtccacttgtaaattgtttttactctttatacatacttttcagactgcctttcttttgtaatttatggacggtttataaatgaatgacnnnnnnnnncccattgtgtcttcaaaaactctattataaattgtaatataatagtatgtggtagatttattaaaggaaatccatgtgtggttaagctctgtgtgggtgtgtgcatgtgcacagttagtgtaaaa

SEQ ID NO: 996 - DNA, 754 bp, Macaca Fascicularis
  misc_feature (1)...(754): n = A,T,C or G
cagagagacgacacnnngnnncnnngctgcagggagttcccaggaggtgacgtatgctcagctggaccactgggccctcacacggaggacagnnnaggctgtgtccccacagtccacagagcccatggctnnnnnnnnnnnnnnnnnngctgttgccagacactgaccccaggcccacctggcctctgcacctgaggatataaagtcactctaggaaannnnnnnnnnnnnnnnnnnnnnnnnnnnnnnnnnnnnnnnnnnnnnnnnnnnnnnnnnnnnnnnnagccgacctggagacatgagctggagactggaggtttctaaccagcatccagaaggttcgttagccaagtagtcccttctacaannnnnnnnnnnnnnngannnnnnnnnnnnnnnnnnnnnngacccagctacagttccctggctannnnnnnnnnnnnnnnnnnnnnnnnnnnnnnntttccagagacccagctaaagtcacctgcctgtnnnnnnnncccagctatagccgtcaggctattnnnnnnnnnnnnnnnnnnnnnnnnnnnnnnnnnnnnnnnnnnnngatgccgcctccaagcttgtcctnnnnnnnnnnnnnnnnnnnnnnnnnnnnnnnnnnnnnnnnnnnnnnttatctgccctgttaaccctaaagaccttcctagaagtcaagagctagccnnnnnnnnnnnctatacacacacagctgagagccaagcccagttctctgnnnnnnnnntactct

SEQ ID NO: 997 - DNA, 736 bp, Macaca Fascicularis
  misc_feature (1)...(736): n = A,T,C or G
gctgcatgacnnnanctccagcgcctcntggattggtgccctaggccctggttttgcctgccataccctggtcctggccctggctatgtccagagtgacacagggatggagaagactgttgcaaagcatggcctgagtgtgtgtttccttccggcagctgaggatcacttccgcaggcctctcccaggctctgccgtgaacctctccacagcctcgagcttctgggtggtgtgcagggcaggtgtgtaaccaccccaaggtgatgatttggctcaagtctccttaaattattccaggtgcccctcccttaccccatcaacagcaccaagcactttcctagaatgctgctctggggcaactgcccttggttccagcttctctaaagaaccatgtgaagccattggaaggtaaccacaaccttcatgcaagtgaatcttgggaaggatgtcaagaggagtatgtgaattgcaggcttcagaagttaagcggggttgagtgtgggggctcacgcctgtaatcccagtactttgggaggttgaggtgggtggatcgcatgaggtcaagagttcaagaccagtgtggccaacatggtgaaattgtctctactaacaatgcaaaaattagctgggcgtggtggtgggtgcctgtgatgtcagctgcttgggaggctgaggcaggagaattgcttgagtctgggaggtggaggttgcagtgagccaggatcccgcggtgcatc

SEQ ID NO: 998 - DNA, 662 bp, Macaca Fascicularis
cgactcccaaataagcacacacattttcaattctcatgtttgagtgattttaaaacgttgtagtgaatgtgaaaactaaagtttgtatcatgagaatgtaagtgtgttttctgctttaaaatttagtaggtttgctaagtaggtaaaatttagcaaacctgtgtttgcatagtttttggagtgcagaatattgtaattaatgtcataagtgatttggagctttggtaaagggaccagagagaaggagtcccctgcagtctttttttttttttttttttttgattagtgaggagccagtaagaaacacctgggtatttggaaacaaatgatcattgttacattcatttgctgaacttaacaaaactgttaatcctgaaacagacacagatgatgcattctcctgctgttgcttctcagtgctgtctttccaatacagatgtggtcatgtttgacttgttaggaaagtacagaatgttaatcatacagagaatccttgatggaattatatatgtgtgttttacttttgaatgttacgaaaggaaataactttaaaactattctcaagagaaaatattcaaagcatgaagtatgttgctttttcccagaatacaaatagtatactcatgataaaaaaaaaaaaaaaaaaaaaaaaaaaaaaaagg

SEQ ID NO: 999 - DNA, 162 bp, Macaca Fascicularis
  misc_feature (1)...(162): n = A,T,C or G
acagccggccatctgctaatacacctaattggaaacgctgcactagcactatcaaccaccaacttctccctaactctactaacttccacacttctagcannnnnnnnnnnnnnnnnnnnnnnnnnnnnnnnnnnnnnnnnnnnnnnnnnnnnnnncttaata

SEQ ID NO: 1000 - DNA, 2084 bp, Macaca Fascicularis
  misc_feature (1)...(2084): n = A,T,C or G
acttcctcttcctgcccggctgagggggcgggaacgtatgggtatgcgcggtagctaggtaatgcgccatctgaggcgtggtgggaatgtagttgctggaccaccgccaagacctcctaaatccctccggaaagggatgcgttgggcctgtgatctggcagactgggcgggccaggggtcccagtagagggaaccacgggaaaagaatgtgctaagataagaggtggtggtctgagagtaggatgcttgttgtctgagagtaggatgcttggagctgagtgtatggagaggctgtgcttattggtgctgtcaaagtctatggtatgaccaaacaagggaaagctaaggtaggttaaagaacaagatcactggagaagggatagaaaccgagcaccagagcattgattggatgatccatgaggataccgaaatcaccaaaaaatataacaagaatgatgttggagagagccagaagcaacaatcttgaaaaggcttggaggttggtggataagtataacttggaaacccaagcatggtatagtctggtgacatgagattcaaagttgtaggtgaggttaagaaaaagggaggaggtggtttagcaatagcactgagtaactgcatagcaagaaggaaacccatcccacctccacccagaggggcaaggagcaaaaaacagctactattagactatggaaattatgttagacaaaaaaacaaatgcaagcagttttcttattcgagttcaaaatgggctgtaaagcagcagagacaacttgcaacatcaagaatgcatttggcccaggaactgctagcgaacatacagtgcagtggtggttcaagaagttttgcaaaggatggccaggtgtggcagctcacacctgcnnnnnnnnnnnnnnnnnnnnnnnnnnnnnnnnnnnnnnnnnnnnnnnnnnnnnnnnnnnnnnnnnnnnnnnnnnnnnnnnnnnnnnnnnnnnnnnnnnnnnnnnnnnnnnnnnnnnnnnnnnnnnnnnnnnnnnnnnnnnnnnnnnnnnnnnnnnnnnnnnnnnnnnnnnnnnnnnnnnnnnnnaggcagaggttgcagtgagcagagatcatgccactgtactccagtgacagaacaagactctgtctcaattttaaaagaaagaaagaaagttttgcaaaggaaatgagagtcttgaagatcatgagcgtagtgtctggccatcggaagttgacaatgaccaactgagagcaatcattgaagctgatcctctcctagctacaggagaagttgccgaagaactcaatgttgaccattctatggccacttggcatttgaagcaaattggaaaggtgaaaaagctcgataagcgggtgcctcatgagccaactgaaaatcaaaaaattatcattttgaagtgttgtcttctcttgttctacacaacaatgaaacatttctccacttggattgagacgtgctatgaaaagtagattttatacaaagctggcaacatccagctcaatggttgggcccagaagaagctccacagcacttcccagagcaccaaaacaagtcatggtcaccgtttggtggtctgcggcccgtctgatccattgtggctttctgaatcctggtgaaaccatcacatctgagaagtatgcttagcaaatcaatgaggcactgaaaagtgcaacacctgcagctgacagtggtcaacagaaaggacccagttcttctccacaacaacaacaatgcctgactacttgtcgcacaaccaacccttcaaaagttgaacaaattggtctatgaaattttgcctcatccgccatattcatctgacctgtggccaaaccagctaccacttcttcaagcatctcaacaactttttgcagggaaaacacttctacaaccagcaggatgcagaaaatgctttttaagagttcagcgaatcccgaagcacagcttcttacactacaggaataaatgaacttatttcctattggcaaaaaggtgctgattgtaatggttctattttgattaataaaaatgtgtttgagcctaaaaaaaaaaaaaaaaaaaaaaaaaaaaaaaaaaaaaa

SEQ ID NO: 1001 - DNA, 873 bp, Macaca Fascicularis
  misc_feature (1)...(873): n = A,T,C or G
gctggagtgcagtggtgtgatcttggctcactgcnnntnnnnnnnnnnnnnnnnnnnnnnnnnnnnnnnnnnnnnnnnnnnnnnnnnnnnnnnnnnnnnnnnnnnnnnnnnnnnnnnnnnnaatttttgtatttttagtagagacggggtttcaccatgttggccaggctggtctcgaacccctgacctcaaatgatccacccgccttggcctcccaaagtgttgggattacaggtgtgaaccacctcacccggccccgttgcaatcttactccactttgtnnnnnnnnnnnnnnnnngacatgcctattattaggcctatttgatagatgagactgaaactcaatcggggtcacaagccaaagcccatgccacttgaagnnnnnnnnnnnnnnnnnnnnnnnnntcctcttggtggcatcgagcttgtgtgatatgaggtcttatgtctgnnnnnnnnnnnnnnnnnnnttgaaagcaataaacataaaacttccagcaacttcccactcagctgcaagcctgcgaagggtcctgcctcgagccataaggtgagcggctaaccagtgctgnnnnntggtatggagannnntgaannnnnnnnnnnnnnggttgtaggcaggaatattcacggagcccctgaccatacactcacactgcnnnnnnnnnnnnnnnnnnnnnnnnnnnnnnnnnnnnnnnnnnnnnnnnnnntttacgattctcagggtcccactcctnnnnnnnnnnnnnnnctaaattttacataagagttccggctccnnnnnnnnnnnnaaaaaaaagagttccggcaaggctnnnnnnnnnnnnnnnnnnnnnnnnnnnnnctgcaggatcaaatttagggttatgtttt

SEQ ID NO: 1002 - DNA, 278 bp, Macaca Fascicularis
  misc_feature (1)...(278): n = A,T,C or G
ctctccccacctccctctccccaacctccccttcgctcgtaatcttggtannnnnnnnnnnnnnnnnnnnnnnnnnnnnnnnnnnnnnnnnnnnnnnnnnnnnnnnnnnnnnnnnnnnnnnnngtaaccctaattagggcataaagtctgcaagctgaattatcttagaaagaattttaaaggagaattaaatctgataccattttttttcctctctttagtacgttttgccaacctatgaaatggccgtgaaaatgcctgaaaaagagccaccacct

SEQ ID NO: 1003 - DNA, 642 bp, Macaca Fascicularis
  misc_feature (1)...(642): n = A,T,C or G
agcaggcgctggctgagaatgaggctctttttggaacaaacggagcaaaggatgagcagcaccagggctcagaggcaatggctgtgtgaaccgctggctgctgtcgtgccctcatctctgggcacattgcctggttccccnnngcgccagcttctctcgtgagagcacctgtcactccatccccagcagggagggactgtcagctcacaaggccctctttgtttcccgttcccagacataagcccaaggggcccctgcacccaaggccccctgtccctcggtggcctccccagacccctggacacgacagttctcatcaggccggtgggctttgtggtcctcaccgcccctggccgcatcacccgctcctcttatacctgctgaccttcgaatgttgcagagcacagggcctatctccctcgggtcctctggacccacccgcctcttcctgccctgtccgtgcagggacatcacccacatgccccagctctcagaccctgcacctctgtgtcccgggccacagcaagggtccgttcaccccctccctccattcccaattatctgggtcctctggatgcttgtttcttgaatcaggttcctcttgccccctagccaccataggcagcctctgacagtgtgtct

SEQ ID NO: 1004 - DNA, 728 bp, Macaca Fascicularis
  misc_feature (1)...(728): n = A,T,C or G
cccgccgccggggtctagagtgcagcgagtgcannnnnnnnnnnnnnnnnnnnnnnnnnnnnnnnnngcaccggcgtatccacacaggtgagcgnnnnnnnnnnnnnnnnnnnnnnnnnnnggcgttccgtcagagtacccacctgaaagaccaccggcgcctgcacacaggtgagcggccctttgcctgtgaagnnnnnnnnnnnnnnnnnnnnnnnnncatgnnnnnnnnnnnnnnnngccgcatccacacaggcgaacgaccctactcctgccctgactgtggcaagagctaccgctccttcnnnnnnnnnnnnnnnnnnnncaagaccnnnnnnnnnnnnnnnnnnnnnnnnnnnnnnnnnnnnnnnnnnnnnnnngaggctgccgttggcctggccnnnnnnnnnnnnnnnnnnnnnnnnnnnnnnnnnnnnnnnnnnnnnnngatctaccctctggccgaggccgagggggtccagatnnnnnnnnnnnnnnnnnnnacttcctcttcagcacttccatgccctgttgctgaaggccctccagcatccccttaagcatctgtacatactgtggcccttcctcttcccatccctaccaccttgtaagttctaaattggatttattctctcctgaggtgggtgctttggggtccttgacacacaaaaaggtgcccccccaccttccacctcttagcactggtgaccccaaaaatgaaaccatca

SEQ ID NO: 1005 - DNA, 1981 bp, Macaca Fascicularis
atcatctgcctgctctacgtgggctgggtcaccaactacatcgccagtgtgtatgtgcgggggcaggagccagcgcccgacacaggcagtggcaaagtttctcagacgtacacatctgggcgcgcggctgccggctacccgtgacccctctaggaagggctcagggatttttaatttggaaaaaattccacctggtttcctttgtcaaggtctctccgggtggccagtagcagttccagtactacggctacaatgcctacctcagcgaccgcctgcccctggaccgacccctgcctgacctcagacccagtgggtgccgtaacctctcgtttcctgacagcctgccggaggtgagcatcgtgttcatcttcgtcaatgaagcactttcggtgctgctgcgctccatccattcagccatcgaacgcacgcccccgcatctgctcaaggagatcatcctggtggatgacaacagcagtaacgaggaactgaaggagaagctgaccgaatatgtggacaaggtgaacagccagaagccaggcttcatcaaagtcgtgcgtcacagcaagcaggaaggcctcatccgctccagggtcagcggctggagggcggccactgcccctgtggtggcactctttgatgcccacgtggagttcaatgtgggctgggctgaacctgtcctcactcgcatcaaggagaaccggaagcggatcatctcgccgtcctttgataacatcaaatatgacaactttgaaatagaagagtacccgctggctgcccagggctttgactgggaactgtggtgccgctacctaaatccccccaaggcctggtggaagctggagaactccacagccccaatcaggagccccgccctcattggctgcttcattgtggaccggcagtacttccaggagattggcctgctggacgaaggcatggaagtctacggaggcgagaatgtggagcttgggatcagggtgtggcagtgtggcgggagcgtggaggtcctgccctgctcaaggattgcccacattgagcgggcccacaaaccttacacagaggacctcaccgcccacgtccgcaggaacgctctcagggtggctgaagtctggatggatgaatttaaaagccacgtctacatggcatggaacataccccaggaggactcaggaattgacatcggggacatcaccgcaaggaaggctctgaggaaacagctgcagtgcaagaccttccggtggtacctggtcagcgtgtacccagagatgaggatgtactcagacatcattgcctacggagtgctgcagaattctctgaagactgatttgtgtcttgaccaggggccagatacagagaatgtccccatcatgtacatatgccatgggatgacgcctcagaacgtgtactacgcgagcagtcagcagatccatgtgggcatcctgagccccacggtggatgacgatgacaaccggtgcctggtggacgtcaacagccggccccggctcatcgagtgcagctacgccaaagccaagaggatgaagcttcactggcagttctctcagggaggagccatccagaaccgcaagtccaagcgctgtctggagctgcaggagaacagcgagctggagttcggcttccagctggtgttgcaggagtgctcgggccagcactggagcgtcaccaacgtcctgcggagcctggcgtcctgacccacttgggccacttccggctgcctctttgctactgtgtagcacctactgcaacgctgcctgctgtccgtgtggggttggagtcaggggaaccaggttagtgggcccccaagaagagctttttatttcctatccaattttcgtggagtttatagaaagacgctaattggtgggtgatggtatgatatcaaactattttgcagttgtaaataggtgacaaatggaaaatatttataactgacaataaaatattattaaaaaaaaaaaaaaaa

SEQ ID NO: 1006 - DNA, 763 bp, Macaca Fascicularis
  misc_feature (1)...(763): n = A,T,C or G
aataatgttatgcaatacacacaaaaagttaaagattttatgtatcgctaatagtagaagnnnnctgcaccactaattttttaaaaatggaagttaaactacatagcccagagaaagataagtaaatatttaagaacatattgaacaactttgctgtttaaagatattatccaagtacataaattattcctttctctatcaattaaggctattaaatataataattagctttacannnnnnnnnnnnnnnnngatgggcagagattgtatccctaccttctttttcgtgtaaaccacnnnnnnnnnnnnnnnnnnnnnnnntatcccattattactatannnnnnnnnnnnnnnnnnnntgcttagattgcagtacatgagtctgcacaaaaacttcaacaattgcacatcttcattctcccaactgagtgtaatatgtggagcataaaacagcatatttcttagtacttcatgaatatcagatggtcttcaaatgtctctttatggatgtattgnnnnnnnnnnnnnnnnnnnataatgaatatatgaaagtgaggtagtgaacatcctaaatttctacactgaaattattaaataatcttatttcataaaatgggaaatatatgttgnnnnnnnnnnnnnnnnnnnnnnnnnnnncttttatttgttaacaaaaaatattatggacagctttnnnnnnnnnnnnnnnnnnnnnnnnnnnnnnnnnnttgcaggcattttgacattcatgataataatacaa

SEQ ID NO: 1007 - DNA, 690 bp, Macaca Fascicularis
  misc_feature (1)...(690): n = A,T,C or G
gccggtgtccacnnnnnncagttactggnnnnntcccgaagcaagcgnntgggtgtgctnnaggcctcctgccctagcagttcgctttgcacgtgcacacacctgcacaccgtccctctccccagacaagcccaggnnnnnnnnnnnnnnnccttctgtctcatgcannnnnnnnngccctggccctttcacctgtcttcccaccgactctctctgcccccaaagtgtcaaggggccctaggaaccttgaagctgttctctgcttttccattctgggtgttttcagaaagatgaagaagaaaacatgtctgtgaacttgatgttcctgggatgtttaatcaagagagacaaaattgctgaggagctcagggctggattggcaggttgtgggctcccacgccctcctcccgctgctaaggcttccggctgnnnnnnnnnnnnnnnntctgcccaccccgcctttgggctcatgctggccctggcggccaagcctgccctggccactctgtttgctcggccaggacctctgggggttgttgggaggagggggtccggccgggcctgagggtcccaaggcgggcaggggtggtccagaggaggtgcccaggcagggnnnnnnnnnnnnnnncctgtgcacccgtgccacgcgctctgcatgttcctctgcctgttccctcttctcttctcttt

SEQ ID NO: 1008 - DNA, 442 bp, Macaca Fascicularis
atacatatattttacaagatagtccttgatattagtagaaggagaaatgtacgggtgacacagaatagtataatgcaaatttcatagtaatagtaactttataaaataatataaaatacaggatttaaacctttagaaatagatcatgaaactttctctcacataatatagtagatatttgtttataatgttaacaaaacattttggtgaattccctcaatgtattataaatgtacattttttaagtcattaagatgaatattagccatcatgtagcttaaggagtatgaaatctgccattaaaactgcacctttaagccaggtgtagtagcatgtgcctatagtcccagctacttgggaggcggaggtgggaggattataaatagagactttcctttagactttaaaaatgtatttaaaactatttttattaaatactttg

SEQ ID NO: 1009 - DNA, 707 bp, Macaca Fascicularis
  misc_feature (1)...(707): n = A,T,C or G
atggcagtgtgnnnnnnnnnnnnnnnnnngaaggctcagaagcatcntcctgctcatctgctttggcctcgaagcctagcccagagggagnnnctgctgccagcttcgagtacaccatcctggaccccagctcccagctcttgcgtccatgggcactgtcccctgagctgccctctaccccaccccacctaaagtacctgtaccttgnnnnnnnnnnnnnnnnnnnnncaactgactatagctcaggggactcccagggagcccaagggggcttatccgatggcccctactccaacccttatgagaacagccttatcccagccgctgagcctctgccccctagctatgtggcttgctcttaggacaccaggctgcagatgatcggggatccaacatgactcagagagccagttgcagactcaagacttactgaacagggagggcgaggcctctctcaggagtaggggcattgctgattttgtctgcnnnnnnnnnnnnnnnnnnnnnnnnncaaccttgcagtatctttaaatatgtatagtttttttttttaaatctatctatctttatatacatatgtatgtaagtttttctaccatgatttttacaaacaccctgtaagtcccatcttcccctgggcataggccatggggtagaagttaaagttcttgagcttnnnnnnnnnnnnnnnntgtaatctgaatact

SEQ ID NO: 1010 - DNA, 761 bp, Macaca Fascicularis
  misc_feature (1)...(761): n = A,T,C or G
aagcagcccagcnnnnntgggcnntnctgcctctgtgcctctgttcnnnnnnnnnnnnnnnnnatnnnccctggcgcttccgaaggctctggttaccactaaaggcggctccttccaactgtaccttgtcctctgctgggtagagcagcacaccagtaacctgcaaggctcatcaacatataccctaaaccctggggctggcccaagtgaggttgcaaactaaatcgcctgaactctgttgtcggtgaatatgccaatgcgtgtttacaagtggcccaagactgtgggactgacgtacttgacctgtggaccctgatgcaggacagccaggacttctcatcttatttatcagatggactacatttgtctccaaaggggaatgaatttttgttctcgcatctctggcctttgatagagaaaaaggtctcttctctgcctttgttgcttccttactggcgggatgtagcagaagcaaaacctgaattaagtctgctgggagatggagaccattagccaatcacaggagacccaagtctgcttgttaatctacagaactcaaagttgccaatacatagaggtacccttttttccccaggcttaaacctttgccactgataataaaagtattaggattttacagggaagttttgtacttaggtccattgtgttttgacagtatttgttaatgcaggtatcannnnnnnnnnnnnnnnnnnnnnnnnnnnnnnnnnttgttaattctataaatgatgaagaaaaga

SEQ ID NO: 1011 - DNA, 198 bp, Macaca Fascicularis
acctctttgcgcaaagatatgagaatgtgtgcgcacccctgagagcaaaatgagaggagggggagagacaactcacccccgtgtcccccatgacccgtgttcgcacggtcacgtgtgtctcctccccagtcatcttctcctgctccagagagggggggggagatgtctccatctcagtctcaactatatggggggaga

SEQ ID NO: 1012 - DNA, 1766 bp, Macaca Fascicularis
  misc_feature (1)...(1766): n = A,T,C or G
tatgttactgtaatgtgagacgttcccacatttccacctgactcaaaataacgcatcaatctttattcagtgcctgtgggtgtaactattatgttgagtgctgtaaaggaaataaatagacacataagtgaatgcagtacatatatgaagcagttccatccactttcatgattctaactagcagctgcatactcgaagtttctcactccctgcgttctagacctgttgttgaaatgtgtgctagatacctgaacttcatcccacatctatctccccgccgctcctccaccccgcactggcagggctcggcccacccgctctggatgtctcctgggcttctagtgctgccatgtgctgtcattgccccttgcttcgccagtggtgtgatgtgtctactcctgcttcccaatgagactgtgtgaccatcacaggcaggggtggaggctattcctctcttggggagaggttggagggtaaaagggccttaaggaaggaatttggggtttctaggagttaatcatggaactgctctgagccttagtttccctaactgaactttgggggcatagtttatttaaaaattggagaattctctatataaacttaagaagcatttttgtgtgtctttgaaaatgtgttactttaatctttgcctttttgcctttttggtgtgatttttctccaaggatatttgctcataaaatactaattatactcctcattcctctgcttctgattctatagcatatcatgtctttctgacattgccctgattcttaaattgaaccagacacagggcccaagctaaacaggaaaagcgaaacaccgggagcccccaccggtctccccaggtctgctgtttttcagacataacagaaaatgggtaaaatgtgttcctgggactgtagcccagtcccatgagaaggcctaggagtcagagggccagcccagtcccactgtgactgtctgggccgcggctagcgccagttgtgtttatgtccatcttgcgttttttgcagccaagcagttttgtgcagcaggacttacctgcatgccccaggggtcttttaggattcaggattacttttcttttatagtggtttcctcttggcagagcctggggtgtggaggatctgtgtggcgttcccaatgcagatccatccccagggtctcctgggcagggatggccaagtcccttcccctcccaagagaaccctgctctgtcctgagggcagagcccaggcacatgttgcttcttccacagaaggaatttataccaaaaccacaagcaaaaaacaaaacagaccaccaccaccaacaatgaagatgggggaataaaggtttttaaaattttctgttaggttcatatttttgtatcattttgcctataaatgtggcatttgccatgggaatttgaagacaaatgatctatgtgtttatggttttctagggaaggtgtcctggggggtgggctgtctccagctttgggaagccagctccctctggggggcaccctaagcaggatgagggggccctgataggtgcttcttgcnnnnnnnnnnnnnnnnnnnnnnnnnnnnnnnnnnnnnnnnnnnnnnnnnnnnnnnnnnnnnnnnnnnnnnnnnnnnnnnnnnnnnnnnnnnnnnnnnnnnnnnnnnnnnnnnnnnnnnnnnnnnnnnnnnnnnnnnnnnnnnnnnnnnnnnnnnnnnnnnnnnnnnnnnnnnnnnnnnnnnnnnnnnnnnnnnnnnnnnnnnnnnnnnnnnnnn

SEQ ID NO: 1013 - DNA, 266 bp, Macaca Fascicularis
catgcaaagaagagtaaaggtatataagttttctctatgacgtagggttgtggtacacctctaaatgtcaggttaactttacctaattacaaatgtgtagaaccacctttctccggtatgtgctttgtattttttttcattttccggtaatgaatttgaacacagctagaggagtttctgataaatgactatcattttcaagtatagccatccctcattattctcagggcattggatccaggacccctatggatgccaaaactcaa

SEQ ID NO: 1014 - DNA, 740 bp, Macaca Fascicularis
  misc_feature (1)...(740): n = A,T,C or G
agtgctgagatacaggcatgagccaccgcacccagnnnctgccaccagctctgtagcctnnnnntagttcctttctctgtaacctggggagtgcagtagcacctgcccggtggggctcttggtgagcccgggaactgccacactctgaaccgcacttgtactaggggctcagtaacaagcagccgccagtgtggttcctacatcccaggacttcacccgtctcctgcnnnnnnnnnnnnnnnnnnnnnnngctcttggaggagggtccagcctccagcttcccaggcttcatttgcatccctctcgcaggccccagctcaggctcgtgcccacccaccaagttccagtgccgcaccagtggcttatgcgtgcccctcacctgnnnnnnnnnnnnnnnnnnnnnnnnnnnnnntggcagcgatgaggaggagtgcagtgagtggccacgccccagggcgggcttacagggggcgggcctgaggatgggctgttaggggccaggcacatggaggtggagcttgtgggagaggcagggccacagggatgggtgcgacttgagtctgtgggtcataagaagaagcagggtctaagatgagnnnnnnnnnnnnnnnnnnnnnnnnnnnnnnnnnnnnnnnnnnnnnnnnnnnnnnnnnnnnnnnnnnnnnnnnnnnnnnnnnnnnnnnnnnnnnnnnnnnnnnntaggattgnnnnnnnnnnnnnnnnnnnnnnnnncagagtaa

SEQ ID NO: 1015 - DNA, 670 bp, Macaca Fascicularis
  misc_feature (1)...(670): n = A,T,C or G
acttttcccannnnctctnnannnttcagtaagtcaactnnnnnnnnnnnnnnnnnnnnnnnnnncacatagcaattcaggaaatttggctttccattctctggtggnnnnnnnnnnnnnnnnnnnnnntttggagtacgctgnnnnnnnnnnnnnnnnnnnnnnnnnnnnnnnnnnnnnnnnnnnnnnnnnnnngagggagacatctcggcccgggtgctgtccgccgcggagtcgcgcggaggcggaggcttgggtgtgttcaagattccgcttcacccgtaacccaccgccatggccgaggaaggcattgctgctggaggtgtaatggacgttaatactgctttacaagaggtgctgaagaccgccctcatccacgatggcctagcacgtggaattcgcgaagctgccaaagccttagacaagcgccaggcccatctttgtgtgcttgcatccaactgtgatgagcctatgtatgtcaagttggtggaggccctttgnnnnnnnnnnnngatcaacctaattaaggttgatgacaacaagaaactaggagaatgggtaggcctctgtaaaattgacagggaggggaaaccccgtaaagtggttggttgcagttgtgtagtagttaaggactatggaaaggagtcnnnnnnnnnnnnnnnnnncgaag

SEQ ID NO: 1016 - DNA, 746 bp, Macaca Fascicularis
  misc_feature (1)...(746): n = A,T,C or G
agacagnnnnnnnnnnnnnnnnnnatgctgatatgttcaactggagacagtatttttctatgcannnccttgatactgctcatcattccatgagaaaaacaatgagctgagaggcagacttccctgaatgtattgaacttggaaagaaatgcccacctatgccccttgctctgagnnnnnnnnnnnnnnnnnnnnnnnnnnnnnnnnnnnnnnnnnnnnnnnnnnnnnnnnnnnnnnggaggagttccttgatctgtatatacaataacataatttgtacatatgtaaaataaaattataccatagcaagattgcttaaaatagcaacaccccatatttagatcgttaaaataactagtgttgcttggactgactattataatttaatgcatgttaggaaaatttcacattaatattgactgacagcgggcctttgtcatctttcttctattttattccctttaacaaaattttactcctataaagtttattgacagtaatttcaggtttcnnnnnnnnnnnnnnnnttatatttttatagacaaataataagcaaagagagcactgggctgactttcaggtactaaatacctcaacctatggtataatggttgactgggtttctctgtatggtannnnnnnnnnnnnnnnnnnnnnnnnnnnnnnnnnnnnnnngactcctgtgcaactttcccaatgtggtctaaatatgcaactttgtttttactttcttttgtaaatgttta

SEQ ID NO: 1017 - DNA, 738 bp, Macaca Fascicularis
  misc_feature (1)...(738): n = A,T,C or G
aataccnnnnnnnnnnnnnnnnnnnnnnnnnnnntagctggattttgattcaaattattatcaacattaagcccactgtgaatattctattaactttaattctttcttgaagtcaaatcgcacactaccacatcaaaaaatattagaaaatagccacctnnnnnnnnnnnnnnnnnnnnnnnnnnnnnnnnnnnnnnnnnnnnnnnnnnnnnnnnnnnnnnnnnnnnnnnnnnnnnnnnnnnnnnnnnnnnnnnnnnnnnnnnnnnnnnnnnnnnnnnnnnnnnnnnnnnnnnnnnnnnnnnnnnnnnnnnnnnnnnnnnnnnnnnnnnnnnnnnnnnnnnnnnnnnnnnnnnnnnnnnnnnnnnnnnnnnnnnnnnnnnnnnnnnnnnnnnnnnnnnnnnnnnnnnnnnnnnnnnnnncatgatctgcccaccttggccttccaaagtgctgggattacagatgtgagcctccatacccagccaaaatttttttttaataaaacaaaattttgttgaaatcttttaaaaattcaaattattttacaagttttacataatttatccccaaacttgctttttgccttcttgatgcatatatgcttggctaactatatttgctttttgctaacaacgctgtgggtctttttatgcatttgcatttgctctttcatctctgcttggattattttaaatcattaggaattaagttatctttaaaatttaagtatctttttca

SEQ ID NO: 1018 - DNA, 1885 bp, Macaca Fascicularis
aagggactgggggttcgcgcccggggcgtctgctgggtttgcggagcagctactcggcgggatctcccggcaggatgggtaaaaagataaagaaggaagtagagcctcctcctaaggatgtgtttgatccattaatgattgaaagcaaaaaagcagccactgtggtgttaatgcttcgttctccagaagaggaaattttggctaaagcatgtgaagccatttataaatttgctttaaaaggtgaggaaaataaagcaaccctccttgaacttggagctgtggaacctttaactaagctactcacccatgaagataaaattgtaagaagaaatgctactatgatatttggaatcctggcttctaataatgatgttaaaaaattgttaagggagttagatgtcatgaattctgtcattgcccagctcgctccagaagaagaagtagttatccatgagtttgctagcctttgtctagcaaacatgtctgcagaatatccagtgattcagttgttggctctcaaaaccttaggtgttattacaaatgataaggagtctcgaacaatgctaagagacaatcaaggattggaccatcttattaagatcctagaaactaaggaattgaatgaccttcatatagaagcacttgcagtgatagccaattgccttgaagacatggatactatggtgcagattcagcagacagggggtcttaaaaagctcctgtcatttgcagaaaactctacaattcctgatattcagaagaatgcagcaaaagccattactaaagcagcttatgatcctgaaaatagaaaactttttcacgaacaagaggttgaaaagtgccttgtagcccttttgggttcggaaaacgatggaactaaaattgctgcttcccaagctatttcagcaatgtgtgagaattcaggcagcaaagattttttcaataatcaggggattccacagttaattcagttgctaaaaagtgacaatgaagaggtacgggaagcggcagctctagccctggcaaacctaaccacttgcaaccctgctaatgcaaacgctgctgctgaagctgatggtattgatccattaataaacgtcctgtctagtaaacgagatggagccattgccaacgccgctacggtattaacgaacatggccatgcaggagcccctgcgcctgaacatacagaatcacgacatcatgcatgccatcatcagcccactgcgttctgcaaacacagtcgtgcagagcaaagctgctctcgctgtcgccgcaactgcgtgtgacgttgaggcccggacagagttaagaaattctggtgggttggagcccctggtagagctgctacgctccaagaacgatgaagtgaggaagcacgccagttgggcagtgatggtctgtgctggtgacgagctgacggccaatgaattatgcaggctcggggctttagatatccttgaagaagttaacctatcaggaactcggagaaataaattcagtgaggcagcttataataagttgctcaacaacaatctttccctgaagtacagccagactggctatttgtcatcaagtaacataattaacgatggattctatgattatggtcggataaatcccggcaccaaactgttgcctttgaaggagctctgcttacaagaaccaagtgacctacgggctgtactcttaatcaacagtaaatctgatgtgtgagtctttgcagggaggggggaagcagggaagcacacactgcttgttgttgttgtttctccatcaacatgtgaatatgtgaagattcccagactcttttctcctgtatctagcacctccatgaaaataaacaccggctcataaactcatagcctgaaaaaaaaaaaaaaaaa

SEQ ID NO: 1019 - DNA, 1927 bp, Macaca Fascicularis
tcttgcactttgggcttctttattctagtctactatagtggtttgcaacagaggaaagagacacactgccctagggaggcatgttagaaccacctagggtgggaaatttggcaaatttgcttgcccctctgaagattcagagaagtccttagtcacggggagccactgtaactgatgagtagggtcatatccgtcaggtgttgggacaataaaaaagtggagtgtaggctatccagtccatggtttctatctttatttgcccttagcgtcttcacttctgcttttggaatcttctccaactatatttcactgttcaggatcacaactcactactgctcattcactttcacctgaaactctggacttagaccctcctgtcaggtgttcagctactggtcatccagggctcgagccttgaattccttctctccctccgtcctgtcaacctggtcctcagctgaggtttgacaaatctaagacaaagtaactaccatctgtgtgacacttcatggttaataaagcacatttacttatattatcttgattataacaactatcccataagaaggctcaaagaggttaaatgaccaaaatcacaaaagtagtagagccaggacttataaacttgggtcttctgattccaaattccatccatccatgggacggtaagcatgtggcccagggcagatgtctgacactatgaatctagacactttccacagaacctgtatttaactttctgcacagcagattatccagttgttgccaattaatctgagttggcatatgaatgtgaaacttctttaccatccctaactacagcgtgcgtgtggtcataactaggggcaggaccgacttgactcggtgggtgagtcttccttcaactgcattgttcaaaggttaggattggctgtagacatagtatgcttgctgatgaggactgagtacggttttgggccgtatatatcaacaactgcatataaatgagttggaaagggggaaattttgcttctttaagaagaagtctggtaacgggaggttgtcaggttgtaggcttcagaggcttaatgatattagggatctgagtctgccatcttttctttctttcccttggctttcccctcacgattctccagctgcaagcatcgcaacctcacccaacagcactcagaggtgggaagaaaggaggaggaggagggggccttcttacatgtctgtttttatcaggaaagaagatctttgtcagtagtccctggtagatttcaggagacctaagtcaggtcccttgggtcagaaatgggtcacattcctacaccctacctcaaggaaaacttgcattttccagtatctctcatggggttagagttctgccatctagaaataaggaaagttcaaggggctagagctgacaggtgattttcagtcacttgtagttttatgctttctgagataattttgtggacgttgaataccagataacacctggaggcgccgtgcatctgccttttccccccaggtctcccagttaccccttgtgacaagaaagctatactttgtgcttagtgttttgtgtctcatttcctctattacatggtaaatgcttttctgccagatgatgcctttttggttttcgtatctcccacagcacttacctcagggttcactcaacatttgatatgggtgatcaataaatactggttgagtaaatgcaatacatcaatgagctttctaaaatgtaaatttgatcatatcaaccactggttgaaaccttcagcagtaggatccagaatcccaaggagctcataacaagccctccattatgtgccctttccttttgtttctttcaaacttccttattatgaaaactttcaaatattcagaaaagtacaatgaccacctgtatacctaaaaaaaaaaaaaaaaaaaa

SEQ ID NO: 1020 - DNA, 748 bp, Macaca Fascicularis
  misc_feature (1)...(748): n = A,T,C or G
gagannnnnnnnnnnnnnnnnnnnnttcccacattcactgcactcataaggtcgtgtgaccagtgtgaannnnnnnnnnnnnnnnnnnnnnnnnnnnntgggtaaatgatttcccacaatcattgcatacnnnnnnnnnnnnnnnnnnnnnnnnnnnnnnnnnnnnnnngaggtggtccttcttgctaaaaactttctgacaatcctcacactcatttgactnnnnnnnnnnnnnnnnnnnnnnnnnnnnnnnnnnnnnnnnnnnnnnnnnnnnnnntttcccacatttctcacatttataaggctnnnnnnnnnnnnnnncnnnnnnnnnnnnnnnnnnnnnnnnnnnnnnnnnnnnnnnnnnnncacattcactgcactcataaggctnnnnnnnnnnnnnnnttcacttatgaacatggaacgtagagctgtgggtaaatgattttccannnnnnnnnnannnnnnnnnnnnnnnnnnnnnnnnnnnnnnnnnnnnnnnnnngagttggtacttgnnnnnnnnnnnnnnntgacaagcttcacaagcatatggcttttctccattgtgaattctctggtgtgnnnnnnnnnnnnnnnnnnnnnnaaataattttccacattccctacacacataaggccttcctcccatatggccatgctggtgtagaatgaggttgcccttgtgactaggacatttcccacattccccacacttaaaaggtctttctgtagtgtgaactcgctg

SEQ ID NO: 1021 - DNA, 767 bp, Macaca Fascicularis
  misc_feature (1)...(767): n = A,T,C or G
ttaccaagcatactgcctgcaaacatatnnntaacaaggcacatccctaaatccattaaactttgattaatacagcacatgtttctgtgagcatagagttggggctaaagttacaggttaacagcatctcaaagcagaaacaatttttcttagtacagggcaaaatggagtttcttatgccttctttttctttatagacacagtaacaatctgatctctctcttttccccacaacttccttatgaggaagaggctaggcttttcattctgcctccgggcacaaaacagactttttcccaggtggagaatttcaggtcagttacacagagccaggcagggatgaacatgtctggcattctctgctggagccaggtgtttacctatgttagtgggagaatagtggagctcagatgcgaagtctcgtctgccagactccaaaggccttgccttttcttgatgcctgtatttttttgtaaatgtttaagttcagaggtacaagttcaggtgtccagagatccacccgtcttggtctcccagagtgctgggattacaggtgtgagctaccgcgatggggtttcgtcattttggccagattggtctcagnnnnnnnnnnnnnnnnnnnnnnnnnnnnnnnnnnnnnnnnnnnnnnnnnnnnnnnnnnnnnnnnnnncacccggctcagtatttttttttctgagtctcttcctccttccacctgatgcatctgttttagtggaatgggttcctttngaacagtgatgttgcaa

SEQ ID NO: 1022 - DNA, 804 bp, Macaca Fascicularis
  misc_feature (1)...(804): n = A,T,C or G
caaagaacttctgctcatatccaattcctattaagtggaagtactctaacctggtattactaatattcggttagattttttcctaattttaggtgttagaatatatcnnnnnnnnnnnnnnncttcnnnnnnnctaaagtgcacgttagatttcttcaatgattttttttaattggcatggttgatacaaagcatccttctatccaaatactgtgctnnnnnnnnnnnnnnatagtttagaaccatactatctctctctggaaagaatgctggggctcctgactacacactttgactagaggggaaaatactcctcttgtatttatgatggtttttctttctacttgattaagaagnnnnnnnnnnnnnnnnnnnnnnnnnnnnnnnnnnnnnnnggaacaagattctcaggaatgaaaaatttnnnnnnnnnnnnnnnnnnnnnnnnnnnnngaagatnnnnnnnnnnnnnnnnnnntatttgaaagtcactnnnnnnnnnnnnnnnnnnnnnnnnnnnnnnnnnntgcacactgaatgcctgggatctctttgttttagaacagacaaagttgcattgttaaaggaatnnnnnnnnnnnnnnnnnnnnnnnnnnntnnnnnnnnnctctataaagagatttgaaaagaaagtcaagggaaggtannnnnnnnnnnnnnnnnnnnnnnnnnnnnggttctactagcgttatttcatgaaaaannnnnnnnnnnnnnnnnnnagaataaatctgagaatcaactggcatctaaactccatttcttgttttgtcactgcttccct

SEQ ID NO: 1023 - DNA, 720 bp, Macaca Fascicularis
  misc_feature (1)...(720): n = A,T,C or G
gcaccatgtgagcttaaggcnnnnnngaccagccccacnnncatnntccaggctcctagcacagcagcgctgacctcggtgcagtctgaggattggaatccaccatgagatgagctgagagctgtgtgccccaggaccaactttttcnnnnnnnnnnccatcaaccagcgagttgctaaggacttgagtnnnnnnnnnnnnnnnnngttcatactccgcttgaaagtccggaaggcggctactgcgaaatcgcccctctgagaagtcctctctccacatcttgcccccctttgtgaagacccctagttcgctctgcatnnnnnnnnnnnnnnnnnnnnnnnnnnngcgtcccgagggagctgtggccttgcaacaccactggcaacagggccggggctcccggcgaaggtgtcaggaagtggaaaaggctggactttgtctcctctttgcctgctggcagcctaannnnnnnnnnnnnnnnnnatacagaatacttacagattctaatatatatttgtatttcattttgttatagtatttttatatgnnnnnnnnnnnnnnnnnnnnnnnnnnnnnnnnnnnnnnnnctatgtggtcgtagcacgttttgttgggggtttctgtagtcttgtttgaatcgactcctagaggctggtttagaacaggcccgtgagggagccacacctgccctggaagtattgttttagactatgtcgatgt

SEQ ID NO: 1024 - DNA, 986 bp, Macaca Fascicularis
  misc_feature (1)...(986): n = A,T,C or G
accagcagcagggaaagatcacagttataagagggaaacaagttttcacaattgaaaagcccacataagtgttctcttttaaggtagaatcttgttaatttcattccaaacatcaggtctaacagagactggaggcatttctttttaagctctgagactaaatgagaggaaaaggaaagaaaaaaatgattgtctaaccaattgttagaattactgtttgaaacttttcaaggcacattgaaatacttgaaaacttctcatttgtgttatttatgatgttattttgtacgtgttattattattatattgttttataaatggaggtgcaggatatcacctgaattattaatgaatgcccaggaagtaattttcttctcattcttctaaaacgactgcctttgaaagtgcacacacacacatccacatatactgcattcgttgctccagtataaattacatgcatgagcacctttctgacttttaagccaatataatgggctgcaaaatgaagacaccagagtgtgtgcatacaaatctcactgtattaaagatgtaggttttctaattgtacccttcttgtctcttcggcaatcttgcccttaatatccctggagttcctcatcagtgtcattttctgttatacacagttccacagttttgtctctagttgacttcaaatgtttaactttattggtcttgccctactataattgtcatgactttcagattgtatctgaactcacagactgctgtctaactnnnnnnnnnnnnnnnnnnnnntgaatgagaagtaaattattttatgtaatacatttttgagtgtgtttnnnnnnnnnnnnnnnnnnnnnnnnnnnnnnnnnnnnnnnnnnnnnnnnnncctgctcatgctccctggacagaatactccttccttttgcnnnnnnnnnnnnnnnnnnnnnnnnnnnnnnnnnnnagctgatgcttccaggaaacacatgcatcttaat

SEQ ID NO: 1025 - DNA, 702 bp, Macaca Fascicularis
  misc_feature (1)...(702): n = A,T,C or G
ccttttttttttttcccccccagtaaagacagggtctcactctgttgccagactggtctcannnnnnnnnnnnnnnnnnnnnnnnnnnnnnnnnnnnnnnnnnnnnnnnnnnnnnnnnnnnnnnnnnnnntgtctggccaggaaaattattttctatcttaaaggaagataattacattttagagtagcaattcagttaaatctttctcagtttttcatcttaagatggctcctgcaannnnnnnnnnnnnnnnttttcccctctctgaattgaaagcagttgaccccatgctgcccctgcttccaggcctgtctcggtcgtcatatattgtgagtccctggcaccatcactgttttctaagccagtcttctaggtcttactnnnnnnnnnnnnnnnnnnnnnatgaggatatagtttacagtgctgtagttttttttttttaaaagctttgttctttgaaaatactttttaaaaagaaatctactggttagatttattgtctcacaaaaatgtttttagagattatttttttcacaggtgttttctttctcatgctgatgatcgaatgatttttgtctacaggtaacctctcagtattttttcattttagagtctatttaccaaatgaccattttagtgttaaaatggtactgaggaattgaggtatgtaaatcaggtgacataaacatgaaaattatgtg

SEQ ID NO: 1026 - DNA, 745 bp, Macaca Fascicularis
  misc_feature (1)...(745): n = A,T,C or G
acatggtgaaatcccgnnnnnactaaaacacccaaaattagccggacgcagtagtgcatgnnnnnnnnnnnnnnnnnnnnnnnncgaggctggagaattgctcaaatccannnnnnnnnnnnnnnnnnnnnnnnnnnnnnnnnnnnnnnnnnnnnnnnngggcgacagaggaagactctgtctcaaaaaataataataataatgaataaaataaaacaacaacaaaatgcatcggagagccaaaacattcagtattgcattttcacnnnnnnnnnnnnnnnnnnnnggaactttatctgtgttatagttatgaattgctttgggagccttggagctctctctagctattgttcataacgctttgctccataaccctgatgtccccaatatctaagtatctcagccttcatccattaactctactagggagcccacagccaccattcccactaggaggtatcaatgtttgtggtatgacataaggctcccttgaaataacaagacttttgagccatctgaattaaaaatacatccaaaaagtagttgtgctnnnnnnnnnnnnnnnaaacataatcacctttgataccaatgtgctccaataagtctaactagctagccagctggnnnnnnnnnnnnnnnnnnnnnnnncaaagccctaaccttgaagtttgggaacaggtggtcttctgtgctgcagagaaactatgcattagatctcttttcaattagaaacctttactatttc

SEQ ID NO: 1027 - DNA, 740 bp, Macaca Fascicularis
  misc_feature (1)...(740): n = A,T,C or G
caggaacagctcgacnnnnngagggacaagtannnngccccggcctgccctggctgcagcaagggcagggccacactctcgccgctgatgacacgcagggccacctctcacctgaccaggctgtagggggaggagacactggcaggagatgnnnnnnnnnnnnnnnnnnnnnnnccagctccctgnnnnnnnnnnnnctgtgtcctgggcctggcattgcctcaggagggggaagcttgtccctccctcctagccccgcgtgcggagctagggctggannnnnnnnnnnnnnnnctggggccagcaaggcactcccaggcctgccgtctccagcacggccccaaggtggacactagcccctgctgctgcaggtgccgtgnnnnnnnnnnnnnnnnnnnnnnnnnntttgtgagagnnnnnnnnnnnnnnnnnnntattannnnnnnnnnnnnnnnnnnnnnnnnntatgtaaaaggaaagctnnnnnnnnnnnnnnnnnnnttttgtactagaatttgctaacttgtaatatnnnnnnnnnnnnnnnnnnnnnnnnnnnnnnnnnnnnnnnnnnnnnggacattggtcacttgtaggaaatttaaactctaattatgacagctacactgaaaaataattgtactgaaattaacttgtctatcttcatttggttttaatttttaaatgtttgtaaaaagagactgttttgggggaatggggcaaaggggtgggcgattctt

SEQ ID NO: 1028 - DNA, 2312 bp, Macaca Fascicularis
atgacacctgacggtctgtgtgcatgattctgttttatgagtaggcaaacacaagaattacaatacagtggctttcaaaaagtgtgcagatttggtgagtgtatagtttgtcatatgacaaaggcataaagaagagttccatgcaacctaaggcactataaaccagagcctgcaaattgtctgctttgtcctttacagtgctagccttcacagtatttttgttttaaatttaaaagttagttatcaacattgtgaattattagattttacctcaaaatgtggactttgtttttctggaaaaaaaagaatgggacaagatttatagagagtaatgcatgactggcctgcaagtttttattttatcctggaggtcttaaaagagattaagatgatattttcagaaaatatgttgaccatggtatatgccagatatcctataataaggaactataatatgcctgatttcctctgagtcagcacgtaacttaagaagctattaaaaaattcgatttacaacctagaaacctgtatgctaaagactaaactaaaataaaagcaacaaatgtataaaatgtaactatcagtttaagtgtatgccttaactcataagcatgtaaaacattcacaaaagcaaaaatagtcaataaaatatgagagggcaaaatataaactgtcccttgtaccacccgatgggagagagagaaagccagaatgtgtgaggtccgcagatgtggccttggactatacatttagaatgtgggtctgagacatacacatccttgaagggatgaatgagaataaatctaaccactggcttaaagtgtcagagagcaagagcaagcaagtgatcgagtgagcaagcaagagagagagataaagaacttcccctgtgaacacaaaacttgctctagggaaacttccaagccaggaaatcattataaaaagtggtcctggttgttattatctctgttggaaacagaggagaacctacaatctgagcttttaaaggatctctgcagataaaaagcaatgtaaggtacacccacaatcaaaaatataaattatagtaagaggaaatatcctcagacccttaaggcagcagggccacagctttgagaacttcagctaacaggagtttttgaatagaggctgaaaaaaacactatatttaagaggattactatattccagaagccaatcataaaatcccatgaaaaatcacagttatccctcgttttaatgatcaaacccctttacttttgtagttggctaggggtgcagagaataaagcattttctcacaatgactctgttttataaatgtaggaacaagatataggatttaagtttctgactctaacttcatacaggtctgggttatagcagtcatataaaaatgtgagaagaaaaaaaagacagaaaaagaaagacagaaagaaagaaagacaggcagaaagaaagacagaaggaaggaaggaagaaaaggaaggaaggaaggaaggaaggaaggaaggaaggaaggaaggaaggaaggaaggaaggaaggaagggaaagaaagaaagagaaagaaagaaagaaagaaagaaagagaaagaaagaaagaaagaaagaaagaaagaaagaaagaaagaaggaaagaaagaaagaaagaaagaaaggaaggaaggaaggaaggaaggaaaagaaagaaaggaaaagaaaagaaagaaagagaggaatgagggagggaaggaggaaggaaagaaggaaggaaggaaggaaggaaaaagagaaaagaaaagaaggaaaggaaaagaaagaaaccgaagaaaggagagagagggagagaaagaaagaaagaaaagaaagaaagagaaattaagattagaaagaaagtaaaaaattacttaagaaagaaagagaaagaaagaaagaaagaaagaaagaaagaaagaaagaaagaaagaaagaaagaaagaaagaaagaaagaaagaaagaaagaaagaaagggaaaaaatgttatttggtaattctttgggtctagcagaaaaagaagagtcaaatatcaagaatctcaaaaaacaagacagaagatttaggtttttggcagccagttctgtttatagaaggaggaaggaaagaaggaaggaaggaaggaaggaaaaagagaaaagaaaagaaggaaaggaaaagaaagaaaacgaagaaaggagagagagggagagaaagaaagaaagaaaagaaagaaagagaaattaagattagaaagaaagtaaaaaattacttaagaaagaaagagaaagaaagaaagaaagaaagaaagaagaaagaaa

SEQ ID NO: 1029 - DNA, 705 bp, Macaca Fascicularis
gagagctgtcagttttcagctgtcagtgttatggtaacacaaatgagttttgctatctccctgagaagcccatccgacctcctggctgtcagccctacagagtagggagttgatactgacaggatgaaagtttaggagtaaatatgcctgggaagagactgggaaggttctagggtgaggcacctcagtaactcatggtgccttggccaagttggaaggaagcagtttgttaatggggcgcggtaatcctggctgtagggtctagaaggtaagaccagctgggatgaccttccctgggttgatcagtttccctctaaacaacacaaactgtacaggcatgtgactgactttgaaagaacacccatcatgtggctgctgtcacccttgaccagctgtggtggtggttactccatctgtggttggagcacctctttgggattcacttcaaggtgttgtgccactttttctgcatatcttctgtgatgacaaatctctgtcccctgagtgttaatttgatttttagaaatggccaaaagtcacgtgatccaaactttttttcagttctgtggagactgagctgcatgatagttggggatcaaaaatatgtgaccttaatgagatttttgtgatttctaaagtaacaataaaagcagtttttagagttgagttccagagagggcagggcaatggcagtgacatgttgtc

SEQ ID NO: 1030 - DNA, 730 bp, Macaca Fascicularis
  misc_feature (1)...(730): n = A,T,C or G
gtgcggacgccggggaggaagatgatacagttaccaatgaaaaggcagatagtgttctaaattttttgaagtcaacacaggaaatgtatttttatgacggtgtctccagagatgcagcttcagccgccnnnnnnnnnnnnnnnnnnnnnnnnnnnnnnnntcttgcctcacacagcatgccgccctcagacgtgtccatcctgcaccacnnnnnnnnnnnnnnnnnnnnnnnnnnnnnnnnnnnnnnnnnnnncgctctggaaatgttcccagaacannnnnnnnnncctnnnnnnnnnnnnnnngtaatctcagctttctttagttactggatcacacatatcctccctgagaagagcagtgactaaaatggaatatctctttaagaagagctcctctttaataaaaaacatgaaagacaaatgtgaaatgggcctagagttagttctctgggaactcgaaagacgtttctgctgtattatttnnnnnnntgttgtttcnnnnnnnnnnnnnnncatctgaggcttcggatgagaaattggggtaaaatggaaatttttcaccgatttgcaattatatatgtcttgaattactacataaaacgtgattctgtttttctaattattgtaaaaattgaaaatggacattctgttaaactgtatcatttgaagctcatatatttttatgaagttttgaatcaccttgtatcgaaagtctnnnnagaaagctt

SEQ ID NO: 1031 - DNA, 3852 bp, Macaca Fascicularis
atggatcttgaaggggaccgcaatggaggagcagagaagaagaacttttttaaactgaacaataaaagtaaaaaagataagaaggaaaggaaaccaactgtcagtgtattttcaatgtttcgctattcaaattggcttgacaagttgtatatggtggtgggaactttggctgccatcatccatggagctggacttcctctcatgatgctggtgtttggagacatgacggatacctttgcaaatgcaggaaatttaggagatttaggagctctgttgtttaacaacactaatagcagtaatatcactgatacagtgcccgtcatgaatctggaggaagatatgaccaggtatgcctattattacagtggaattggtgctggggtgctggttgctgcttacattcaggtttcattttggtgcctggcagctggaagacaaatacacaaaattagaaaacagttttttcatgctataatgcgacaggagataggctggtttgatgtgcacgatgttggggagcttaacacccggcttacagatgatgtctccaagattaatgaaggaattggtgacaaaattggaatgttctttcagtcaatggcaacatttttcactgggtttatagtaggatttacacgtggttggaagctaacccttgtgattttggccatcagtcctgttcttggactgtcagctgcagtctgggcaaagatactgtcttcatttactgataaagaactcttagcttatgcaaaagctggagcagtagctgaagaggtcttggcagcaattagaactgtgattgcatttggaggacaaaagaaagaactcgaaaggtacaacaaaaatttagaagaagctaaaagaattgggataaagaaagctattacagccaatatttctataggtgctgctttcctgcttatctatgcatcttatgctctggccttctggtatgggaccaccttggtcctctcaaaggaatattctattggacaagtactcactgtattcttttctgtattaattggggcttttagtgttggacaggcatctccaagcattgaagcatttgcaaatgcaagaggagcagcttttgaaatcttcaagataattgataataagccaagtattgacagctattcgaagagtgggcacaaaccagataatattaagggaaatttggaattcagaaatgttcacttcagttacccatctcgaaaagaagttaagatcttgaagggcctgaacctgaaggtgcagagtgggcagacggtggccctggttggaaacagcggctgtgggaagagcacaacggtccagctgatgcagaggctttatgaccccacagagggcatggtcagtgttgatggacaggatattaggaccataaacgtaaggtttctacgggaaatcatcggtgtggtgagtcaggaacctgtattgtttgccaccacgatagctgaaaacattcgctatggtcgtgaagatgtcaccatggatgagattgagaaagctgtcaaggaagccaatgcctatgactttatcatgaaactgcctcagaaatttgacaccctggttggagagagaggggcccagctgagtggtgggcagaagcagaggatcgccattgcacgtgccctggttcgcaaccccaagatcctcctgctggacgaggccacgtcagccttggacacagaaagtgaagcagtggttcaggtggctctggataaggccagaaaaggtcggaccaccattgtgatagctcatcgtttgtctacggttcgtaatgccgacgtcatcgctggtttcgatgatggagtcattgtggagaaaggaaatcatgatgagctcatgaaagagaaaggcatttacttcaaacttgtcacaatgcagacagcaggaaatgaaattgaattagaaaatgcagctgatgaatccaaaagtgaaattgataccttggaaatgtcttcacatgattcaggatccagtctaataagaaaaagatccactcgtaggagtgtccgtggatcacaaggccaagacagaaagcttagtaccaaagaggctctggatgaaagtatacctccagtttccttttggaggattatgaagctaaatttaactgagtggccttattttgttgttggtgtattttgtgccattataaatggaggtctgcaaccagcatttgcagtaatattttcaaagattatagggatttttacaagaaatgatgatgccgaaacaaaacgacagaatagtaacttgttttcactattgtttctagtccttggaattgtttcttttattacatttttccttcagggcttcacatttggcaaagctggagagatcctcaccaagcggctccgatacatggttttccgatccatgctcagacaggatgtgagctggtttgatgaccctaaaaacaccactggagcattgactaccaggctcgccaatgatgctgctcaagttaaaggggctataggttccaggcttgctataattacccagaatatagcaaatcttgggacaggaataattatatccttaatctatggttggcaactgacactgttactcttagcaattgtacccatcattgcaatagcaggagttgttgaaatgaaaatgttgtctggacaagcactgaaagataagaaagaactagaaggtgctgggaagatcgctactgaagcaatagaaaacttccgaactgttgtttctttgactcaggagcagaagtttgaacatatgtatgatcagagtttgcaggtaccatacagaaactctttgaggaaagcacacatctttggaatcacgttttccttcacgcaggcaatgatgtatttttcctatgctggatgtttccggtttggagcctacttggtggcacatagtctcatgagctttgaggatgttctgttagtattttcagctgttgtctttggtgccatggccgtggggcaagtcagttcatttgctcctgactatgccaaagccaaagtatcagcagcccacatcatcatgatcattgaaaaaacccctttgattgacagctacagcacagaaggcctaaagccgaacacattggaaggaaatgtcacatttaatgaagttgtattcaactatcccacccgactggacatcccagtgcttcaggggctgagcctggaagtgaagaagggccagacgctggccctggtgggcagcagtggctgtgggaagagcacggtggtccagctcctggagcggttctatgaccccttggcggggaaagtgctgcttgacggcaaagaaataaagcaactgaatgttcagtggctccgagcacacctgggcatcgtgtcccaggagcccatcctgtttgactgcagcattagtgagaacattgcctatggagacaacagccgggtggtgtcacaggaagagatcgtgagggcagccaaggaggccaatatacacgccttcatcgagtcactgcctaataaatatagcaccagagtaggagacaaaggaactcagctctctggtggccagaaacaacgcattgccatagctcgtgcccttgttagacagcctcatattttgcttttggatgaagccacatcagctctggatacagaaagtgaaaaggttgtccaagaagccctggacaaagccagagaaggccgtacctgcattgtgattgctcaccgcctgtccaccatccagaatgcagacttaatagtggtgtttcagaatggcagagtcaaggagcacggcacacatcagcagctgctggcacagaaaggcatctatttttcaatggtcagtgtccaggctggagcaaagcgccagtga

SEQ ID NO: 1032 - DNA, 724 bp, Macaca Fascicularis
  misc_feature (1)...(724): n = A,T,C or G
gnnnncgctacaannnnnnnnnnncactggtctggacattgcagtgattaggggcaggcgtgaggcagggtaaggcctctgagcccgnnnnnnnnnnnnnnnnnnnnnnnnnnnnnnnnnnnnnnnnnnnnnnnnnnnnnnnnnnnnnnngaaatcacatgatcaccgctgatttgcagtggagagggcgctgagctgggcccggcaggcaggcagcctcagcagaggtgcaggnnnnnnnnnnnnnnnnnnnnnnnnnnnnnnnnnnnnnnnncagcagaggttcaggnnnnnnnnnnnnnnnnnnnnnnnnnnnnnnnctgtcagggagggggatgctgctcctgcctggggcctgccttcattttgagggcccctggccccagctgaggtcaagaggggacctggggctgccccagcaccctgaaagccccggctgggcagctctggaggagaaaggacacaggtccctgaggccccgtctgcccagggttgttcctccccctccctcctcctcaggctggggcagggtggcactgctaggaccctctgccatggctttgtgacattnnnnnnnnnnnnnnnnnnnnnnnnnccctgtcccccaccnnnnnnnnnnnnnnnnnnnnnnnnnnnnnngcaaagcagcatttgggggatgcagggtggagcggatgctagaagtgtgtgatgcacccacggcactgacagcctctccacccgc

SEQ ID NO: 1033 - DNA, 601 bp, Macaca Fascicularis
gtgctgatagaattctaaacctctggaatttccctgctggttaattctgtggcccttgactgtacagggtgacctgatgccagatgctgtgggcgtgatgagaactagagaacttgcagtgtggaggaagctgtgtgaggcaccagaccctgtgcttctgcaggccatttcctgaaaacccctgttagaaaggttgggtttagtgtgacttgcttgagcaagagtccttgggagagattttgaggtttaatttaacagtatctccagagctaacagtgactccattcagctagttccgcaagtcagatgtaaacttagagtctcctttgtgaagggtttgggtctgagctgtatagtacgtcagtgggtaagcccagcccttcatcctctgatagatacccctttaattcaccagacttcatgttcgatacattattaatagttgaaattgtttctcctcttttgtattttcccagttaatagatggctactgtttccacaatgttttatattttcagctttttgtaacttaattacttaattttattttctcaaagcttgttgcggtctaatgagaagtatttcttgcagtgcataatgt

SEQ ID NO: 1034 - DNA, 741 bp, Macaca Fascicularis
  misc_feature (1)...(741): n = A,T,C or G
ggcctgtgcgtggtggannnggccanncntgccctgcagcttccacctctccactggaggaccgacaggttnnnnnnacctttgcaccccggcatcagcacagggggccctgccccaccctccggcagctcagggagnnnnnnnnnnnnnnnnnnnnnnnnnnnnnnnnnnnnnnnnnnnnnnnnnnnnncccgtcccggctttcccaaaaggcacaggacacgtgtgcaattcataggaacggcccaggtcgccctcnnnnnnnnnnnnnnnnnnnnnnnnnnnnnnntcacgnnnnnnnnnnnnnnnnnnnnnnnnnnnnnnnngagtcggtcccccgnnnnnnnnnnnnnnnnnnnnnnnnnnnnnnnnnnnnnnnnnnnnnnnnnnnnnnnnnnnnnnnnnnnnnnnnnnnnnnnnnnnnnnnnnnnnnnggtcaaatacagctctttctagcaaannnnnnnnnnnnnnnnnnnnnnnnnnnggcaccgattagtctactaacagccagaggtccacctagcagagcgctgggagaagctgagccgccggaggtgggctcctggtgatgggtgtccaagaagcggtttccctgggagcttctgcctccgtgggcctctcagcctgcccggnnnnnnnnnnnnnnnnnnnnnnnnnnnngtcccctccccagctccttcctgcgcccctcccctccccagagtggaattgttgaagtgtggcgagtctgtgctcgga

SEQ ID NO: 1035 - DNA, 697 bp, Macaca Fascicularis
  misc_feature (1)...(697): n = A,T,C or G
cagcaggccacnnnnnntgcgccggnnncngtcactcaccgggaccctcactgtactccggaccggtccgattggaatcagtgaacacagcccggctgaagtttcccagccgctggcgcaccggatccggcagctccatgcctgggcctcggtatccctcgccccctcagatacaggctagtctgcgggcgttccgaggctccgtggttctcatggcaaccggccggcgcgaggccggcgagatccgggagcgcgcgggggtgcccggctgggccgggtctcgtcgggagcccgcgcaaccttgaagggaccggcgtactcagagcgcgttccagcccccgggagctgcgcgcctcggccgtgtccaaaacggcagatctcttagttctgctttgagcccgaccatcctaaaaacaaacctatactaagaaatgagctggggttggactgcgatacaaggagccctcatatcttgccagtgaaactgtaaatcggtacaacctttctggagggaaatagagaatgaatgcagagcttaaagaatgtctagaggtgtaggggtatgtgtgagagagagatactatgactgattattttttaataagaaaatagagcaatgggcaactgattaaatgtactggagcatatgcattcaatggagtatgtttcagctgcttataaaatgcttgcaaagaat

SEQ ID NO: 1036 - DNA, 2097 bp, Macaca Fascicularis
ttacaaacaacttggctttgagattctcagagagagaaggaaaagggagattgcatggaaagcagaaacactggagggagaggctacccccagcaagctccagggctcaagggagcgtgtctgctcttggagtagccacaaaagagtgcaggggagaaggccagcatgttcagacctctgaggttgcataacatggaatggtttgattcattaaaatgttattcaaaacaccgtccagcacacgccacatgacttccaggacaaatgcagttgctttcctctctggctgtcactccagagtgcttgagtgaccccctccaactgggagagccagctatgacatggacctgggcagccggggcttccacaaagggtcagcttctgttctctgagtccatggctagggttatgccttgatcccttgttagccgggtttctgaggccacttggttaccttgtcagagtgatacagtgggcagtgtgaattgggccctttagaacaggagaaagtatgtttttcatgatgatgatgatgatgatgacatcgtgttaaatatatatattcagtgtttactgtgtgccaggcatgatgctaggggttttagatgcacttaattcttactcaactatatggttgagaatactattattccaatgttattgatgagtaaaccaaggctcagaaagattaataccttgattacagctatgaagttccaacatatgcagggcttcatgggagtatgctgtattccagaatccttgagctggaaaggtatcatctgccccaacctttctttggcccagccaaagcctggagcactgaagtgacttctgcaaggccacaccactggaaaatgacagagctggtaaaggccggttcttctgaaccctggtcctttgctcttttcaggttggcttacttattgtcacatcgtctggcagtttagagtgtcacagtgttttatttttaaggaacttgttgatggtttgcattgaataaagggcacaacagaactaaaacacctaaaaactagaaaataagagggaaagttagtgcccactgagcagttccagttacactgaggtagatccctggaggccaaccatcctccccagggcatggcccctgacttggggacagccccttcatccagcccactctgggaagactgcgagagttgcaggtattttgttctgttcctgggatccttattcatccaggcttgaatcagaggactaagaaaggatgaagacgtaagagtagaaaaatgaccagagaagagaccatgtctctcattcacctgagtggacccatcgtctaggctgccggagtgtcagtgtcagtttatgcaccacgcgaggctggctgcctaagaatcacccagtgagtgattttaaaatgcagattcctgagctccacttctggaatttctgatcagtaaatctgggttaggactcatctctatatacttttacttgcttctgaagtgattctgattattagcagatttgccaccactgcagagacggctctaacagcatcaaatacagtgagactggagagatcaggtggcagttttggccagttaaataaaagacaatggagggttttttgtttgtttgtttttactataactgctgggccactgccaagaatgatgctgagggtgagtctaacactgagagacaagaggaaatggacttgtgggtaagatctattatttttatgcagatgaaattttcaataattaccagtttttgtcacacatgaatgctcaattgaaataaaatcatgaatggggtctaaattatctagatcaattctcctatacgcgttgttttctggtagtcaacagatgaagcttcaatcaagctaggtaattttctggataagtgagacaactagtaatagcaaaacccaaatctacagtaacccagacgtaagtgaactcactaggacaatttaggctgatgcagctggaggaggtgagggaaccagagtacagtatccaaatagtttcatgacaatcttcgctcatctgatactgttacaccgaaacaaaaaaaaaaagaaagaaaaaaaaaaaaaaaaaa

SEQ ID NO: 1037 - DNA, 1779 bp, Macaca Fascicularis
tgtggctgactggataccgcttctgggggttgctgtgcacatgaatgtttgctattgttccaggcacacgtcggccttaagaaatagcacaaaacaggcccgtccttattcagaagccgagccccctccatcactcaaactgggccttttgaggtcacatgccggaggctgctgcagacaggacccagctgcctcaaatctgcctcctaacattagctgcggttcgaaaatcctgacagcacggggcttcctgcgctctgcagaggaaactagaaagatctgggatccaggcactatgttctctgaagaactgtggctggaaaatgagaaaaagtgtgctgtggttcggaagtctaagcagggcaggaaacgccaagaactgctggccgtagccttgggggtgaaggtgggtgtcaaaggcggctttctttggccccctctcaaactctttgcctgttcacagatctcctccctggttcgaagggcagccctcacacacaacgacaaccacttcaactatgagaagacacacaactttaaggtccacacgttccgaggcccacattggtgtgaatattgtgccaatttcatgtgggggctcatcgcccaaggggtccggtgctcagactgtggattgaacgtacacaaacagtgtaccttgtccctcattttgctgtgacaccctgaaaaagctgaccacaaatgcagtattatctcgacatacctctgtcctcctcagtgcttttcaatgaaacttcacctgccccttgtgttcctgcttttgacagtttttgctcttaagcactggcattcttctattgtatggtatatatttatagcaattgtaggatggtctgaaatgtccaccaattttcttttcatacaaattttgtgaattcccaaagtatgctttggaattgggcatagtcttttcgtatcatgagtgtgtatcccagaagatacagaatgcggtcataatacctgaaattatttgagaacactggatgtatctggtctgtgtaaaaagttagcactttccctcttttcttcccggccaagccctctgaattcatctgttaatatcaaattgtatttttgccacttttctgtattggtgaaaagcgaatctgcagaattgtcgaggtttttcttttttgttctagaaacctattttttaaagtgagaataaggttggtttttaccaaatatttgttcctccttgacaaaagtagctctgtgtggataattcaatatgattttattactatagttccattctcttggttatatttatcttagcatgagcctttcacaccaagatttctatattttgtaacataggtgaaatatttaaaacatcaaaaactgtaaatctagatttttaaaaaatgcaaccacaatgtcttttcctttgattgagatgatttgtgtaaactcaccaatcttgctttggagtgagcagaagagaatgactgtgttacgtggagcatcaccgtgtgactgttgacctgaacagtcccaagggctatgcagatggactccattggcacacggaggtcagaatggtttgacctcttccctgctattatccctcctcccaactgtacagctttgtttgttgtagtttatgtacttcttgatactgtcaaaaaattatctggaaatggttttattttgtgaagtgaacaatactttgtaatttatgatagtgtaaatggaaggcaaagcatcacatgtattaaattcttctgtctattattctggaaaaaaaaaaaaaaa

SEQ ID NO: 1038 - DNA, 710 bp, Macaca Fascicularis
  misc_feature (1)...(710): n = A,T,C or G
ccannnnnnnnnnnnnnnnntgggtggtggnntgacgcagagtaggagaggctgccactgacaggatggctatgacctgggacatggaaacagtgacctccacgttctggtcccgagatcctgnnnnnnnnnnnnnnnngtgcaccggctggggggctcgagttccggttttctttttctctttattcgtcctttctcaaagatgggatactgaccagnnnnnnnnnnnnnnnnnnnnnnnntggatgggaagactttggagcagctgtggggggtggggggacaccaacaaccaaacagacgtgctgtctccggtcctgtttttattttcaaaaaccaacaagcccgacggtggagcctgtcccctcccgggagggtgctcatggccccactcacctcatcaccccacagaaacctttgtgtcttgcccnnnnnnnnnnnngaattctttgtacattgacatgcccttctccttcctccctcccctgtagctggtctttgttttactccctccctttctgatccatgtatatcatattatgtgagatatcatctgcctgaaaaaagactttgtgcggattattgggaacattgtagctgtttctgtgttttttcttaccttgtagtctggttctgaattaagagaggaaaaaaaagtaattatgatacattgtagtttgtgtacgatatatgttgataacgtttataaa

SEQ ID NO: 1039 - DNA, 393 bp, Macaca Fascicularis
caaacactgcctctatgtgctattcagattgcttttaaaaaattaaaatagagctcaaaatgaaacaaatcagggatgcttaatgatagccaaaatgcaatgtgggcaccttgtttgggtcctgagtcaaacaaaccaattataagaagacactttagagacaatcagggaaccttaattacagactgggtagccataataccaaagctctgtggttacttttgttaggtgtgataatggtatttatttattttgttttcaaaaaaaaaatattttgagagattcagaggtgaaataatatgatgtctggaatttgcttgaaaggagctcggggggtgagcgataaacagggggagagggggtgggtcaatgacagggagcggaagaatcgta

SEQ ID NO: 1040 - DNA, 757 bp, Macaca Fascicularis
  misc_feature (1)...(757): n = A,T,C or G
tttgtagacaaggnannnnngttannnnnnnnnnnnnnntgatagtaaaggaccaaagtgattgacagctgaaaatgannnnnaggtaccctaattctcttcacacagatctgactttttttttttttgagacggagtttcacnnnnnnnnnnnnnnnnnnnnnnnnnnnnnnnnnnnnnnnnnnnnnnnnnnnnnnnnnnnnnnggttcaagcgattgttctgcctcagcctcctgagtagctgggatttcaggcatgcgccatcacgctcagctaattttgtatttttagtagaggcggggtttccctgtgttggtcaggctggtctctgacttccaacctcaggtgnnnnnnnnnnnnnnnnnnnnnnnnnnnnnnnnnnnnnnnnnnnnnnnnnncgcgcctagctctgactctaaattacagaaaattaaactatttcagtctggtattttaagaggtactgcttgacagctgaactnnnnnnnnnnnnnnnngcaaaaagcattctatcatactcagatatgagatagattgtagttttaagcccatttttaaagagcttctagaaagtgaatgagtttttgtgtttagattccccttcagtttggttaggaagtataaaagttcaatcttttgtaatgacagcccaccactgggaaaaaacccaaaaacctagtgtaatatataacatgctgtttttcaaacactgcattttacctagagttgttatgcgtaatacatgggtggggtaac

SEQ ID NO: 1041 - DNA, 617 bp, Macaca Fascicularis
  misc_feature (1)...(617): n = A,T,C or G
gcggccctgggcaggcttnntcnaggctggaggagccaggaccttcctccagccggaggtcctggctcccccannngnntcatctcccatgaaggcgatttggttcataattctgaaactctgaaagaggtcgaaagaagcagagaggccctcggtggatatgccgagcttttctgctggtgctttgtcccactactctgggtggcctgtgctcctcttcgagcctcggttcgcggggagggcctgaatctgccagctcctctcaggatctccttctctccgggccctccccagccttaaggagcctcccagacagaagggtggacagaaccacctgggcagcccgagagacacgcgggagtcctcctgtggacagccctgccagcttccgcccagccccaagcttcatttgcatcttgaggagtaaggggtggtgaaatgggaatgctggtctggctcagctggtcgtgggcataagtgccggctggatggatggcatctcttcctcctgtcttatgtcctggggtccaggtgcttcccagcgccatgcccctgctatatttggtgggtcctggttgctgacctggcccaccatgtacccagcacccaggagagct

SEQ ID NO: 1042 - DNA, 749 bp, Macaca Fascicularis
tccagagggaaaaaagtaagacctcagaaagtcagtattttacactgacctaaaaactgtatgactcagaagagcctgactcactcaggctcagtctttctattatttcttaaagcatctaagaccccatgctttctcagtgaagtggcttgtagctaccaattacaagcaattgtctcctccaaaggcaccaattctaacagcaattcacttgggtacaattgtgtggtttggagtaagagcagcagtgaggcaaggaacttaaatctgttcctggctccaaaaatgctttatgatacttgtcctttgtctatcttagtctctgtgtctaaaattagcaccaacatccttcccaggcatgactgagatggatgaaggttataagggtagaagctctctttctgatcagcttttacagtgctaagaacagaactgcaggaatgcatactttttagaacctttatgcccccaattaagtaaaccctattaaggctcatcttcctatttcccctctctttgtttccctatttgaggaggggtaagtatcagaaagagagaacctgaactgaacagtaggaaacagaagttccacgtcaactcactacctgtcagcactggtatcaggggtgcccacctcccacccctgccttgctggcagaaccgagaaactcgaaaaaaaaaaccaaacaaaaaaacaactgttgtagcttggagagaattaatagaactaggattccatggatgtgaaa

SEQ ID NO: 1043 - DNA, 727 bp, Macaca Fascicularis
  misc_feature (1)...(727): n = A,T,C or G
atcatactatggaattcanctacatgacaagatggcgactaagaggcgaaaactttcggtgtctgaactgctcagcnnnnnnnnnnnnnnnnnnngatggccctttgtatcagaaccaacatacagccgctcaggaatgcacacaatctcaaggacccgtgggctgccttgccttttcttcgcaagtggaattgtagaatttggggaccatgatgcagagtgagaaactggtcaggtccaaagatgtcagaactcaggggtttcatgttgtgcacagacaaggaagagaaaagagggagtatgtcagtcatatcgcctggannnnnnnnntctgggtttgggaatcctcatttcttgcatcttacagttacataaatctattacttctgtgcttttggttttttctnnnnnnnnnnnnnnnnnnnnnnnnngnnnnnnnnnnnnnnnnnnnnnnnnnnnnnnnnnnnnnnnnnnnnnnnaatggaagaaagcaggtacactcgatccctgcatagagccacagaaacaaatgtcatttgtgaatttaactgctagaggctaatggaaatacgatgcaaacaacctaaagaactnnnnnnnnnnnnnnnnnnnnnnnnnnnnnnnnnnnnnttatttgtaaaagagaaacctattgtttttcccttaagttgtgatgccagcgtaatgtgatctcatgcaatgtgggtgaaagttaaantgatttttt

SEQ ID NO: 1044 - DNA, 743 bp, Macaca Fascicularis
  misc_feature (1)...(743): n = A,T,C or G
gagggataagatactnnnnaggggaggtgaaatgctcaccactgccaaaacacggnnnnnnnnnnnnnnnncggaggatgagagggacagtcggnnnnnnnnnnnnnnnctcggcagccctcccagcagggacaggaagactgggcaggaagaggggagaagcactcaagttaaggcaaaaggcccgacgcagagcagcacactgaggtcacacccatgagatgtggaagagaattccattgcgtggagtgatggggttaggtgccannnnnnnnnnnnnntttgcttctgtcagactcttgactaaggatttctggttgcattttattacataaaagccagggaggttatatcacgatgaggaagcttccctgaggccgcctcctgcaacgcagccaagcgagcctgtggaggcaccatatgactgtaggcctctggggacaggnnnnnnnnnnnnnnnnnnnnggccagggacatggccgtttctgccagcatctgttgatcagtgagtgagtgaatgggcaggtagagcaggagccagtgaagagcagaccctgggtgggttgggatgcactgtgcccccaggctgcagctgcaggcagccccccacattgttggagaagcctctgcaccagctcagccccctcctcactcccctcgtgccctggggacactctgcagaggggcactctgcagtctgtccccgccatcactggacttctggacattgcctccagattgca

SEQ ID NO: 1045 - DNA, 710 bp, Macaca Fascicularis
  misc_feature (1)...(710): n = A,T,C or G
tacccactttccatccagatcaatannnnnnnnnnnnnnnnnnnnnnnnnnctaccccttcaacacttgcctaaagctaggacaacttcttcaaaggcaatagtggataagagaggctggtatatttgccgccacattaggaaagtcttcagaatttgaccctaacaacaggcaaatttcaatgtattcatccttttgttgaaataagttcnnnnnnnnnnnnnnnnnnnnnnnnnnnnnnnnnnnnnnnnnnnnnnnnataactgagtttttttccctgctatggggtttgcctacctagtctagattctcacactagcctgactttcctctgctctgtggcatatttnnnnnnnnnnnnnnngggctgttggtttccagagtgttgcctgatgcatcccaaatgtcggcttagcaatcaatacacatctgaacaggggcccatcactaatagcaagcatctcattcatctgggcaaaactcatgggttttcacagggaccctaccagctcagaagcaccttgatataaataagtagaaaccaaagacagctaagttttaaatcttgagtcaaaactttaaaatcaaagtcaagttgatttcattttggtgagctttcaaatcatgcttttaaaaataaatcatgtaaaaaaatcatgtactcctatgtataattttacttctggtgttttttcnaatcagaaaataaa

SEQ ID NO: 1046 - DNA, 722 bp, Macaca Fascicularis
  misc_feature (1)...(722): n = A,T,C or G
tttcctagatgccccttagtacctaggactggataaggtagaaagggaaagaaaacnnnnttctggcaggatgtagctnntgctgcacaagatagaatgatgacaaaaggttttcactgctggggaatggatgattgtgggagaaaaagaatctcagaagagtggagagggaacaaggagggagtggccataaggaaaggaaccaatatttaccacgtgaaaattgtgagatggatgaggctaggtttgaagtcaaatgttagctgagatggagaacttaagtggtggatgatcattgtctaaaagacgaatgagttnnnnnnnnnnnnnnnnnnnnnnnnnnaatgtcctcatgccctcataaacaaacatgaaatcttggattatgggatnnnnnnnnnnnnnnnnnnnnnnnnnnnnnnnnnnnnnnntaactaaaaacctgaataacagtttctaaattcttaaaagtaacaaagagggtctaaaaaagtaaagagaaatcagagccagggatttggcccatgttaaaccccaagcactacagctggcttttacccaacccttaactttcatttttagggtgttatatggaaaccgaccagggtatatagggcctgataagagatctttttaggtgaaggtgagacaccagacgaaaatctgtcacctcagggtagaaggatgaactagaaataaacacacatacaaacccatcacag

SEQ ID NO: 1047 - DNA, 656 bp, Macaca Fascicularis
gccagctgcctccgcactccattgaccagggtgcagaggacgtggtgatggcattttccaggtcggagacagaagaccgaaggcagtagctgcaaagcccttggaacaccctggatgctgttgagggccaagagatctgtgtggctcctgggccggctgagtggcagcagacccccttgccccacctcccacttcccctacccaaccctgccctgccccatcccacctcacagctactcagtggggctggcatcaagggagacaccagtggtgcgtttatgattggcttaaagggatggacttgtgattggctgcaggaagaaacttttttattttttaaatcttgaccaacagaaaccttttatttttatttctgactcttattttttaaaaaatttgcgcctcggtatctggcttccctggaagctctccgagctctggtgctttagttaggttattttttagaaatgtgaagaggtctgattggctgcttaaactggaaagggactgtgattggctggttaatgggaaacgtttttttctttgattggctgcaggtgttctgctgatatcaacggcttccctattttgaatgcagaaaacagggtctgggacattagtcgttatatttgacttgaaaagaaaccaagtgcgct

SEQ ID NO: 1048 - DNA, 685 bp, Macaca Fascicularis
acaaaaaaattaagagattttatgtttaaaatggcatttagcacagtatttaacattcttggtcacaaagctatttaagtggactgtatttcagctatgtctcatgttttatatgattaaattatcattgtttgtcctttatgtattctattctacaatataacacattgaaactgtatttacttgttatgttgtaatattttgctgctgaatttggggctacttatattctgcagaaaattaattaaaatgcctattcaagaagatagtagtaaagatattgtatctcctttaatatactccttaaaaatgtatgttggtttagcgttgttttgtggataagaaaaatgcttgaccctgaaatattttctactttaaattgtggacgaagaccctatctcccacaaataagttcccatttccttgcctaaagattttttttaagtgttctgtggctgatttactaacagtaactgccattttgtgtctgtgataacagagtgatttgtaaaacagtggttgttttttcattgtgttttcttcgtggattgttttttctgcgggtcatattcatgccttctgatgaagttgtaccaacaccagcaacattataatggccctgtagctctgaacgctatttgtgtaactgaaaggttgcactctagggagaaccaagctaaaagcc

SEQ ID NO: 1049 - DNA, 777 bp, Macaca Fascicularis
  misc_feature (1)...(777): n = A,T,C or G
ctaaatcctatgagacttgaaccaagtggcttcctctttctaggcttaggannnnnnnnnnnnnnnnnnnntgatcaccgaaggccttgcctgctctgacattctgtgacattaaatgtctattctcctgttacctgtggcctgggacaccagtggggtttatcaaggggaccagaggggcctcaagctttcagatgaaatggctcctcctacccacccactttattcctccccatgtaactcaggacaagctgcaacttcccccagcttaacacaatgcccatacctcacacgatatgcaccctccccttccattcctggccccctcaaacgagacttctcnnnnnnnnnnnnnnnnnnggtcaaacctggcttccnnnnnnnnnnnnnnnnnnnnnnnnnnnnnnnnagatctgggtccagagttggccacttgtgtgggttctcacaagcaaagagagcactaaacttgacattgggggtccaccactccaactttgctttctgaaggttttggtgtacactgagccccagaaggaaaggagagtatctgtgaatgggggcctcccttgacccnnnnnnnnnnnnnnnnccctgaatccccagagtagcccttccctggtgcccaactggcctggggacaaacagcgtccactacatctaggactgccggctaagtggacacacttcttgacctcctaccaggaannnnnnnnnnnnnnnnnnntggggaaggggttgggtgtaaatatgagagggggaaggagaccagcgtag

SEQ ID NO: 1050 - DNA, 690 bp, Macaca Fascicularis
  misc_feature (1)...(690): n = A,T,C or G
agaacttgtatggtagactgtccnnnnnacatcatgatgcatnctcctgtgctaannntaaaagctttctgtaactagattttttcctcattatgctcccaggagcgagtttgttttttcccccagtttcatttccaccaggtagctctactttaggccatactgggcccctgctgttgaataaatggatgcctctatgttggtgttggcaactgtnnnnnnnnnnnnnnnnnnnnnnnnnnnnnnnnnnnnnnnttacttggcatgccaagctttcccaaagagattcatctctttttcttgttctgtactatacaatgaaatgtttttacctaatttttcatatttatttaaataaaaactgactgggtagtagtggggaagtttaattgtccacgtaagtcaaaagaatccatttttgaactagagctattttcaattataagaattagttggctgggcccggtggctcatgcctgaaatcccagcactttaggaggccaagatgggaggatcacgaagtcaggagttggagaccagcctggccaacatggttaaaccccatctctactaaaaatacaaaattagaagggtgtggtggcttgcgcctataatcccagccactcgggagggtgaggcagagttgcgtgaatctgggaggtggaggttgcagtgggctgagancgtgcc

SEQ ID NO: 1051 - DNA, 1824 bp, Macaca Fascicularis
  misc_feature (1)...(1824): n = A,T,C or G
ctgtgggaggtgcccacagcaatgcagccaggccctggttctgtgtgcccttgggtgtcatttcatctccttgagccaagtgttcccatctgccaaatgacaagaatgctagcctgcttcgaagagggtggtgcccagctctcaggcagggagcaccctggggacacacacatctctgtatcctcggctcagaagccaccatcagagctaatgtttgttggcacctccacacccttggcatggattagcttcatcttcaccgctgaggaaactgaagcaacttggaggttaagaaactcaccaagggtcttgctttcatccccctgccgtgctcccagtgagtgtgtggcccaagaaaacatgcagagcgatatggttcaaaaacactacagataaatcaagatggaaccctaaaacatgttcaaataaccttcaagaaagtaggaaaagagaaacaggaaacaaacagaacatgagtaataaaatgataaaatggcagcccagtctgtctgcagggcatcgttcctagcacctgaatgtgttgggtgggtaggaggaggcaggtatgtgctactaccagtctggagcagtgtggacagtggagggagtgactgggagaagcaggctgcaggcagggtctgagtctgaaaggctcccagacaagggcaagagctcacataggaaaggagcagtaagggggcatgcttttttcaggaggctttgcaaagtctggcctggtcaggtagagcattttgaaaggtctgaatgaacctctgatgtttatgtattgagcacctatggtcggttagtgagagtctactgagcacctgggagggaggcgtcagacaggattccagtcccgtgggcctgctgtgacactgccaaggggatagtgttcagcgtcaaatccccacccactctacctgggggcagagccaggctggggccatggggctagctatgtgaccttaagcaagtgccttcctcttgctctttggcccaaagttgcctagtctataaaatgcagctatgatggcacccagcaggtcctgggcatggcctgccctgtatggcctaatgccctacctgctgagctgggtgccctcagggcacagaccctgtctttggtctcttgctaacctggagctgccattacatctccccttcatcctgtagctctttctcatgctgctattccacagcagtgtcgggctggtgatcaggcatgccagggccctggtgggaagggatgggaatgcacattttggctgctagctggcctgtctgcccagtgcccccatggctgccacttacatctggcttatcacatagggagtgttttgacagagtttggattcagactcaggctaaatcctagctcctccccttctgagctgtgtaacctggggcaagtcatttccctctctgagcctatctccctgtctatcaaatgggcacaaccagcatggacaaggtggtgttgagaggattctgtgtggtccttgaaagatatttgtaggccgggcgcggtggctcaagcctgtaatcccagcactttgggagtccgagacgggtggatcacgaggtcagnnnnnnnnnnnnnnnnnnnnnnnnnnnnnnnnnnnnnnnnnnnnnnnnnnnnnnnnnnnnnnnnnnnnnnnnnnnnnnnnnnnnnnnnnnnnnnnnnnnnnnnnnnnnnnnnnnnnnnnnnnnnnnnnnnnnnnnnnnnnnnnnnnnnnnnnnnnnnnnnnnnnnnnnnnnnnnnnnnnnnnnnnnnnnnnnnnnnnnnnnnnnnnnnnnnncaaaaaaaaaaaaaaaaaaaaa

SEQ ID NO: 1052 - DNA, 743 bp, Macaca Fascicularis
  misc_feature (1)...(743): n = A,T,C or G
agtggcacgatctcagcccactgcaacctctgcctccagggttcaagcgattctcctgcctcagcctcccaagtagctgggtttacaggagcannnnnnnnnnnnnnnnnnnnnnnnnnnnnnnnnnnnnnnnnnnnnnnnnnnnnnnnnnnnnnnnnnnnnnnnnnnnnnnnnnnnnnnnnnnnnnnnnnnnnnnnnnnnnnnnnnnnnnnnnnnnnnnnnnnnnnnnnnnnnntgtgcccagcctcttcctccttctggagccctgagagagcaggcaatgaggagcggaccccactgtggagtccatccttcccccaccnnnnnnnnnnnnnnnnnnnnnnnnnnnttggaccaggggacnnnnnnnnnnnnnnntaagtgccggccggagcaatgctgcctgtctgtgtcttggcagcctgggtgccttggcgagggggtaacggcctgtcctcacgcccccccactttgagcttcggtgaccagagaggggtggagaaggggacttccgcagcctgcctggagctccctcagcctctcaggtgccttccacacagggtcctgggtacaggagaccccagacctgctcagtacttagcagaggtatcaaccccacatccttctggggagctccgcaagacacccattgcttcttctgatcctcactgcccgttatagaaatggagaacctgcgttcagnnngcagtggtggccggctctgggtcccatggccaggtggc

SEQ ID NO: 1053 - DNA, 717 bp, Macaca Fascicularis
  misc_feature (1)...(717): n = A,T,C or G
ccgggacaaaggactctcnnntccgctgcgctgtcnggggcnnnnnnncgctttaggggggaagtcattacagtctcatggcctctaccgaggtcccagttcacacaatctcctgggccttannnnnnnnnacactgggggaatcaacccctgggggactcagtatcttctccgtgcaacctggaaagttcatctcttctttccttcggtcaaagaaagtccattgtacataacaaaacagccccgaacagcccagtgccgacaccgttgttcctttcacattttcctttgttgcatnnnnnnnnnnnnnnnnnncannnnnnnnnnnnnnnnnnnnnnnnnnnnnnnnnnnnnnnnnnggtcactgtgtgactgcctttatggtttctctccatgtgctatacgagtgaagaatgcatnnnnnnnnnnnnnnnggtatttttacgtgttttnnnnnnnnnnnnnnnnnnnnnctgacacctgtgcttcagcatttnnnnnnnnnnnnnnnttattcttttaagtgtatgattacggatactttttcgtttgtttgtttaaccaagttgtgtttaatttatgtgcaatctttataatatatgtgttattacagtttcaactatcatattttctttaattacatttataatttgatcttgctctgattataatgccagtgaatgttgctgaattctttgtatatgcaaattgcaagat

SEQ ID NO: 1054 - DNA, 1023 bp, Macaca Fascicularis
atgaatccatttcactcatcttgttggaacacctctgccgaactttcaaacaaatcctggaataaagagtttgcttatcaaactgccagtgctgtagatacagtcatcctcccttccatgattgggattatctgttcaacagggctggttggcaacatcctcattgtattcactataataaggtccagaaaaaaaacagtccctgacatctatatctgcaacctggctgtggctgatttggtccacatcattggaatgccttttcttattcaccagtgggcccgagggggagagtgggtatttggggggcctctctgcaccatcatcacatccctggatacttgtaaccaatttgcctgtagtgccatcatgactgtaatgagtgtggacaggtactttgccctcgtccaaccatttcgactgacaagttggagaacaaggtacaagaccatccggatcaatttgggcctttgggcagcttcctttatcctggcattgcctgtctggatctactcgaaggtcatcaaatttaaagacggtgtcgagagttgtgcttttgatttgacatcccctgacgatgtactctggtatacactttatttgacaataacaactttctttttccctctacccttgattttggtgtgctatattttaattttatgctatacttgggagatgtatcaacagaataaggatgccagatgttgcaatcccagcgtaccaaaacagagagtgatgaagttgacaaagatggtgctggtgctggtggcagtctttatcctaagtgctgccccttatcatgtgatacaactggtgaacttacagatggaacagcccacactggccttctatgtgggttattacctctccatctgtctcagctatgccagcagcagcattaacccttttctctacatcctgctgagtggaaatttccagaaacgtctgcctcaaatccaaaggagagtgactgacaaggaaatcaaaaatatgggaaacactctgaaatcacacttttag

SEQ ID NO: 1055 - DNA, 759 bp, Macaca Fascicularis
  misc_feature (1)...(759): n = A,T,C or G
tttatctcatcttctcgcaaaattctnnnnnnnnnnnnnnngtgaagagattttgctaagttannnnnnnnnnnnnagcttttcttaaaagaagtcctgggaagnnnnnnnnnnnnnnnnnnnnnnnnntgtgatggtgagcaagtttcttgacctctctgaacctgtctcctcatctgcaaaacaggcactctagttaaactgcctctgagcgggggctcagatacttggcacacnnnnnnnnnnnnnnaactgtccccatccctctcttcaacaaaagccatgtgtgaagtgtgacttgtcatttttccctaattgttcaaagtggatgttagtgacatctgtcacaacaaannnnnnnnnnnnnnnnnnnnnnnaaaaataagtatgtctggccgggcacannnnnnnnnnnnnnnnnnnnnnnnnnnnnnnnnnnnnnnnntcaagagttcaagacgaggctgaggtcagcctggccaacatggtgaaacctcatctctactaaaaatacaaaaaattagctgggcgtggtggcaggtgcctgtaatcccaacnnnnnnnnnnnnnnnnnnnnnnnnnnnnnnnnnncctaggaggcggaggctgcagtgagctganatngctccattgtactccagcctgggcaacaaagagcaaaactccatctgaaaaaataaataaaataaaaataagtatgtcttttaaatatttcctttcacaagcaaaaatactcctcccantagtatcagttttgtg

SEQ ID NO: 1056 - DNA, 706 bp, Macaca Fascicularis
  misc_feature (1)...(706): n = A,T,C or G
tgtattcatttgcttgatgaatactttcccctgnnttcttttaatcagcttctgcaaaaagacgtcatcagtgagctgctnnnnnnnnnnnnnatgaagaagaatgttcacaagnnnnnnnnnnnnnnnnnnnnnnnnnnncttgatgatactgtttgtctcaaggacatagccttgtcactcccacagcttccgcgggagctgccaccgtcacatccaaatgccaaggtggcagaggtgctgagcagccttctgggaggtgaaggatacttctcaaaagatgtgcacttgccacacagttatcatattgattttgaaatcagaatggacactaacaggaatcaagtgcttccattttctgatgtggatacagcttctgctacagatattcaaagagtagctgtgctatgtgtttctagatctgcttattgtttgggttcaagccatcccagaggattccttgctatgaannnnnnnnnnnnnnntgcaatgggttttcatgtgatcttggtcaataactgggagatggacaaactagagatggaagatgcaatcacatttttgaagactaaaatctattcagtagaagctcttcctgttgctgctgtaaatttgcaaagcacataatcaagtgaaaatcaacctttcatattaggagacatgcatttgtaaaaataataaagacgacaattcagttgtcagtggt

SEQ ID NO: 1057 - DNA, 2517 bp, Macaca Fascicularis
gtgtgatgtgctttcatttactagtattgctgtggctgagtacaatcaaattgaaccaccaacccttggttttgtagtaatataactatttattttcctagtgtagatgctttcagattagaattggcatttgcactgattttttatgtagatttatataattatatagatacatatatatttgcttgaagaatcaccaagcaatttggtgagagggtcttttcctatagaatttacacctccatttgttgtgttgtcttgcacttcccaatgttgatgtctctatggctccaatgaactggtgtattttgcagcaaatctgatgacttgtatggaaatggcatgaaagttacccagattacatctggtgcaaatgcactcggagcctggggccagactggtgctaacactgcaaactttgtccagagctctctccaacctgaaggcttgctgggggtgcaacgtcaccttcacacatgctgggccctttcagaaaagtgccagatcgtgtaactggtgctatttttcatgctctggtacaatgtgtagcaccacggggctctcagctttaccaaaatcaaaattccatttgtcagctaagtgcagaggcattcattttttgctctcctcccacagaattgttggccatttatttgcaggccttttgcgggatttcttggccgtttatttgcaggccttttctcccagccccaaattcttgggttggctctgtctgcttaaagagcctgtcttcacaaagccgcactcgggtgcctctgtgcgctgtcttagatcctactgccagcccttcaggactccgagccaggaaagaactctccaacctctggctcgagactctggttttttttcctcattcttttccttgctctcctccttcttctatttctgactaattccatctctctctctcttttgttttttttttttttttgttcctctccttttcctattcttccttcccaccatctctgagttgttgactttctcctataatccttctctattccttttctctttttgtccacctctccttcagtctctgttcctttgcccttcttattcctcttctgtcctttctcctctcctcgcatctctgatcatcttctcccgcacatccctgtattgatttttctgtcctctaaagggctcatggctgattcagacagcaagtccgtgcactggactaatgacacaaatactttaggtcgccgtttcacctactcagcccagaaagcaaagctgagcgtgaggccctgacctggagcctgctccagcccgcctcccggatccagcctgcaccgttgccctggcagcgatgatgcatgtgctgtgggccctgccggcgcctgagtgcctctgcctgaacgctgctcctaagcgagcccactcccagcactaccgcatggctctgaggacacttcctttcaataaaggcagactctggccccaattattctgacagcaaacctcttcctcctcattgaagccatgccatcaccttggtttggagagagacatttttttcccattcataagctttctttttcccattttcatgtgaagccccttctgcttttcagctggtgattgctctggtgagactgaatggacttgctggtgaaatgaaatctcttctttcctgtcttggtcctgcctaaattcctacaaatatatttaagtcaaggactcaggctaattcctaagttgatcacattaatttgtcactcctagggggaaaaagatcaattcccttgaagcatgtggagtacctcctgtgacagctgacttgccaggggactccctacagaattctgtgatatacattttacttctgtgtatgtatggtatatatggtatgtataccatgtacacacatgttacattgagtatgaatgactgtggttggaaacccacacacacactcaagtctgtaaatatccttcctcactgaaacctgtgctttggaaatcatttcttgtacagctgtgcagtttcttgtaacagctgaggacaaagctaaggcaggcggacaatttagacaaagatcatctaaagagtacagtatctccctagcaactcatgaggacagacaaccaagtgacaaggttgactcccaatgggatggcagacttttcttctctcctttttgagtttgtgtttcctaagtgtttcttaacttctgagtgcaccaggctgtacccgttagatcctttcaatatgacagttttgtgcttctctctgacaggatgtttctccatcgagctgtagtgcaggatgggagggaggtgggaatactccttgcctgggctggagtttacagagacactgcacagcttacactcctgttaagtgtaaatattcaacacttccattccatttgtgtaaaaaataaagcacacacgattataaaatcaagatgtatatttcacaaaaaaaaaaaaaaaaaaaaaaaaaaaaaaaaaaaaaaaaaaaaaaaaaaaaaaaaaaaaaaaaaaa

SEQ ID NO: 1058 - DNA, 652 bp, Macaca Fascicularis
  misc_feature (1)...(652): n = A,T,C or G
gagtgaagaggaaannnnctgatgttcccaagtggatcagcatcatgactgagcggagcgtgccccannnccagaaagtatnnnnnnnnnnnnnnnnnnnnnnnnnnnnnnnnnnnnnnnnnnnnnnnnnnnnnnnnnnnnnnnnnnnnnnnnnnnnnnnnnnnnnnnnnnnnnnnnnnnnnnnncagaacaaacccnnnnnnnnnnnnnnnnnnnnnnnnnnnnnnnnnnnnnnnnnnnnnnnnnnnnnnnnnnnnnnnnnnnnnnnnnnnnnnnnnnnnnnnnnnnnnnnnnnnnnnnnnnttaggtctgaattcaagagaaagtacggcaagtccctgtactattacatccagcaagacnnnnnnnnnnnnnnnnnnnnnnnnnnnnnnnnnnnnnnnnnnngagacgactgaagcccgacacannnnnnnnnnnnnnnnnnnnnnnnnnnnnnnnnnnnnnnnnnnnnnnntagaaaannnnnnnnnnnnnnnnnnnnnnnnnnnnnnnnnnnnnnnnnnnnnnnnnnnnnnnnnnnnagttgccnnnnnnnnnnnnnnnnntcctgtctagtctctcctgtaagccaaagaaatgaacattccaaggannnnnnnnnnnnnnnnnnnnnnnnnnnnnnnnttgcctc

SEQ ID NO: 1059 - DNA, 758 bp, Macaca Fascicularis
  misc_feature (1)...(758): n = A,T,C or G
gctggaggacgtgctcnnnnnnnnnnnnnnnnnnnnnnnnnnnncgccggtgccgcggctgtccggggagatgtacgggcgcgccaccgcctggaacatgttggacgcccacctctaccnnnnnnnnnnnnnnnnnnnnnnnnnnnnnnnnnnnnnnnnnnnnnnnnnnnnnnnnnnncgcgaggtggcagccctgcgccatgccaacgagcgcatgcggaccatctgcatcgacgggggccacgccgtggacgccgccgccatccaggacgaggccnnnnnnnnnnnnnnnnnnnnnnnnnnnnnnnnnnnnnnnnnnnnnnnnnnnnnnaagagcatcgggcagcggcacgcgcagctctgccggcgcatgctcacgcccgaaatccagnnnnnnnnnnnnnnnnnngccaacctgtgggtcaccaagctctggaagttcattcgcgatttcctgnnnnnnnnnnnnnnnnnnnnnnnnnnnnnnncctgcctgcttgctccctacggaggggctgagcaggacgccgctggtgctggccgcccccagccccctcctggtgccacctcggaccccggggtgaggggggtgcttcctggggggacgcagccagccaagactgggcccacgcacacagagagggcctaacnnnnnnnnnnnnttaactaattataccggtttttattaaacccctttccctccccgaaaaagaatgttctatttctgcctcnnnnnnnnnnnnnnnnnncagaagaaa

SEQ ID NO: 1060 - DNA, 691 bp, Macaca Fascicularis
  misc_feature (1)...(691): n = A,T,C or G
aactggcaattgtctatcttttatttttttaagtcagtatggtcgaacactggcatgttcaaagccacattatttctagtccaaaattacaagtaatcaagggtcattatgggttaggcattaatgtttctatctgatttnnnnnnnnnncttcaaattaaaacagctgcattagaaaaagaggcgcttctcccctcccctacacctaaaggtgtatttaaactatcttgtgtgattaacttatttagagatgctgtaatttaaaataggtagcttcannnnnnnnnnnnnnnnnnnnnnttgtctaactcagaattatttttaannnnnnnnnnnnnnnnnnnnnaaaacaaaattttattttatgctcaattaagtttcaaacttactattttgacagttattttgataacaatggcactagaaaactttactccctttcatcattaatttctgcatgaatatcatacaaatcagttagtttttaggtcaagggcttactatttctgggtcttttgcttctaagttcacattagaattagtgccagaattttaggaacttcagagatcgtgtactgagatttcttaaataatgcttcagatattattgctttattgcttttttgtattggttaaaactatacatttaaaattgctatgttactattttctacaattaatagtttgtcta

SEQ ID NO: 1061 - DNA, 718 bp, Macaca Fascicularis
  misc_feature (1)...(718): n = A,T,C or G
gagccccaccccacatctgaagcagcacccattgtggtgggccatgcccgcctgtcacgggtgctgaaccagccccagagnnncttagtggagacagtggtggtggcccgggcgctgaggggccgtggctttggccgctgcctcatggagggcctggaggtctttgctcgggccnnnnnnnnnnnnnnnnnnnacctcaccacccatgaccaggtgcacttctnnnnnnnnnnnnnnnnnnnnntgggcaagcctgtgcagggcctggtcttcaccagcagacggctgcctgccaccctgcttaatgccttccccacaggcccctctccccggccaccctggaaggccccaaacctgactgcccaagctgccccaaggggtcccaagggacttccattgccaccaccccctcctctacctgagtgcctgaccacctcacccccagttccatcagggcccccttcaaaaagcctgctggagacacaatatcaaaatgtgagnnnnnnnnnnnnnnnnnnnnnnnnnnnagacatctgaggccatccagggcaaggaactgtctttctgggtcaatagactgccctggacagtctacaagcctcagcccactgaccatacctcagccccctagcccctggggggcagctttagtctgggcatgtttcctgggtacnnnnnnnnnnnnnnnnnnnnnnnnnnnnnnnnnnnnnnntgtggc

SEQ ID NO: 1062 - DNA, 684 bp, Macaca Fascicularis
  misc_feature (1)...(684): n = A,T,C or G
gttcannnnnnnnnnnnnnnnnngnnnnctgagtagctgggattacaggcacccaccaccacgcccggctagtttttgtatttttagtacagnnnnnnnnnnnnnnnnnnnnnnnnnnnnnnnnnnnnnnnntgacctcaagtgatccacctacctnnnnnnnnnnnnnnnnnnnnnnnnnnnncgtgagccactgtgctcggcctaatacaactttatctgtgggtcagatcctttcatattggttaaccgatgaccctaactcaaannnnnnnnnnnnnnnnnnnnnttgagggaagcttgtgaagttccagtgaatcttctttttcacttcnnnnnnnnnnnnnnnnnnntaaccaaactaaatacnnnnnnnnnnnnnnnggacaggacaagacagccttaaaaaattgaatatagctggtgagacaactcctaagtacaggttgagcatcccttatccaaaatgcttgggaagtgttttgggttccggaatatttgcnnnnnnnnnnnnnnnnnnnnnnnnnnnnnnnnnnnnatccagagtgctcctgtgagcatttgccttgagtgtcacannntgtgttgnnnnnnnnnnnnnnnnnnnnnnnnnnnnnnnnnnnnnnnnagatttaggatgctccatctatatcaagntgttgcaagaactagaaaggaagaaga

SEQ ID NO: 1063 - DNA, 2165 bp, Macaca Fascicularis
  misc_feature (1)...(2165): n = A,T,C or G
aagagaacttatgcacgaaagaggcttttgtgaggctttgatgaacttgtattcctgagaaagatgcaagaattacctgaatatgcaagagctggcttacccttctttcccctaactgaaattcatgttcttaggttgagagtaactcactgattcagttgttgattttgaagcttgaatcatgtggatgtttattttcactgcaaatgactatttcaaaatgaaggaatgagtgtttttaccctagtatctttaaaatgattttaaaaatacatatatttgttgaactaaagtttttttaacttacattttattttccaacatgttatagtgatctcaataagatctaggattgggacactgactttcagtccaacttatgatttatcttataattggtgcccatattcatgcaagtgggaactaaatatacaatattacccatagtcagacaaaatgtagatttagacagagcctggcttacaggtagaagaattggatgaggaattgtgaggggcatttggtgttcaactcacaggtagagtacagtggatgtgtttaataccataaaaacaactggtcagcttggtcagctctaaggacagaattaaaggcagagtggcatggatgactcattctaaggggaagcctagtaaagggctctttcacctattgtgtgacacaaccttctttgtcagtttgatgaagacattccaagaataattacttaatgcataaattaaaatccagaatttagacttccatttatggtaagataaggtagagtgcttttccctctttttcccactaagtttaactgaaaaccttggacattacatgtacaacaaacagaatactctgaaagttgtagagaggagggcagataggttagtaaccttatgactgatatggtgatgagttcccagggtttgtttgtgtgttgtatcgttcatctcacacttgtaggtgaagaagccaacaacttaaaaatattaacgggtggccaggcatgatggctcacacctgtaatcccagcattttgggtggctaaggcgggcagatcacccgaggtcggnnnnnnnnnnnnnnnnnnnnnnnnnnnnnnnnnnnnnnnnnnnnnnnnnnnnnnnnnnnnnnnnnnnnnnnnnnnnnnnnnnnnnnnnnnnnnnnnnnnnnnnnnnnnnnnnnnnnnnnnnnnnnnnnnnnnnnnnnnnnnnnnnnnnnnnnnnnnnnnnnnnnnnnnnnnnnnnnnnnnnnnnnnnnnnnnnnnnnnnnnnnnaccctcaaaacaaacaaaacaaataaaacaccaacaggtacagaggaaaacaaaacaaacagtagcagcaccagcaacaaaaaaacaagtctctgcaaaagtcagctctctctgaccaacataccaggaaaggagcagaccataaaacagaaaggttttagccaataattattctagttcagccaaacaccacagaaaatactgtggcccagtcttcaccctggccagaaaagactgatgggagtagaaggcctaaacttccactctcactaggcaataatgaagtgcctcaacctaccctgttgggtaggtggagtaaggagactggacctccgcctatgcctggcagtaataaggtgtccctgcttctctccactagggttgtgtcccccatagtagagagtcagaactctcaaccatcacccagcagtaacaagaccactccactgtcagtggaaacaagaggaacagcagggaggcactcctagcccttccagacagaggattatcaattggaacagccaaccctatccagcaataacagagccattcctttctcagtgacattggagactcaatggataacctagatttttacccttacctgacagtaatgaggccccctccttgcttccatgctgaagcactgtcagaagaagccagctaaaatataaaccccaaaatgtatatgttccagtcaatctttatacagagatccaaagaaatctcaactggaattttaaaaaaatcaataaacatcaatagtgagatgacagagatgttaaattatttgacataatttttaaacaaccactataaaaatgcttcagtaagcaattactaacacacttgaaacaaatggaaaaaaaaaaaaaaaaaaaaaaaa

SEQ ID NO: 1064 - DNA, 3098 bp, Macaca Fascicularis
gtttcctcggcagcggtaggcgagagcactcggagcagcgcgcgcgggggcccccggagacggcggcggtggcgcgggcagagcaaggacgcggcggatcccactcgcacagcagcgcactcggtgccccgcgcagggtcgcgatgctgcccggtttggcactgctcctgctggccgcctggacggctcgggcgctggaggtacctactgatggcaatgctggcctgctggctgaaccccagatcgccatgttctgtggcagactgaacatgcacatgaatgtccagaatgggaagtgggattcagatccatcagggaccaaaacctgcattgataccaaggaaggcatcctgcagtattgccaagaagtctaccctgaactgcagatcaccaatgtggtagaagccaaccaaccagtgaccatccagaactggtgcaagaggggccgcaagcagtgcaagacccatccccactttgtgattccctaccgctgtttagttggtgagtttgtaagcgatgcccttctcgttcctgacaagtgcaaattcttacaccaggagaggatggatgtttgcgaaactcatcttcactggcacaccgtcgccaaagagacgtgcagtgagaagagcaccaacttgcatgactacggcatgttgctgccctgtggaatcgataagttccgaggggtagagtttgtgtgttgcccactggctgaggaaagtgacaatgtggattctgctgatgcggaggaggatgactcggatgtctggtggggcggagcagacacagactatgcagacgggagtgaagacaaagtagtagaagtagcagaggaggaagaagtggccgaggtggaagaagaagaagccgatgatgacgaggacgatgaggatggtgatgaggtagaggaagaggctgaggaaccctacgaagaagccacagagagaaccaccagcatcgccaccaccaccaccaccaccacggagtctgtggaagaggtggttcgagttcctacaacagcagccagtacccctgatgccgttgacaagtaccttgagacacctggggatgagaatgaacacgcccatttccagaaagccaaagagagacttgaggccaagcaccgagagagaatgtcccaggtcatgagagaatgggaagaggcagaacgtcaggcaaagaacttgcctaaagctgataagaaggcagttatccagcatttccaggagaaagtggaatctttggaacaggaagcagccaacgagagacagcagctggtggagacacacatggccagagtggaagccatgctcaatgaccgccgccgcctggccctggagaactacatcactgctctgcaggccgttcctcctcggcctcgtcacgtgttcaatatgctgaagaagtacgtccgcgcagaacagaaggacagacagcacaccctgaagcatttcgagcatgtacgcatggtggatcccaagaaagctgctcagatccggtcccaggttatgacacacctccgtgtgatttacgagcgcatgaatcagtccctctccctgctctacaacgtgcctgcagtggccgaggagattcaggatgaagttgatgagctgcttcagaaagagcaaaactattcagatgacgtcttggccaacatgattagtgaaccaaggatcagttacggaaacgatgctctcatgccgtctttgaccgaaacgaaaactaccgtggagcttcttcccgtgaatggagagttcagcctggacgatctccagccgtggcattctttcggggctgactctgtgccagccaacacagaaaacgaagttgagcctgttgatgcccgccctgctgccgaccgaggactgaccactcgaccaggttctgggttgacaaatatcaagacagaggagatctctgaagtgaagatggatgcagaattccgacatgactcaggttatgaagttcatcatcaaaaattggtgttctttgccgaagatgtgggttcaaacaaaggtgcaatcattggtctcatggtgggcggtgttgtcatagcaacagtgatcgtcatcaccttggtgatgctgaagaagaaacagtacacgtccattcatcatggtgtggtggaggttgacgccgctgtcaccccagaggagcgccacctgtccaagatgcagcagaacggctatgaaaatccaacctacaagttctttgagcagatgcagaactagacccccgccacagcagcctctgaagttggacagcaaaaccattgcttcactacccatcggtgtccatttatagaatactgtcggaagaaacaaacccctctgttttatgatttactcattatcgccttttgacagctgtgctgtaacacaagtagatgcctgaacttgaattaatccacaaatcagtaatgtattctctctctctttacattttggtctctacactacattattaatgggttttgtgtactgtaaagaatttagccgtatcaaactagtgcatgaatagattctctcctgattatttatcacatagccccttagccagttgtatattattcttgtggtttgtgacccaattaagtcctactttacatatgctttaagaatcgatgggggatgcttcatgtgaacgtgggagtttagctgcttctcttgcctaagtattcctttcctgatcactatgcattttaaagttaaacatttttaagtacttcagatgctttagagagattttttttccacgattgcattttactgtacagattgctgcttctgctatatttgtgatataggaattaagaggatacacgtttgtttctttgtgcctgttttatgtgcacacattaggcattgagacttcgagcttttttttttgtccacgtatctttgggtctttgataaagaaaagaatccctgttcattgtaagcacttttacggggtgggtggggaggggtgctctgctggtcttaaattaccaagaattctccaaaaaaatttctgcaggatgattgtacagaatcattgcttatgacatgatcgctttctacactgtattacataaataaattaaataaaataaaaaa

SEQ ID NO: 1065 - DNA, 105 bp, Macaca Fascicularis
ggtgagcacaagtgcaactgccattctctcaactaacaaacatttacctcactaaacgccccctacaccaacccataataatccttctcacacaacccgaaagaa

SEQ ID NO: 1066 - DNA, 648 bp, Macaca Fascicularis
  misc_feature (1)...(648): n = A,T,C or G
acacaaagtcannnnntaaacatcattagcnnnnnnnnnnnnnntncaaggcctcccctcactcntgaaacacttatnnnnnnnnnnnnnnnnnnnnnnnnaatacatctgagcttttttcctgcagggccatgaagtccccttaggttcccatatctgagatggtggtctgaccctctccccttatgtacagnnnnnnnnnnnnnnnnnnngagnnnnnnnnnnnnnnnnnnnnnagtgttaggaggttgctgaatgacaaactgttcctaagaccccatctcaggctggccagagggccagcctcctcattcctgcttgttcttagaaaatctttcactgatttttgtcactggagtaacttcaaggttattatgctttcattccaagtggatctatcctcagctgtggaccaaattccccttacttcattttggcaaacattaagtcaagtcaaatagtcaaatgcctgtcactacatagagcctatcacctggnnnnnnnnnnaacagactgagtttcnnnnnnnnnnnnnnnnnnnnatggaacagnnnnnnnnnnnnnnngtgacactgccttaaaccctttttgggataaagccaaatgtaaatgaaaacattaaacagataaattgcggcgttgagactt

SEQ ID NO: 1067 - DNA, 746 bp, Macaca Fascicularis
  misc_feature (1)...(746): n = A,T,C or G
ggcctggacnntncgtggtggactgtnntcagccagcctggacctgtnntatgcctcaagaccagcgaaaagtcgcggagagcccacagtgcgggctcaagggcggggctgggctcgaagcagggtcggcttggcacctcttcaaggcctctcccagcttcctggctcttcctaggctgcccgcctgcatccctcctccaggggaaggaggcctcttatctgggcttatctnnnnnnnnnnnnnnnncttctctgctttgtttttgctgcagcctcaggcaaacagatggggtggggaggccagggaaataggctccggagtagggccctcctccctcagggtcagtgcagtggccccagacttcctcacttctgctgtggggccctgccctatcccctagttctgctcactccagtgtattccgtatccaggctcctcagcagccaactcccatcttcctgactagctggtgtccactgaaggacaccagctaaattgctaactcctgggtgtgacattccagcccctcggaagcctggcctctactgctcccctgtccttccatgggtccactcctccctgcgccgggagggatgaccctcaccctcaccttcaggtagcggctctagccgcctcctccctgaagccctctgactgccctgccgacttcgggccctcgggagcttccgagaacagggccgtcgcgcaacggatctctgtgcccagcacgaagcaccgggccggg

SEQ ID NO: 1068 - DNA, 3244 bp, Macaca Fascicularis
ggcgctgggtgacgaccgggagggcggggcccgtctggggcgccggcgggtgcgtttgaatctggtccgagcgcgggaaacggcaggtccccgagcccaggaatggcctttagaaagggagcatcttcagaatctgcagctgggatcagattgttcttttgttgaaccaactcgatctgccgagccagcatcttgctaagggttgcaaaataaatgccatttgaacagttccatctgtcatggaaaaacgtgagacatttgtacaagccgtatctaaggagctggttggagagtttttgcaatttgttcaacttgataaagaggcctctgatcctttcagcctaaatgaattactagatgaattatcaaggaaacagaaagaagaattatggcaaaggctgaagaatttattgacagatgtgttgttagaaagcccggtggatgggtggcaggtagtggaagcccagggtgaagataatatggaaacagaacatggctcaaaaatgagaaaaagcatagacataatttatgcaattacatctgtggttcttgcttctgtatctgtaataaatgaaagtgaaaactacgaagctctactggagtgtgtcattatattaaatggtattttatatgcattacctgagtctgaacgaaaactacagagttctattcaggatttgtgtgttacctggtgggagaaaggcctgcctgccaaggaagacacaggaaagacagcctttgtcatgttgcttaggaggagtctggagactaagacaggtgcagacatatgtcggctttggcgtatccatcaagctttatattgctttgattatgatttggaggaaagtggagaaattaaagatatgttacttgagtgcttcataagtattaattatatcaagaaagaagagggaagaagatttcttagttctctcttcaactggaatataaactttgtcagaatgatccatgggaccattaaaaaccaattacagggattacaaaagtctttgatggtatacattgcagaaatttatttcagagcttggaaaaaggcttcagggaaaatactggagacgattgaaaatgattgcatccaggacttcatgttccatgggatacaccttccgaggaggtctccagtgcattccaaagtgcgggaggttctgagttactttcaccatcagaagaaagttcggcagggagtagaggagatgctttatagattatataaacccatcctttggggaggattaaaggccagaaactctgaagttcgatcaaatgctgcattgctgtttgttgaagcatttcctattagggatccaaaccttcacgctattgaaatggatagtgaaattcagaaacagtttgaagagctctatagccttttagaagatccttatccgatggtccgttccacagggatccttggtgtttgtaaaataacctctaagtactgggaaatgatgcccccgaccatcctgattgacctcctgaagaaggtgactggggaactggcgtttgacacgagctcagctgatgttcgttgttctgtctttaagtgtctgccaatgattttggacaacaaactgagccacccattgttagagcttgtggacaactggctgcccacagagcatgcccaggccaagagcaacacagcttctaaacgtagggtgcagatccacgacacacgcccagtcaaacctgaattggctttggtctacattgagtatctgctgactcatccaaagaatcgcgagtgcttgctctctgctcctcgaaagaaacttaatcatcttttgaaagcccttgaaacgtcaaaggcagatttggagtcacttctgcaggcaccgggtgggaagcctcgtggcttcggtgaagcggctgccctgcgagcctttggcctccactgtcggctgagcatccatcttcaacacaagttctgctcagaaggaaaagtgtatttgtccattttggaagacactggcttttggttagaaagcaaaattttatcttttattcaagatcaagaagaagactatctgaagcttcatagggtcatttatcagcaaattatccagacctacctgactgtgtgtaaagatgttgttatggtaggccttggtgaccatcagtttcagatgcaacttttacagcggagtcttggaatcatgcaaacagtgaagggatttttttatgtttcattacttcttgacattctgaaagagataactggaagttccttgattcagaaaacagattcagatgaagaagttgcaatgctgttggacacagtccagaaagtatttcagaaaatgttggaatgtattgcacggagcttcaggaagcaaccggaagaaggccttcggctgctttattctgttcagaggcctcttcatgagttcatcactgctgttcagtcttggcacacggacacccctgtgcaccggggtgtactttctactccgattgctggacctgtggttgagataagtcaccagctacggaaggtttctgacacagaagagcttactcctccagagcatctttctgatcttccaccattttcaaggtgtttaataggaataataataaagtcttcgaatgtggtcaggtcatttttggatgaattaaaggcgtgtgtggcctctgacgatattgaaggcattgtgtgcctcacggctgctgtgcatattatcctggttattaatgcaggtaaacataaaagttcaaaagtgagggaggttgcagccactgttcacagaaaactaaagacattcatggaaattactttggaagaggatagcattgaaagatttctctatgaatcatcatcaagaactctgggagaacttttgaattcataaccaagccaacatctccagacatgtaaaatagggaaaagggattccaaatgaaattcctgtgtattttcctattgtttttaatgttaataacccatataatagcaaaagggtgggattttttttttgtgggagtgtgggaaggtgaaggttatggagtagagaactcaaaacttcttcaatttttgttagtgcctgcgtaaataatatatttaatataaaggactccaggtatgaatgatgtggaaatccatgattcgaagaaaaaacacttttctagcaaacctggttgtttttaaaatgacttttatatatgtaatattgcttggaaactatgagtaataaagcaatgacaacaaaaaaaaaaaaaaaaa

SEQ ID NO: 1069 - DNA, 234 bp, Macaca Fascicularis
ttaattacagtcacaattttgtgcgacctctagcatcgtccatttccagaactttaccaaggcgatagtacaagggtcttagtttagaaaggttaatagttacaagatatgtaggctggatttctctgatgagctaggatctgaaattaaatgacagaaaattcaacttgacactaaatcccggaagccaagctcatttccccgactctgccttcgacttgcaggcctaagatg

SEQ ID NO: 1070 - DNA, 724 bp, Macaca Fascicularis
  misc_feature (1)...(724): n = A,T,C or G
gaaaaattgctactttctnnnactacttagtttgaatttgcccaggatatctctctgggcccctggctgcaacccagacaatggnnnnnnnnnnnnnnnnggagaannnnnnnnnnnnnnnnnnnnnnnnnnnnnnnnnnnnnnnnnnnnnnnnnnnnnnnnnnnnnnnctctgctgttgcttttctgctgccactatnnnnnnnnnnnnnnnnnnnnnnnnnnnnnnnnnnnnnnnnnnnnnntagcactaaggaaaagctttttccctctgggccacatgccccagtgacccagagcatggaaagggagttagccctagtctgggcccgtgactaagaagcccaatcacattccagtttctannnnnnnnnnnnnnnnnnnnnnnnnnnnnnnnnnnnnnnnnnataagtagctaggcnnnnnnnnnnnnnnnnnnnnacaaaggccctcaaggttagcctccnnnnnnnnnnnnnnnnnnnnnnnnnnnnnnnnnnnnnnaacccaagcttgtgagagggactcggaacacttgagtaacactggggaatccaacgcgctctggtcccnnnnnnnnnnnnnnnnnnnnnnnnggaaggtaacttgagagtaagctgaggggaacgtccccaagacctgtctcccnnnnnnnnnnnnnnnnnnnncctctgcgtggcccaggcttcacagcactccagaagaagctgatgccctgaggctgg

SEQ ID NO: 1071 - DNA, 626 bp, Macaca Fascicularis
tgctgagttcctgccaggccagggcagtgccgcgtcctcctgaaaccctgcagtcctgcaaggtggttttcccaacggtgaggccgcaggagaggggagatccccagctccgactcctcggagccagcacgtggggtgaacacagcagccggtcctgtgggaagtggcccccgtgacgtggctccagcacttggagaccctcagggcccctccagtggctgcgtccaaacttggatgatcctgaacagcgctttccctgggctctggtttccggccagatgggggcccaggaacagagagcctgaattgccctgcagaggggtctcgtggggatgagaagcatccgcataatggggccgctgtgcagcctttgctgaaacagccgtgcttcctgccgtcttcccacgtgactcctgatgcgggcgcttcccggcgccttcctgcccaggggccgctgtgttctccccacagcctcctcctcctcctggactctgcgtcgatggcgtgcttgcgacagctccatcttctgcgcagctgcctggggcaagacgggacagggtgcagggccagcagatatgctcctctttgagacttttgcttaggtcaggaaaggcctgaacatgtta

SEQ ID NO: 1072 - DNA, 739 bp, Macaca Fascicularis
  misc_feature (1)...(739): n = A,T,C or G
atttggccagggagttcaccacacccttgaacaggccggaaaggaagcagacaaagcggtccaagggttccacactggggtccaccaggctgggaaggaagcagagaaacttggccaaggggtcannnnnnnnnnnnnnnnnnncggaaaggaagcagacaaagcggtccaagggttccacaccggggttcacgaggctgggaaggaggcagagcagtttggccagggagttcaccatacccnnnnnnnnnnnnnnnaagaagcagacaaagcggtccaagggttccacactggggtccaccaggctgggaaggaagcagagaaacttggtcaaggggtcannnnnnnnnnnnnnnnnnnnnnaaaggaagtggagaagcttgaccaaggtgcccaccaggatnnnggccaggccgggaaggagctgcagaatgctcataatggggtcaaccaagccagcaaggaggccaaccagctgctgaatggcaaccatcaaagcggatcttccggccatcaaggaggggccacaaccacgccgttagcctctggggcctcggtcaacacgcctttcatcaaccttcccgctctgtggaggagcgtcgccaacatcatgccctaaatgggcacctgcccttgctgggagactaatgttgccgttgtcacatcagctgacatgacctggaggggctgggggtgggggacaggtttctggagtccctgaagggggttgtactgggat

SEQ ID NO: 1073 - DNA, 690 bp, Macaca Fascicularis
cagtgtctctacggtttcggggaaatcggtttcgaaaatccttacagcttggcagctcctattctaaagactttgggcggaaaccaaggggagctgggttcccgttcttgccaacgtaggcggaaggggctttcgatttagtttttctccaaccttgccaggggcgcctatgatggagaccctcagcccctagggactccatctttttgaccttgaagtctagcccaaacattcccctaaagaaacattcccctaaagaaaggcggtgagggagaatggaaggcaaaaagagggaaacaagcaaataaacttcggaatcagacaacttaaagtctcgatatgagcctcggattgtattcgaactcctgggttctagacccagctctgctactaacttgtctgaccttccctatttataaatggttgcgggtgagaggttggactaggtgaactctgagagccctgcactcggcgcggacgagggatttaggggaaagtgtgctgtattccccgcgagccttccccggcggccccgcctccccgggtgaatccccggcggccggcacagcgcaggcagcgatcctggcggctgcccgggcccggcagcttcctggaaagttacttcttgttggagccggcgataggcaaagtgtgttctgtgaaatccgcagagccgagattgactacgtt

SEQ ID NO: 1074 - DNA, 742 bp, Macaca Fascicularis
  misc_feature (1)...(742): n = A,T,C or G
cagatgttttgtaaacannnnngcaaaagacagcaccagcacagtcnttcncnannnnntctgccccgagactctccttcctaannnnnnnnnnnnnnnttagtaccgttgaagacacccagaatgaaggaaaaaagaaaaaaaagagtcaaacagcttttggtaacattggnnnnnnnnnnnnnnnnnnnattattcacttattnnnnnnnnnnnnnnnnnnnnnnnnnnnnnnnnnnnnnnnnnnnnnnnnnnnnnnnnnnnnnnnnnnnnnnnnnnnnnnnnnncaaaggaacgccagcacagagcctgcagagtaccagctcatgacnnnnnnnnnnnnnnnnnnggagcggcagaggctgagggagatgaagaaggctagccccaaaactggaccaaccctgacaaaggaactgactttttcnnnnnnnnnnnnnnnnnnnnnnnnnnnnnnaaagactaaacagattcaacagtggattaagaaagaannnnnnnnnnnnnnnactataaagaaaggaaaaaatgtagacgtgtcagaaaataaaatnnnnnnnnnnnnnnnnnnnnnnntccagactatgcctggaatgnnnnnnnnnnnnnnnnnnnnnnnnnntgttcaaggaggaaaagctttaannnnnnnnnnnnnnnnnnnnnnnnnaaaaggcatatggagaaactcaaaagacccagaaaagagacactttgaaccaagaccaannnnaaatgataa

SEQ ID NO: 1075 - DNA, 540 bp, Macaca Fascicularis
aaatactaggaagctcatcaccgaagtgtttgtcaggcagaagtacctagagcacagacgaatcccctacactgagcccgcagagtatgagttcctctggggccctcgagcgttcctggaaacgagcaagatgcttgtgctgaggtttttggccaagctccataagaaagatccacggtgctggccattccattaccctgaagcgctggcagagtgtgagtgggaagacacagatgaggatgaacccgacagcagtgacagtgacagtgcctgcggccccaccagcaggccccctccccgctaataggtgtagcagagatctcgctcctgtgtttccctggccagaggccactgacagggtggggggacacttttgtttctggtgtttgtgttccagttccacacgtgcaagtttggattttcaacttggttttgtatctgccaaagctttgtaaatttttcatgtggtgttgatttcaatcggctactgttccgttctgtattttggcatctgtatttttaagtgagatctgtggttct

SEQ ID NO: 1076 - DNA, 712 bp, Macaca Fascicularis
  misc_feature (1)...(712): n = A,T,C or G
cgcccagcagagccgcctnnncngagcctnntgcagccaggacataacttgtggtgcagctgcagacnnnnnnnnnnnnnnnnnnnnnnnnntactggggcccagagagagctgtccgccagtgcatcatttgggggtctttcattgctagtgactagccccttaaatgccagcctgagtccttgaaggaatctgggaattnnnnnnnnnnnnnnnnnnnnnnnnnnnnnnnnnnnnnnnnnnnnnnnnnnnnnnaagaaannnnnnnnnnnnnnnnnnnnnnnnnnnnnntcatctcatgactgagcaagaagactatgcaaagcnnnnnnnnnnnnnnnnnnnnnnnnnnnnnnnnnnntgtttaaatgctcagttcagaacactttgggccacatagtcattttggaaaacaggataatcgtggtgtaaatgggtgtttcctttcaaatttcnnnnnnnnnnnnnnnnnnnnnnnnnnnnnnnnnnnnnnnnatgttggtttctttttcttaatatatannnnnnnnnnnnnnnnnnnnnnnnnnnnnnnnnnnnnnnnnnnnnnnnnnnnnnnnnnnnnnnnnnnnnnnnnnttgtttaaacatgcatattgaaataacacatatagtaaggtgggaatactaaaaaataaccaagattttatatttttgtaaattcatactttctataccgtagattgtgtatgtta

SEQ ID NO: 1077 - DNA, 741 bp, Macaca Fascicularis
  misc_feature (1)...(741): n = A,T,C or G
tccccaccctagangggaaagcaacatcnnnnnnntcggaagcggaaagnnnnnnnnnnnnnnnnnctgtgcgtccctcgttagcatcgctccgacctctaagcctccccgcagnnnnnnnttgcctcttcacagctatgctttttgtcctgtccagtnnnnnnnnnnnnnnnnnnnnnnnnnnnnnnnnnnnnnnnnctgcaggagggctcccatgcttcataaatcctgcattacgattttctcctgttagtctatgttacgtccatttaattctcaggcccagccgggaccctaagaggacagaggtggagttttcccacccctacaaatttaccctgtcacaattcaatcnnnnnnnnnnnnnnnnnnnnnnnngctctgccagcatgaattcctttaggggtggaagcctcacagtccaatctaccagtgaggtccacgtgggattggctggagggnnnnnnnnnnnnnnntgacaagcggcgtcaggtccagagaaacagaaatcccacacccaagggccgggaggcggtagagcaaaccgcgcacagccgggtgacttaagggcaaggaaggcttcctgcaggaggtgaatttggcacaagggatatgtttttaggcactgagtggaggatttgggtttcacaccggacttttgaaaagcacactcctatcgtagnnnnnnnnnngggtttgttttaatcactnnnnnnnnnnncgctaggcgtttgcagctca

SEQ ID NO: 1078 - DNA, 739 bp, Macaca Fascicularis
  misc_feature (1)...(739): n = A,T,C or G
actgtacggaagggctgatgtgaagctgcggttgaaaaaggctcacatgctgctgagcctcatgcagtcaggaggnnnnnnnnnnnnnnnnggaaattatgattgcaaatggctttgcattttagatcattcgtgtgtgtggatcagggaaacacaagttccctggcacaaaggaagccctcggtagacacgtctagggcaggcttgagagatcagatggtgtgaaaggcttgtgatctgttcatctcaggctccccctaaaccaaggaaatggagccagctggatggggttccacgatccagctctactgaggggctgtgagtgtgcacagttgggacttggaagtatcaggtctccctcaggctggagtccgnnnnnnnnnnnnnnnccattgaacaaacatacggatgcttccctgctctgtgctcagccttgtgctgctgctgggcgggccaggaacctgcttcggtgtaagcgaggtggatgatattatagctgcagggtccttcctggccaccctcgtctcagcctaggtcaccaggatgtatgaggggggtgggtgcatgggacaggcatggccagtctcaggtgaggtttgggcccagactctcgtaggagtcccagatgttgacaggctgttggaaaagtgccttgttcctgtgacgcctgggagttaggtgggtcctggggaagtttcatcctcttgcttgtccacctcagctcggcgnnnggagcagc

SEQ ID NO: 1079 - DNA, 498 bp, Macaca Fascicularis
atgaaatacacaagttatatcttggcttttcagctctgcattgttttgggttctcttggctgttactgccaggacccatatgtaaaagaagcagaaaaccttaagaaatattttaatgcaggtgatccagatgtagcagataatggaactcttttcttagacatcttgaggaattggaaagaggagagtgacagaaaaataatgcagagccaaattgtctccttttacttcaaactttttaaaaacttcaaagatgaccagaggatccaaaagagtgtggagaccatcaaggaagacattaatgtcaagtttttcaatagcaacaaaaagaaacgggatgactttgaaaagctgaccaattattcggtaactgactcgaatgtccaacgcaaagcagtacatgaactcatccaagtgatggctgaactgtcgccagcagctaaaatagggaagcgaaaaaggagtcagatgtttcgaggtcgaagagcatcccaataa

SEQ ID NO: 1080 - DNA, 1478 bp, Macaca Fascicularis
attattttacatcagtttgcaagacctaacaatggtgttcccagtttatctcctttctgtttaaaaatggaaacttatttaaggatggctgacttaccgtatcagaactattttggtggaaaactctctgctcaagggaaaatgccttggattgaatataatcatgaaaaagtttctggcacagaattcataattgactttctggaagagaaacttggagtgaatttaaacaaaaaccttggccctcatgaaagagccatctccagagcggtgaccaagatggtggaggagcacttctactggacgttagcttattgccagtgggtggacaatctcagtgagacccggaagatgctctctcttagtggtggtggtcccttcagcaacctgctgaggtgggtcgtgtgccacataacgaaaggaattgtgaaacgcgagatgcacggccacggcattggccgcttctccgaggaagagatttacatgctgatggagaaggacatgcggtctttagcagggcttttgggtgataagaagtacatcatggggcccaagctttccactcttgacgccactgtctttggacacttggcacaggcaatgtggaccttaccagggacaagacctgaacggctgatcaaaggtgagctgatcaaccttgccatgtactgtgagaggataaggaggaaattttggccagagtggcaccacgatgatgacaataccatctatgaatctgaggagagcagcgaaggcagcaaaacccataccccgctgctggattttagcttttactcaaggacagagacctttgaagacgagggagcagaaaacagtttttccagaaccccagacacggattttaccggacactcactctttgatccggatgtggacatggatgactatacagaccacgaacaatgcaagtgacgtccagcctcgctgacgctcttccttggtacctgccactccctgggttggtccattttcccaggtagcaatccatccgagctgggaggagatcgtcgtgcttggcacagttttcacatgctaactggactatagcagccttatttcttttttgtacaaacaaaacacagaaccattcgaatgactccattgaaaacaaacaggcaaaaaataacaatgtcagcatggttcctgaaatccatttttgttttcattagaaaactattaataatattgtgtggtagagcaggtgtaagagcgggttgtcagctgatagtgtttatgatgatcctcttcaaccttgaggtcttagttgtgagatggattcttgaacctccttcatccaccaggatttgaagcaatgagagatatcatcagagaaaatgtaggagataaatgtcttatggtggctgcttgtactttatgtgtgtatattgtatgttgagacataagtcaaataaaatccacagatattcaacgaaaaaaaaaaaaaaaaaaaaaaaaaa

SEQ ID NO: 1081 - DNA, 646 bp, Macaca Fascicularis
  misc_feature (1)...(646): n = A,T,C or G
tggatacccaaactacacttctacacatgaaaagtaagaactgtctttagattttctttactttgataacttgtgtttgtttagcttaagacccaagaaatgctgtttgctcatggtaaacagaaacagcatctttgctacagccactgacaccannnnnnnnnnnnnnnnnnnnnnnnnnnnnnnnnnnnnngaaatgttaatatgttaaatactaaactaatatttcaaaaatgtgtatatatgatttctatatccttgcttttcagatagcctgcttataatttaatataaattaactgatgcattcataagatttcaataatgaaatggttcccttttttaaaaataaaaatacattgtctttgtagattaaaaatgtcggaatttcaaatttaaaattgtctacacactaggaaatagaactgtgttaatatataagaaattcggggataattaagaatgaaggacttttctatcatttccattttataaattgccacctgtgaaaatggtttttgcacattatttgtatttttctttgtatatgaaataattttttgtactttgtaaaatatggaccccattgtaccttcagctatttgagactatacacagtgcttcttttgtaactggactattttaa

SEQ ID NO: 1082 - DNA, 788 bp, Macaca Fascicularis
  misc_feature (1)...(788): n = A,T,C or G
gcggcgtcnnnnngggccagctgcggctcacggagggcttcgccctggtnnnnnnnnnnnnnccacggagcaccaagctaaagaagcattcccggggggagaccgaggtgggcgccacggcagtggccttctccagctttgaccctaggctgttcattctgggcacagaaggtggcttcccgctcaagtgttcnnnnnnnnnnnnnnnnnnnnnnnnnnnnnnnnnnnnnnnnnnnnnnnccctgcgggccccggcacagtttaccttctccccccatggtggtcctgtctactctgtgagctgttcccccttccannnnnnnnnnnnnnnnnnnnnnnngaccgatgggcatgtccacctgtactccatgctgcaggcccctcccctgacctcgctgcagctctccctcaagtatctgtttgctgtgcgctggtccccagtgcggcccttggtnnnnnnnnnnnnnnnnnnnnnnnnnnnnnnnnnnctgtttnnnnnnnnnnnnnnnnnnnnnnnnnnnnnnnnnnnnnnnnnnnnnnnnnnnnnnnnnnnnnctgnnnnnnnnnnnnnnnnnnnnnnnnnnnnnnnnnnnnnnttggccgcgggcgatgcccaggnnnnnnnnnnnnnnnggcagctgagcacagagttcgtggaacaagggccccgggaagctgaggacctggaccgcctggcagcggaagtggccacctgaggggtcccggaggcgggtgcaagccttcgctgtgccgagccttgtgttnnnnnnnnnnnnnnnnnnnngaaa

SEQ ID NO: 1083 - DNA, 738 bp, Macaca Fascicularis
  misc_feature (1)...(738): n = A,T,C or G
ggagaaatgaaaggtataatgnnnnttgaaataaataatataattgtccttgttaattatattatgaggacagaagatacnctgataagagagaacgtggtgctttgcttactgttttaaagaaaatttgtaaaactaaagactttttggaaaaaagctatcttaagtgctttttctttatttacaagacatttccccccgtggtagcatctgaagtattgnnnnnnnnnnnnnnnnnnnnngagctccattcatggccgtcattgaaggttatttattaatgttacgtaacagtagaatatgactagttagagggtnnnnnnnnnnnnnnnnnnnnnnnnnnnnnnttatgcttttaagaactacaaagattcaagaaagaaagaagtgtttttgaacctatagaaaaagattttaaaacactctgctgtcctaaacaaatcctgtttaaaggaattttaaagagatgcattttactatatcagagaacatatgtgtatttgcctaaacactctgtacctttgtaatgatgaaactccccctttacagggaagcttattccgattaagcttagactgtgtgtgtgttttttttggttttttttttttggtctgataatgaatttgtgaactctatctttggtatatcttttattaaactgcactgttttgtttagtcaaggtaaacaagctaattgtgtatttgaataacttggtgtgtcttgagtgttgtggtatg

SEQ ID NO: 1084 - DNA, 263 bp, Macaca Fascicularis
aagagtttcttctctctccctttctctctatctctctctccctctcccctctaccaccctccctctcgttttcactctctctgagtcttgctctctcactctctttttctttctctggcgctatctctctctctcggagaaaaatacttactgcacagagtgttttcaacaccgggggagagtctgggggtcagaatacccggactcttctctatagttcttggcgctccaggagtcagccaaaacagagggggaaagtcccc

SEQ ID NO: 1085 - DNA, 777 bp, Macaca Fascicularis
  misc_feature (1)...(777): n = A,T,C or G
aagcatcagagaaagacgtgtgcatgtgaagcnncnngnttctgatgttacgagaacttaagtgaacaggannngctgcacacagcgccattgtcttctatccatttctctttatcattcaaagcaagcaacatgtgccctcctcgtgaacacacattcttctcctttgtcagtatgtgtctcccnnnnnnnnnnnnnnnnnnnnnnnnntcataattatgtatgatccaatgtgtacataatttcatttaacgttatttaaagaaatagatccaattcctctcttgcaaccaaaaataaataaaatacattgcctcaatataaggtttgggttattctgtgtttctatagaggcaatctgtttttggtaaaatgtacttttaaggatccagtcatctaaagtattttatgtagagttagagatttcacaatattgactatacatatatttaaaatataaaatatccaactgatgtttgaatttgtcttactttcctgaccacctcattgttccattttataaggtggggagttaactagcttaacaaaagatgcttagcttttgtaaaagagcaagtgtttcattttacaaagacactccaaatgatagttacttgattttctcgagaccttgaactgtggtgatgaaataacaggacttgctttcaagcctgaataaatgtaaaatgccttttaatgaagatagagctgagtgttttcctcatgaatctgaaccaattacaaatttgtgttccagtcttgattggtattgactga

SEQ ID NO: 1086 - DNA, 1872 bp, Macaca Fascicularis
tactggagcggtgcgagtgccgagagaaccgtgagctgagagaaggcgaacgagtgttgggatggccaccaactgggggagcctcttgcagaatgaacagcagctagaggagctggcacggcaggccgtggaccgcgccctggctgagggagtgttgctgaggacctcacaggagcccacttcctcggaggtggtgagctatgccccattcacgctcttcccctcactggtccccagtgccctgctggagcaagcctatgctgtgcagatggacttcaacctgctagtggatgctgtcaaccagaacgctgccttcctggagcaaactctttccagcaccatcgaacaggatgactttaccgctcgtctctttgacatccacaagcaagtcctaaaagagggcattgcccagaccgtgttcctgggcctgaatcgctcagactacatgttccagcgaagcacagatggctccccagccctgaaacagatcgaaatcaacaccatctctgccagttttgggggcctggcctcccggaccccagctgtgcaccgacatgttctcagtgtcctgagtaaaaccaaagaagctggcaagatcctctctaataatcccagcaagggactggccctgggaattgccaaagcctgggagctctacggctcaaccaatgctctggtgctactgattgctcaagagaaggaaagaaacatatttgaccagcgtgccatagaaaatgagctactggccaggaacatccatgtgatccgacgaacatttgaagatatctctgaaaaggggtctctggaccaagaccgaaggctgtttgtggatggccaggaaattgctgtggtttacttccgggatggctacatgcctcgtcagtacagtctacagaactgggaagcacgtctactgctggagaggtcatgtgctgccaagtgcccagacattgccacccagctggctgggactaagaaggtgcagcaggagctgagcaggccgggcatgctggagatgttgctccctggccagcctgaggctgtggctcgcctccgcgccacctttgctggcctctactcactggacatgggtgaagaaggggaccaggccatcgccaaggcccttgctgctcctagccggttcgtgctgaagccccagagagagggtggaggtaacaacctatatggggaggaaatggtacaggccctgaaacagctgaaggacagtgaggagagggcctcctacatcctcatggagaagaccgaacctgagccttttgagaattgcctgctacggcctggcagccctgcccaagtggtccagtgcatttcagagctgggcatctttggggtctatgtcaggcacgaaaagacactcgtgatgaacaagcacgtggggcacctacttcgaaccaaagccatcgagcatgcagatggtggtgtggcagcaggagtggcagtcctggacaacccataccccgtgtgagggcacaaccaagccatggggaccttctatcctctatatttgtcattcctttcctagccctcctgaggggtatcctcctaaagacctccaaagtctttatggaagggtaaatactgataccttcccccagctctccatctgaggaccagaaaagctgtgtttcccttagatgagatctagaggcccccaaatcctgggggtgtgggtacagctgaggggaagctgctctgaggtaaaggtccatgaaccctgccccactcccatcagcccctcatcagccttttcagcaggttccagtgcctgacttgggctaggactgagtggtaggaggatggggagtggaggggcatagcctttccctaattctgccttaaataaaactgcat

SEQ ID NO: 1087 - DNA, 751 bp, Macaca Fascicularis
  misc_feature (1)...(751): n = A,T,C or G
catgaggaccagggaattccgatgccgatcatctgacnntcttcctagaaggcattctcatgaggaccaagaatttcgatgccgtagccacgtgcgggattacggagaatactcagaggacaggtcattcaaggagccactggaatcaaaaggcagatcccattccaaaattgagaaattttcggagtcctttgaacgacagctgtgctttagaaccaaacgttctgcctctttgggacctgaaagcagaaaggagagaaatgaaagnnnnnnnnnnnnnnnggagataaaatcccgaaagaaagtagaggaagaaaggagctctaggaaagaagaacatggagaagcacacatggctcccctgtttgaaaaagggcctgaataatactctgcttccgcctcatgacatcagatgctagttttggtttttttctttgagccctaattcaccatttcaggatgtggacgggggcggggttgggggtaaaaacagctataaaaagcaactgcagatgctgagtgactgcaatgggcagggtaggtagctgctccaagatgacttgcatcataccccaattactgctggcatcttagttgagagtatattctgcttggttgcctttttatgggaataaagagaataaaaggtattttaatagaataaagaaaaatttgaaaacgtaatacaaggtatttaaagagccacccacgtagctttaccaacccttcttacacatcaactcacaaatca

SEQ ID NO: 1088 - DNA, 770 bp, Macaca Fascicularis
  misc_feature (1)...(770): n = A,T,C or G
atgcatgggagatggattgnnnnnnnnnnataatgacacagaggtaccaactgccagcatttctgtggagggtaatcctgctcttaannnnnnnnnnnnnnnnnnnnnnggcagagagattgctgtgggtgattctgaaggacagattgttatatacgatgtgggagagcagattgctgttccccgcaatgatgaatgggcacggtttggccgaacacttgcagaaataaatgcaaaccgagctgatgcagaggaggaagcagctacccgaatacctgcttagttcctgaaaaggggagtgtaactagtggatttgggaaaggttcttaagtagatcccaagattatttgcatgcttctatctaaatgataattaaaaggaaatttcatggattaaaccatgggtttaatgcagtaaggcaacttacaatgtccttttatatataacatgcatcttgttttggatttgtgtcattttttaatatagctgattgacttcacannnnnnnnnnttttttgaattnnnnnnnnnnnnnnnatatttggtattattttgaattcttttcaacttataacactgtatacagttatttctaaagcacagatgaaataagttctgcatatttttaaatgatcacggttccctatgacacagataatgttctcactacccataatatataggaacattgtttctcattggccgtagtatgcatacacctatccatgttccattctgacatcctttgttgtccttataattcatgtggt

SEQ ID NO: 1089 - DNA, 1722 bp, Macaca Fascicularis
atgtatgcatggagttgtgcaggatacagtatcctgaatgagggctgaatgttctgcaggagaagtgagcatatcaagtctttgtaactaagaacgtaatgttagattgtagctgaggggaaaaaacacagatggcttgagttgtctctaaatagtgggtctgccaggtgaaaacttagatgttgctttcaaacgacactaatgatttctttcagtgctggttagcatgagtggtcattgcaaagcgctatgaccactgtaatgcccagtatggtgcccactggtcccaagtggctcttgagcacttgaaatatgggtagtctatgtggagatgtggaaaatacagactggattttaaagacttagtagacttagtattttgaaagtgcaaaatagatcattgacaattttatgttgattatacatacattaattttacttgttatattttaccatttttaagtgcagctactaaaaatttaaaattctgtatgttgcttacattatattcctcttggacagcactatactaacggcataaatgtaagattgtgtttcagagggcacccgagcactgcttggtttatatgtattttctaggccttccctttggttccctgggttacctttaaaaatacatgtcatgatatagacatggcatatctgagacaaacctcagactgagactaaccttggactgagacaaacctgagtttctgtctcaattctttgtttgtggcttgcctctcagcatcttaaattctctgaatcttaagttcctccactgtgtaaaagaaataatatccctctgacctcactgtggttaggcaagagacaatgcagtgatttttccagtaatattatgagacatcttattactataattaaatgattgtgttttccccagattgacaaattcaaattttctattttgaaatcttactgcaaatgttaaaaaaaacaaacaacctaccctttggctcctggtacgtcttccagctgctagtaatagaattgtgacagctcatgttgcctcagagctatggggaaccaggcagtgcgcttttcaggaactgtctttatcctcacaacaatcccgaaagaaaaaacccattcttacctccatttaatagctgcagtgactgaggcaccgcaaggttaggtgacttgcccaaggtcacacagcgaagcactgagcccgggcagtccagctctagagccgtgttctttgcctctgcccagtattgtccaccagtgaggagaagacagaaccaaagaaccaacagccagtgaatacttacaggaatcatggctttcatggacgtctattcttgtgatttgacagtgtatatgtgggatacttcctcttagaatgctttttcggttcatacagtaggcttaaatatgtcatggttttagagttttccttaaggaatacgttgattcccaggcacattacagtctgaatcagtcttaagaaattccgggatagaggaggaagaagtttgagtgatcagttgtgcagcatggtgactgcagttaacaataatgtattatatatttcagaattgctgaaagaggagatttcaaatgttctcaccacacccacacacacaaaaaaaataagttggtgaggtgatggacatactaactagcttaatttaatttttctcaaaacatcacattatccttcataaatacattcaattattattagtcaat

SEQ ID NO: 1090 - DNA, 2071 bp, Macaca Fascicularis
ttgtgaatctgaattttcactttaggtgtaattgagtcacttatgtattactgtgatctttgtgagaagtgatttcgtccttttttttaagttgatgaaacttgataaatggtgattctagcatattgtgttaatactgtatcttacaataatttgtgaactggccatcataaacaaatcatagtagtatctcttctggtaaattgtttctatggtgtgatctcttaatgctgtgtttgggggtggggatggggttaagtattttgttgactttaagctgtcaaagtgtttttcttaaatgccataaaattgtatgactataagccaaataagaatattctcttttttcacttttaagggcactgtatagaccatttgggaaactatcccacagaatggtataatttaagtttaaaagctcttacacacatacacacacacaaatatatatatacacgtacaagggaaagcaaacagtgtatgcagtatttctatgtgacatgctacatgttgcaagaatccattttcaaaatcttacacagattatgcagaagtcaaaataacaaatacaacacctcaattttttgtagagtctagcattagtttacttataagatttgcttacatcatacttcgcaaagatcatttacatcatttattaaatgttgaaaatatttatatgaagtactaatgtcatctgaagtttagagattaaacaaccaaggtttagaaagatcaaatgactagtccaagataatatggccaataaatgactctaaacctcctatgctctttatactattcaccttttgtcatgttatttttatcctgtcactgccattatctttaaaactttgacaaaaatttacttttaaaagatacattgggaattttcagattttagtgcaaagacattgttgctgttcttgtcagaccttttgagatacttccagactatagcccttccacagggtgatactcaaacattttccacctaaaacatttaagtctgcacaccctgaccacagacactgaattcacttgatgtcagaatgctagactaaaagttaatcttcttgactgacatttctaatctccctttttaaaaattcatcataacgactgacttctgaacagctgaataaagcagtgatcaacacaagaaactttatccattctgattcagaggaaaaaaaaatccaacctagtaaccatttttcagcatattgtatttcatcacatttattctgtgattagtggaggacagagaagagggactggggagaaaaactgcctttattttaagaaaactcatttcctgtaactattcaaaaagtattgattatcaagtgttagataacaatattactaacatttattatagttcaaatatttagtgaaatttctccacatatttaaaattttacttaagaattttcccagttaaaatgtcatgactgcttagtttgaataaggaagatactcgtttcaattcatgacacaatattacatttttattctgtctcagacaacagagagacactgttactgctttcccttgtaagtcaacagtctgtgatacacgctgtacttttactgattagcaatgcattgttactgtgaatatttagctagaacttattatattggaatttaaaattttctaacattgaatttaattctcttcatcaaataaataagcattattttttatgaaatgaaataatcattcttaagcagtgatagtaatggaattctgaataagatataaaatcaaacatattctattttttctatgtttatcctttgacattgagttgttttaacttatcacatattattgttaagttgaaataagctttatgccatgttctctgatgttcttgtcataataattttgggcctttgttaagtaaatatcagaaaatatctgtgagttttgattatgtgatgttttcatctgattcatttttaaaatttgtcattggatttaaaatgttttctttgctaatgttatatagagaattcaataaaagaccaaaaaaaaaaaaaaaaaaaaaaaaaaaaaaaa

SEQ ID NO: 1091 - DNA, 537 bp, Macaca Fascicularis
atgcacagctcagcactgctctgttgcctagtcctcctgactggggtgagggccagcccaggccagggcacccagtctgagaacagctgcacccgcttcccaggcaacctgcctcacatgcttcgagacctccgagatgccttcagcagagtgaagactttctttcaaatgaaggatcagctggacaacatattgttaaaggagtccttgctggaggactttaagggttacctgggttgccaagccttgtctgagatgatccagttttacctggaggaggtgatgccccaagctgagaaccacgacccagacatcaaggagcatgtgaactccctgggggagaatctgaagaccctcaggctgaggctgcggcgctgtcatcgatttcttccctgtgaaaacaagagcaaggccgtggagcaggtgaagaatgcctttagtaagctccaagagaaaggcgtctacaaagccatgagtgagtttgacatcttcatcaactacatagaagcctacatgacaatgaagatacgaaactga

SEQ ID NO: 1092 - DNA, 222 bp, Macaca Fascicularis
agttatagaatcttcatagagttctatgagaaaaaaatatacttgctatctatgaaaaagagaaaaaagaaaaaaaatgagaaaaataagaaaaaaaaatcgtttcctaggcttttattcttgatcttcaaaggcacgcagggtttaatggttccttgggttattattttgcaattttgttttttattttgccttaagtaatgatagaagatatatatggcc

SEQ ID NO: 1093 - DNA, 634 bp, Macaca Fascicularis
acaatgaaaataaagggtgcagaaccttcctggaacgtggaatttctctgggagattccatgcagaggccactggggaggtggcgggcacgcatgtgagtgtaggtggatgcagtgttggaaggctcccggcagagcagagagcatcttagtctcatcagggaacccgcctcatgggttgtcagccagcagtctcaggaacatagactgcagagaactgagggcggcagcagtggccgcggcacctgaggcatcctgatgtcatgggaaggtctctgcccaaatgtcagatgcatcagcctgtcacccaatgatccagagctttcagctgtgctggttgggggtggggggtggagtgttgaatgaccttcatgggtgggcctttccagctttagggtcattcgggtgtttgtcctcagaaccccagtttttaggttgtgtgtccgggattatgggaacctgtcccccatgatggatcctggtagagacatttccctgtgtctgtcatcgtgtccaggagaatgctgcaggttactacctaccagccctgttctcatttatccggatgccctccagaaatcggggatccatacacctttagagcctttttagttccttatcaagttggcaaggct

SEQ ID NO: 1094 - DNA, 715 bp, Macaca Fascicularis
  misc_feature (1)...(715): n = A,T,C or G
tgagggctatacgagcatggcttccgaatctgcttcttgggaggttctctagaagcttacaattggtgggtgcgattacagatcacacctgtaatcccagcagtttgggaggccgaggcaggtggatcatgaagtcaggagatcgagaccatcctggctaacannnnnnnnnnnnnnnnnnnnnnnnnnnnnnnnnnnnnnnnnnnnnnnnnnnnnnnnnnnnnnnnnnnnnnnnnnnnnnnnnnnnnnnnnnnnnnnnnnnnnnnnnnnnnnnnnnnnnnnnnnnnnnnnnnnnnnnnnnnnnnnnnnnnnnnnnnnnnnnnnnnnnnnnnnnnnncaaaaaaaaaaaaaaaacattgtgtgacacttcccctttctctcgcttgcttcctgtcttgccatgtgatatgccagcgtttccttcatgttccatcatgattgcaagcttcctgaggtcccaccaaaagccatgcagatgctggtgccatggctgtacatcctgcagaaccatgagccaattaatcctttctttataaattacccagccttaggtgttcctttatagtgacacaaaacagactaatacaagaactcacccctcatgcacctttcagtttaaaacagaaattggttaccattggaaaaacaactgagttacaagcaataggaaacagctgncactttaaatcatggtatgtaggcaggtgtggtgggt

SEQ ID NO: 1095 - DNA, 620 bp, Macaca Fascicularis
acacacatcaacatcaaaacagagaaagccctggggatgacttaagattgtgctcaactagtacttgtgtttgggtccagggagcagcagggaaatcgaggaggtctgtaccctgcatagatggcagattacaggataggtaggagaacgtgtttaacattccaccccatatcatcgcaaagcctgaggcaacaccacaaaatctggtgccagtagccctggggtaatatcaggacaccaggaaatttgagttgatttagacactatggctccagagttctgctaaccaccacctgaaacaaacttagtaggggaagacccaccttccaaaaacttattattgtaatggaatataaagaatgaactaggaatagaatagtaagtatgtgtgaaacccacatactaggagtagatattaataaaatatgtgtgcatatatgtagtataaagtctacaaatacaaacgaatatgtatctaaagatatataagtacagataattatacatatatgatataaagatatagatgcatgtatatatacatataagcataaatgtatatgatgtctaaaacaggtatgtatataaacaaaaatgtacatataacatataatgtacat

SEQ ID NO: 1096 - DNA, 1694 bp, Macaca Fascicularis
aattaaatttcagtgaagcttctgatgtataaagaatgctatgaataaaacattaagaagctgtgtaattttaagttatagttgcctctatttttaccatttcattggtaaaaattagctaatttttttcaagtgaaatatgaaaaataaaaatttaaatttatcaatatgatggaaattttataaggagatgtattattgagttttcactgtacctggaaaggagattcaaaattttttctgggggtgtatataagtgaaaatctgatttttttaattgtcaggaaaacaagataatgcacagatttctaagactcagatcttacctggatgtgatttttgagctggggatagacatgctttggagccactgggaatattttgaaaactattctagttacagcacagctgctaatgttaaagaatatgtgttcatggtttgtgactattaggccaaattttatggcatgtgttgtcaatctggatctggtgaggtctgtttgacgtgaatctttgtgttatcttgaatttaatagtttcaaggtacttaaattcttagacttttacagtttctaatttgtttcaatgcatatgggacatgcttgatttttttttttttaccgtattaggactcgaagttcttagccttttcaggttatcaaatacctgaaagtaaaattttctaagatttgataagggaaggtactattcaaatcattttcttaggatagcatctttacatacgatgagaggattgtacaagcattaatctcatattccaacatccagttactggatgtgatccaagtaccctggtctttttaaagcagttaaaatctaattaattaactttgggagtcttcactattcagttgatcctcctcattgtcctatttgtatgactccattttttcctccactatatgagttttctttgtcggggagaggagtggggagagccacagaatctcatattcacatcttaattaaattgtgtaatattagtcttttgtggaaattctgtaggcagtgagaatgattttgaaaagtaaccaatgataattagcattttagttattactaaatgcataaaattataacccttgaaattaatttgtgctggcagttctggtttagtcatttttaccagtagttagtagtattaagacctgcagtatatgcactttttgagtagctgtcaaagaattgtacttgagaaacaacttgtttattcttacaattcagattttctattcaattttgtctcaaatagtaaaagttattgtgaacaatttaacaatggcctcctgttctagtttgcctaacatttcagttaagatttagtgttttaacctatttttttcaagtttattttttgtattagattttatttgcataagttatgtgggtttagtaattgacttatttattcattgcttcaccaattcatccagattagttttaagtgtgtatatgtatttgctcaccagatcattttcttgggaccttgaactgtgaatgttttgtcctaacaatttaacattttctaggtacttgctgcaagttcttgaactattttaccagctttaactttggggctcttagttccttttctccagattcttgttattttattttatccaaataaatatttaggtgttctaaaaaaaaaaaaaaaaaaaaaaaaaaaaaaa

SEQ ID NO: 1097 - DNA, 728 bp, Macaca Fascicularis
  misc_feature (1)...(728): n = A,T,C or G
gccccagcagcaaagtcctgcagcnannnnnnnncnctgaggcaccacggcggnnnnnnnnagcaggagataaagaacaaagcggggttgagggttgctccctcagccccagtcacnnntcacagagccccctcctnctggagcccaggccaagggannnnnnnnnnnnnnnnnnnnnnnnnnnnnnnnnnnnccttgtctctaggccccctcccgatgctctagccttgcacccttggcagtggtggtaggaggtcctttttctttcatgagcctccccaaaaagcccagtcggcttggaagtagctgtgtgcatggcgtgggtgtaccttcgtgacacacatgcatttgtggagtatgtgtgtgtgcatgcatgtgagtgagtacgatgcagtgatacctgaaacgtgagagcgtatgggctttttggggatgtgcatgcctgtttgatgtgtgaaggcaaggtgtgcatttgtgtggtgtgtatatgtggtgtgtgcatttgtgtggtgtgtatatgtggtgtgcatttgtgtggtgtgtatatgtggcgtgtctgagtgtgaacacgtgtgcgatgtgaggagagagggagtgagacattcacggaacacacatgtcnnnnnnnnnnnnnnnnnnnnngactctcgctcattaggtgatcccgcctcagggtttgtggggagatgtctgccactagagaataaacatgtacttttgggagagga

SEQ ID NO: 1098 - DNA, 775 bp, Macaca Fascicularis
  misc_feature (1)...(775): n = A,T,C or G
gatgcnnnnnnnnnnnnnnnnnntnncnatcaaanngacccccaaggccacagtggcnnnnnnnnnnnnnnnnnnnnnnnnnnnnnnnnnnnnnnggctcagcacatagccaatcctaccatttctcgagggcagctgaaagtgtttactcaggtagaggggctggacagggtagggttgggtcagcagccagtgcaggttgggcatagccatatgttgttatctactttgaggagttagttggtagcaccagcatctttggnnnnnnnnnnnnnnnnnntttggtgcccaccagccccaagatgttcaggtgcaagtgtgccactgaactgaggacnnnnnnnnnnnnnnnnnnnnnnnnnnnnnnnnnnnnnnagctctgcagggccttagtctgtgaccacccagcacnnnnnnnnnnnnnnnnnnnggtgnnnnnnnnnnnnnnnnnnnagtgacaannnnnnnnnnnnnnnnnnnnnnnnnnnnnnnnnnngagacggggaggtcacaaagaaaattggactggaggacctggccattcccccttcacctccaagaccctggactcttatttcagctccactccttcctnnnnnnnnaagtttnnnnnnnnnnnnnnnnnnttgggagtgtgagagaatatggggaggaaataagtaccctggagagaatgaaattgcctgcaaagagcaagtgggaagttcctttcattttccagccagtgaaaaatggtcaaggtgtcagcaaacctcacaacaaatcctaacactaa

SEQ ID NO: 1099 - DNA, 803 bp, Macaca Fascicularis
  misc_feature (1)...(803): n = A,T,C or G
cagttagtttcggatgaatttccactgttgatttactttcaagacatagcaagagaaacaaaattttgttttcaagacatttccgctacagtttcaagctgtgggcatatgcttcatttacttccaaagaggaagaagcagctggaatnnnnnnnnnnnnnnngctttgtttcatgttatgggtgaagacctacatacactnnnnnnnnnnnnnnnnnnnnnnnnnnngcaaggcagttgtggggttcactatgatttagtgcctgatcttttttttgggaaggggcgggaatgaatgtgttgggactgggagggaagcagaaaatgggagcgtgagtgagtgtgcatgtnnnnnnnnnnnnnnnttgcccccacctgcgcctggcaaggaacaggtgtttgatgtattttgctcatgactgcagtatgcatgtatttttttccttctctgtgttttctaaacttacactaaaggattcatcaaatcatcttgttcagatggctcaggattgtatttattttgcttaccccgtgctcttgggttctatagtatttctataattatgtaacgagaatagtgttgcactgtaatctatcatatagagctatatgtatggaaaattttgatcaattttttaagaaatgtatcctgtttgcaaaggcacaataaagttccatcttatagactataggcaataaagctaacaataaaccttatttaacacaaaccacatccatatcctctgttcatttgattttggaaaaagtctagcatatccagtagtttcagggaattcatttta

SEQ ID NO: 1100 - DNA, 377 bp, Macaca Fascicularis
  misc_feature (1)...(377): n = A,T,C or G
ccaccacctccctaccacctccctccaggggcagcttcttgaaacacaccctgaagtaccggtcctcagcctcttcaaagtcatcacnnnnnnnnnnnnnnnagtccccacttggtttccacannnnnnnnnnnnnnngtcgctgtcgccctgtgtcacaggctgaccgggagcctggggtctaggggccatggagccatagttctctgacaggctggccagggatcaaccgtatacccccagaccaggtacatgcaggtgaatccagtaaaagcagacctagagacccaagaggttgctctgcagaagctttttaacttgatgtgctcccattaatccaattttgctttggctgcctctgtttgtagggtatgcta

SEQ ID NO: 1101 - DNA, 1837 bp, Macaca Fascicularis
aaaaaaaaaaaaaaaaaaaaaaaaaaaaaaaaaaaaaaaaaaaggaagtctatggatgtgtttgtggaaatcttactctaataacttgttggattagatgctgttttattctctactagtgaaaaatgctttatttcagtggtttcccatggttgggagagagagtagctgttaactgttctgggtgatgggggtgagtatgttgaggaagagaggtagaaccagaagagtgaggagactcgaaccattccataacaaggaaagctttaaagacctggtattttactgtctggagaactagaggtatctgactcttcgtcagttcatgcaacaaattatttattgagtacttgctgggctctcaagattcatgctttgagcacaggcagtcattcagtttccagtccacctgattagatcagcatgcacttatttttctttcttgttcataaggacttttgatcatgcaagacctggccaagtctataatccagatgggtttcctggggctgttacttgagtattcctgtcaaaatattttcatgaaccctgcctctcttagcaaacactactttccttcgtaagtgttaacaaacatgcttttaataatctattccagaatattctccaggagtaagtttactggttggaatttgtggaagccactttctcatgtttcccaaataagatatgtagtcctcagctgattcctcagagatgattgacagtgagtttcatccatctttgtggtagtttgttagttcctaggcatgtaagtgattagaatattgagtacctgttctcctaatatctacccacttttaccatgtcagtgttttttgaattagatcacttaccaagagaaagcagaaacaaaatacttgaacctgacaatatctgactgcctcttttcattgctctggatttattttccacatcaatctctttggggtggccctagcctattattcatgtgggttcagctgaggcttggttaacctggatttacaatccagtttaagttaaacattccctgtttagcaacagctgttcacttgggtactctttttttttttaccttattatagttacttttggtattatgtgctttatctttaaaagctttctagctctaggaaattgttttccccatttgtgtctatctgtggttatatctataccaacaactttttgttgctatggataccacagattgtcctgaattaaaactctaacataataaatgtctgtttagcagttactttactgagtaataatactatatcatggcaatatggccctttaatactaaggaggtttaggggtagaaattatatgaacactcatatccaaatgttattaatgatatttgacagttttctcaatgcttaatgatattcctcactccccattccagggtagaggagggtttggttccaggctgtggacaaactgctaatttgtttgaagtttgaattatttttcatgggaaagggaagtgacaggaaatgaccaaggctatccacttttgacttgagtatgggtccagtattagtaatggtttcctaggctccctgattgtaccacaaaatggcagacctaccagtcaatttcatgtacccagataagggtctcacatggcaacaaagtacacagcagtttgcagtatgtgtttcttttaaagccagttctgtgtgttcaccttgactaccactcctgctgacagctctcatagagctcttctctgctccccaaatcagtgtattttgaagctatgtcaaatatttacatataaaggaaataaagttgtatgtgctttgaaaaaaaaaaaaaaaaa

SEQ ID NO: 1102 - DNA, 644 bp, Macaca Fascicularis
  misc_feature (1)...(644): n = A,T,C or G
cttgattatatagatggactcttatttgtgtcctagcagaaggctttacgttgtttcccattggttctcctacattcagtgaggtctttaactgagtccatttgacnnnnnnnnnnnnnnnnnnnnnnnnnnnnnnnnnnnnnnnnnnnnnnnnnnnnnnnnnnnnnnnnnnnnnnnnnnnnnnnnnnnnnnnnnnnnnnnnnnnnnnnnnnnnnnnnnnnnnnnnnnnnnnnnnnnnnnnnnnnnnnnnnnnnnnnnnnnnnnnnnnnnnnnnnnnnnnnnnnnnnnnnnnnnnnnnnnnnnnnnnnnnnnnnnnnnnnnnnnnnnnnnnnnnnnnnnnnnnnnnnnnnnnnnnnnnnnnnnnnnnnnnnnnnnnnnnnnnnnnnnnnnnntgccccggccacaaatccattctcttgtgtaatttcccttttgttgttgttgtcgttatttcattttagtttagtttttgnnnnnnnnnnnnnnnnnnnnnnnnnnnnnnnnnnnnnnnnnnnnnnnnnnnnnnnnnnnnnnnnnnnnnnnnnnnnnnnnnnnnnnnnnnnnnnnnnnnnnnnnnnnnnnnnnnnnnnnnnnnnnnnnnnnnnnnnnnnnnnnnnnnnnnnnnnnnnnnnnnnnnnnnnnnn

SEQ ID NO: 1103 - DNA, 2489 bp, Macaca Fascicularis
  misc_feature (1)...(2489): n = A,T,C or G
tcacactgtactctccgttggctctgggaacagtgcccagaataaaacactgtctccatgccaaggcctcattccctagcagcctcttccagggaaagagtaaagtctagcccaggggaaaccatatatttaaaggtgaactcacctgaagaataagtcttggttccagactactgggcacagttttgacatggtgtgcgagtgcgccccattatctagtgatctgctgagagagaagaggaactaaattaaatctgcatttctgcaggagtcgtgttttgaatgagccttttagaagtaagtccttagcaagtgctccgcccaagcattagtattctgaattttcctctctgccttggtctgtcctgtgtctgtactcccagagggcatgctcacttgctgggcatcctgcaatcccagatcaagaatgcagaggtacacagggcaagggcatctgtgctttccgaatcccctactggggccaggctttgtcccaggctgtgtactggtaggtataatttcatttaatctcacaagtcagtgttaacggtctgcatttgataggagaaaggaaagtgtcacctggaggggaaggagctgggattccaactctttgacctctttccactgctgtacctccaaggagtgcacaggggcacctgagggggtggggatgtaagtgaagccatcgggggtgaggtgaggtttgagctggactttgaaggaggctgaaagtcttccaactttggggatgagcagcagatacagtagcaaatggcttgtgctaaggcagagaagcaggggtgggaaagtacccagaacctcaaggaaaacgtcatcactgaacatacttgattttatgcccctagctttgcttataagctaggatgggagaatggattattttagaaacacttctgatttctctggagacgtttgcttgaaagtgtccgtacttaatgcttgctatgtaaggggccatgcaatgttttattgcaaacatttagtccagagaaatatttctccctctagaaaaacctgcaaatttttaattttttcagaagatgagacctgcatagcctcctccagttttcattttgcttgaattccaagatgctgccgagatgttgataataaaattacaagccttttttggggggcagctgcctagtataggaattggttgggatctaaaccaggctctgatgtcaagctatctagtttgaaaccccagctgtgccatttcctggcaattttgggcaagttatttatcttccttgtgcctcagttttctcatcgtaaaatgatataataataacacttacacagtttatgggaggattaaattagcaaatgcacgtaacagtttaaaatgtaaaatcataaccctgttcaactttgcctatccttctttcctttttttattgttttctttaagcacataccactaaattttatttattttgcttattatttgtctcctcccattagatggtaacttatatgagggcagggagttttgtctttttttatttttatttttttactgcttcatcctcagagcctaggatgatgcctggcataccataatgtgtgtgataagtattaaatgaatgaatgattctaaagtgcttagcaacacctgccactcagtaagtgcttagtaaatgttactttatatctgtctttaaataacaccctatattcagtccatcagcaaatcatatctgtgctacgctacgttacaaatcttttctaaatttaactgctcctccctggctctcctgccagcatcccagtcaaagcttccctcacctctcacctggacagctgcaggagggacctaactagattccttgactagactcttgacaccctatagtcagcactctctaacatcactctgtagcttcaatgatcttcttcagatgtaagtcaggtcatgacattctcctgctcaaaaatcctccagtattttctgtcatactcagagtaaaacccaaggcttattacacctgaaagtctcttgtacttcgtgttgtctttgatcctcatctcctgcccctttgctctcactccttttggccattgctcaggctctcttagggtctttgtgtttgctatcttgctgggatgtttttcttcacatggctcactcaggcccttatgcaggagtcagcttgttaccttctgggccnnnnnnnnnnnnnnnnnnnnnnnnnnnnnnnnnnnnnnnnnnnnnnnnnnnnnnnnncgcgaggtcaggagatggnnnnnnnnnnnnnnnnnnnnnnnnnnnnnnnnnnnnnnnnnnnnnnnnnnnnnnnnnnnnnnnnnnnnnnnnnnnnnnnnnnnnnnnnnnnnnnnnnnnnnnnnnnnnnnnnnnnnnnnnnnnnnnnnnnnnnnnnnnnnnnnnnnnnnnnnnnnnnnnnnnnnnnnnnnnnnnnnnnnnnnnnnnnnnnnnnnnnnnncaaaaaaaaaaaaaaaaa

SEQ ID NO: 1104 - DNA, 723 bp, Macaca Fascicularis
  misc_feature (1)...(723): n = A,T,C or G
gtggatgtggtgagatccagtaggaagagtgggtagaggagtgatttctaacctttttataatctttagaaggtgataaaagttatggctatttctctccagaaaaatgcacgtatgccacatatacataggatgtatgtannnnnnnnnnnnnnnnnnnnnnnnnnnnnctgaggtccatggttaaggactccaagtttagagtggaagttgatagggtcaaatccacannnnnnnnnnnnnnnnnnnnnnnnnnnngtgttactgaatgtatgagctgagttatgcctgtgtcaaaattacatgggctgtttatttaaaaaatacaggttcctgggactcatccaaagttaatgagttacaatctcttggggtgggatttgggactctacacttttgaactgcctcaagtcctttttaagtgtgccttaaaatttgagatccactgacataaagggaaagcagaagaagaggaatctgtggcagaggcagagannnnnnnnnnnnnnnnnnnaggaacccagaggccggggcgnnnnnnnnnnnnnnnnnnnnnnnnnnnnnnnnnnnnnnnnnnnnnnnnnnnnnnnnnnnnnnnnnnnnnnnnnnnnnnnnnnnnnnnnnnnnnnnnnnnnnnnnnnnnnnnnnnnnnnnnnnnnnnnnnnnnnnnnnnnnnnacgcacctggggaggctgaggtgggaggattgcttcagctggggag

SEQ ID NO: 1105 - DNA, 755 bp, Macaca Fascicularis
  misc_feature (1)...(755): n = A,T,C or G
ctagccagccctccacaagctnnnnctcacaccagctgtcactgcctctcactcgttcttgaatcagctccatgtccccaccaaatcaacggcctctgtgtggagcgacgctgtcagaagcacttggctggctgactaaagtcatcctctggaaatattctctctcaatcacagtgacattgaccctcttggttttctcctctctctggccatttcttccagtttccctatttcagagtctcctcctctctctgatctctgtgcnnnnnnnnnnnnnctcagtcctgggctctcttctattctggtctctttatttttttattttttaaatttttttgagatggagttttgctctnnnnnnnnnnnnnnnnnnnnnnnnnnnnnnnnnnnnnnnnnnnnnnnnnnnnnnnnnnnnnnnnnnnnnnnnnnnnnnnnnnnnnnnnnnnnnnnnnnnnnnnnnnnnnnnnnnnnnnnnnnnnnnnnnnnnnnnnnnnnnnnnnnnnnnnnnnnnnnnnnnnnnnnnnnnnnnnnnnnnnnnnnnnnnnnttgaattcgtgatctgcccacctctgcctcccaaagnnnnnnnnnnnnnnnctgagccaccatgcctggcctcttctggtctctttaactctctcctctttatttctcttctctctctgtactcttttcctgggtggtctcatccattcctttgctttctcataccatttatttgttaatgattcccacattgatttatgcactggaga

SEQ ID NO: 1106 - DNA, 702 bp, Macaca Fascicularis
  misc_feature (1)...(702): n = A,T,C or G
aaaatcagctgattagagatnctaagtaaaaacatcctttggagcatccatttcaagagacattgnnnnnnnnnnnnnnnnnnnnatcagtttcctctttggtccacacctcttggagggcaagtnnnnnnnnnnnnnnncctctagggacataaagctcctctgaccgaatctgcaggctggcaggggtggggagggaatggtggttccacatggtccaagactggaagtaccagaaaaactgaagaaagacccacccattctgcagttccgtacaggcaaccaatgacattcccacagagtgtgaggaaagactcctgtttcctcagggctgacttactacatgccaggagcccggcacatttaggagtttccgaacacagtggcaaaaggaatcagataagatcctccacttactgaccctgggccttgggcaactttcttgaaccttgagctctagtttcctcatctggaaaatggatttaacaatatcttctatgtgggattacctggctcatagtacagggatgtgatacatgccaattgtgacttttgatagtgtagtttgaaaaacaactgttattgatattattattagtggtagtaaatttcaaaaataactacgattattgatattattgttgttgctggtagtgcatttgataaataactatgccgttgttgttattattgctggtagtg

SEQ ID NO: 1107 - DNA, 1655 bp, Macaca Fascicularis
acaaaaatgctgccttcctccaggctaaccagccttttggattgttaagtatagagtggctctcggtgcagtcaggagtctttgtgcagtacacaaactgcacagctatacagaatggccctgcccttatcctgggaagaggaaacctgcgcgtacactggaaacagttcaacccctggtggggaaagaggaagctgttaccattttgcaatgagtgggaaatcataccaagtgatatttgagcatttcaccagcttgcttccaaaaattctggtgaatggaacagtttttgcaagaatgtctcctgggcagaaatcaagccttattgaagaatttcagaaattaaattattatgtgggcatgtgtggagatggagctaacgattgtggggctttgaaagtggctcatgcaggcatttcattgtcagagcaggaagcatctgtggcatccccttttacctctaaaacagccaacatcaagtgtgtgcctcatctcatcagagaaggccgagctgctctggtttcctcctttggagtatttaaatacttgaccatgtacggcataatccagtttatcagtgcattactgctctattggcaactacaactctttggaaattaccagtatctcgtgcaagatgtagccattactttgatggtctgtttaacaatgagttcaactcatgcctacctaaagctggctccatatagaccagcaggacagctcctttctccccctttgctgctgtcaatatttttgaattcctgtttctcctgcattgtgcagatcagtgcatttctctatgtgaagcagcagccttggtattgtgaggtctaccaatatagtgagtgtttcctggccaaccaaagtaatttttcaacaactatgagtctggaaagaaactggactggaaatgcaactctgattcctggttcaattttaagttttgagaccaccacactgtggcccatcaccaccatcaactatatcacagtagcattcatcttttctaagggaaagccgtttcgaaaacccatctatacaaactatatattttcatttctgctgctagctgccttgagcctcacaattttcattctgttttctgactttcaagttatctaccgtggaatggagttgatcccaaccataacatcgtggagggttttaattttggtggtaaccctcacccaattctgtgtgactttctttgtagaggatgccatccttcaaaatcatgagctctggctgttgatcaaaagagaatttggattctcctctaaaagtcaatataggacttggcaaaagaagctggcagaagactcaacctggcctcccacaaacaggacagattattcaggtgatggcaaaaatggattctacatcaacagaggctatgaaagccatgaacagattccagaaagaaaactcaaattgggaagccaacccacagaacagcatttttggaccaggctgtaatcagaattgttgtcgtacatgctgaacagcattgcttttctccccaaaattaacacattgtggagaagtgatgatcctctccccttatctttcctctctccattcaagcactcaaagcatattttcaatgcattaaacctagcagcaaaagacaaaaaaaaaaaaaaaaaaaaaaa

SEQ ID NO: 1108 - DNA, 728 bp, Macaca Fascicularis
  misc_feature (1)...(728): n = A,T,C or G
gcgacacatcctgtaagataactgtctcaaggatccagtgactcctggcctcagatccaaggaatgaaccacagccgtcctggccagctgcccccctcacctacgcaggtgctcagggctgccagccagggtgccaagccctgctggatggcagacagtgtgtgcgagcatcacggcccactgggagaggccgggggccccattttggagatgaggaagccaaagcacggtgggtgtggtccctgtgggggaacttgggtgtcatggtcaggagcaaatgccgtctggttagaagaaggaacaggaatgcaggactggggttgactgagtccagggcaggggacagaaccagaagcacgtcaggggctgtgctgctggcctcctgaggcgggggctgaggagtcagtgggaagccaagcagggccacccagggaaggcaaggggccggctagagtgaaaagacggccgaactgggggaggggagcacagcgtgacagatcagtcctagaggggctcccagtggatcctgttcaggctcagtttctggccaaaagacagggacagaaagagctaagggggcgtctggagaaacagggccaggaaaggaggaaggaggctgaaagcctaaacccaagtctggctttaccaggaggcaaggactnnnnnnnnnnnnnaaaatgccaaaagnnnnnnggtggcttctatctnnntcctctatgcaggaactg

SEQ ID NO: 1109 - DNA, 753 bp, Macaca Fascicularis
  misc_feature (1)...(753): n = A,T,C or G
tacagcgggagctgcnnntcgggaactgagggagggtcagctgcccagtgtggccagtgctgccaagctcttgtcagccatgatgtctcgataccggggactggatctctgtgtggccactgccctgtgcggctgggaccgctctggccctatgcttttctacgtctatagcgatggcacccgcctgcaggggaatatcttctctgtgggctctggatctccctatgcctacggcgtgctagaccgtggctatcgctacgacatgagcacccaggaagcctacgccctggctcgctgcgccgtggcccatgccacccaccgtgatgcctattcagggggctctgtagaccttttccacgtacgggagagtggatgggagcatgtgtcacgcagcgatgcctgtgtgctgtacatggagttacagaagctcttggagccagagccagaggaggatgccagccatgcccatcctgagcctgccactgcccacagagctgcagaagagagagagctatctgtggggccgggggagatgacaccaggagactacaggatgccagcagggactgagacagtgtgagaagcaggacttggttgggggtggtgtaggcctggggagcaggtgggaggatgagcagcgggggagggnnnnnnnnnnnnnnnnnnnnnnnnatctgactctagcctgtatgggttactggctnnnnnnnnnnnnnnnntctgtcctttcatgactcccagagctattatggc

SEQ ID NO: 1110 - DNA, 715 bp, Macaca Fascicularis
  misc_feature (1)...(715): n = A,T,C or G
agggtacttnntcagannctnannnnnnnnnnnnnnnnttctacctccccatgggccagggccnnncatccccgccatgccccacctacaatgggctctcatccagcgagcagaactgggccaacctgaccacggaggagaggctggcttcttccaggccccctctcttcctggacccaccccctcagaatgaccgaaaatcccccagtcgccccagcagctctgcttctaagaagcagtatgtatagaggcctggggcttatgtcacccaacagaggggtcctgagaagtctggctgcctgggatgccccctgccccctcctggaaggctctgcagagatgactgggctggggaagcagatgcttgctggccatggagcctcattgcaagttgttcttgaacacctgaggccttcctggtgccaccaggcactatggcttcctnnnnnnnnnnnnnnnnnnnnnnnnnnnngacagagtcagcatgggatgctctggccnnnnnnnnnnnnnnnagagggacccagagccaacttaccccaacctcaccctatggaacagttgcctgtgtgcaggttgtcctcaaaccctcccctcacaggaaaaggcggactgaggctgctgggtcagcnnnnnnnnnnnnnncagagcttgtgccggatttggccctgtctaggggactggtgccttgttttcatcactccttcctagttct

SEQ ID NO: 1111 - DNA, 725 bp, Macaca Fascicularis
  misc_feature (1)...(725): n = A,T,C or G
gctgtctaggaagtcttgacctcaggtgatccgcccactttggcctcccaaagtgttgggatttacaggggtgagccaccgcgcccggccctctacccctgcttctgccttccagtctcagctacagtgtgcgccctctccgccactgggcaaggcaggggcggaatagggggcttggaattccacagcctagagacgggcaccgtggggaaaagaagagtcaccnnnnnnnnnnnnnnnnnnnnnnnnnnnnnnnnnnnnnnnnnnnnnggcgggnnnnnnnnnnnnnnncacccccagggcatcccccagcccgcagactaccaggcctccagaggacaggacccctcccccggccacaggccctgcccccgccactccccgcaccccgcctccaaggctcctccgcccactccgcacccaacttataaacacgtcctcgagcgcagcggggagaaacagagctaagcagatccacccctgtgatctgattctttccagcgccttctgcaaccaagcgggtatccccttggtcctccgcgtctccaaccctcgcncctnnanctccagcgtccccgagagtccccgcatccccgctcccaggctacgtgagaggatgcgcggtgctccgacggccggagcagccctgatgctctgcgtcgccacggccgtgctgctgagagctcngggcggcccggtgcagtcaagtctccgcgcttcgcgtc

SEQ ID NO: 1112 - DNA, 630 bp, Macaca Fascicularis
ggaacactcatagacatgaaaatcatgctgcaaaacacaatctcctttgttcaaagagagctgctgttgcactctctgctctctcatttctttattcactctataatattcagtgtaggctgactgtgctccagcgccaagtccaaggggtggagaataacaagggcagagacatagtccttgccctccaagcatctatgatattgacacagtgccatgggagcttggtggagggcctcagtcgactgcagagttaggcttttcaaaagtggtgatctctacggtgagtcttggaggacacagtggggtggggaacagaaacagttgttccaggcaaagaagggaggaatctgtgcaaaggcccaggggctggtaaaccttgggcgtgtgctggggctgctgcctcctcccaaatgtcggggcacagggcagtcagtctcacttatcatggtgaccacttggctctacaaacccccattgcccaagtctccacaggcaaaccacacaactgttcttcttctcactctttttttaagccaagaaagaactcactgaaacagccagtcggtggtgagtccaaggctttcctgacagagtgactatgtttggcttggctaaagatcacaaagc

SEQ ID NO: 1113 - DNA, 770 bp, Macaca Fascicularis
  misc_feature (1)...(770): n = A,T,C or G
catttggagtgaccatcggcataggcccagctggcagccctttaatggtgggtgtaggtgtatccaagtnnnnnnnnnnntcannnnnnnnagaattaaacaagtataatgagaagaaattcattttcatgagaatcttcacaannnnnnnnnnnnnnnnnnnnnnnnnnnnnnnnnnnnnnnnnnnnnnnnnnnnnnnnnnnnnnnnnnnnnnnnnnnnnnnnnnnnnnnnnnnnnnnnnnnnnnnnnnnnnnnnnnnnnnnnnnnnnnnnnnnnnncattacatcacatctggatccatgggtggcacttatgaatatatcctggtgattgacaaagcaaaaatggaatctcttggtattaccagcagagatatcatgacatgttttggaggctccttgggcattcaatatgaaggtggaataaatgttgatggaagtttatcaggagaccattgtaaaaaatttggagatggcaaaactgaaagggccaggaaggccatggctgtggaagacatcatttctcgnnnnnnnnnnnnnnnnnnnnnnnnnnnnnnnnnnnnnnnnnnnnnnnnnnnnnnnnnnnnntaccgttcctgggggaggtcattaaagtataatcctgttgttatcgattnnnnnnnnnnnnnnnnnnnnnnnnnnnnnactctacgnnnnnnnnnnntgaaagtgaagcagaccagatcatttcatatttcttattnnnnnnnnnnnnnnnnnnaagattaaatgtaacggcacactgaacta

SEQ ID NO: 1114 - DNA, 623 bp, Macaca Fascicularis
attttacattatgggagcttaggacttgctgaatatacagatcatgtttcaaagatacaatattatatttttgtattttttattaaaggctattttttaaaaattaccgtttgacattttcttgcaatatttctaatcctgggaggtgataaattgaaatggactaaactcaggcaaacagcactcattataggtaattgctaatgagcctcaaattaaatattaaataattacgacactttcccccaccccctttccacatggttttcttttcactgtcaaccacaatccaaaaataggtgagcacaatacagtgagatcttttcagacatcaagaccacattcacataacttttattatagtatactgctataattattctattttattgttgttaatctcttactgtgcctaatttataaattaaaccttatcatagatatatatataggaaaaaacaatatatatggggtttagtatcatctgaagtttcaagcatccactggaggtcttagaaggtatcctgtgcaatgacaaccctattaaatgacgacagtggtacacacctgtgctttactttttgaatacatgccagatactctgcccttatgtttagaggagt

SEQ ID NO: 1115 - DNA, 592 bp, Macaca Fascicularis
tttacattcatttatttacaaacagatttttttgttctttattgaggcatattttgcatacagtaaaattcaccattttaaggtgatgtgtgtatgatgtatgatgaatgtaacaatgactacaatcaagatacagaatatttccatcaccctcaaaaatcccctccttacctttgtaattaaaccactctccccaaccgctctttagcaatcactggtctggtttctgttcttagggtttcagctttcagtaatgtcatgtacatttcatgtgaccaacaccacagtcaggatacaggattccttatgctaccctttcatagtcatagccaccacccttcttcccaagtccctaatttgtaccaatcactgtctgttcttcatgtctgtaattttgtcattttgagaatgctgtataagtggaatacagtatgaggattggcttttgctgttataaaattttttgctcagaataatttctttgagatccattcaagttgtagcatgtatcaataatccattccattttattgctgcgtagtttcccatggtacagaagaggtagcacagtttattttacccattggaggat

SEQ ID NO: 1116 - DNA, 743 bp, Macaca Fascicularis
  misc_feature (1)...(743): n = A,T,C or G
agccagaangcctggaacagacacttggagggaggggcagagggaacaggaatttgtgctgaaggagatgnnnnnnnnnnnnnnnnnnnnnnnnnnnnnnnnnnnnnnnnnntattcatgaaaggagaagcatgtacacgtgcagctgagtgaattctccatggnnnnnnnnnnnnnnnnnnnnnaggggtctgacctctcaccccgtcatggccgaggactcgggttcaggggttcagggtttcttgggaacccccttggccagaagaaggtccattcattcagcgagggggttcgtctcagacaacctcccgtcatcatannnnnnnnnnnnnnnacttcccctgttgtccttcccagcttctcccccacctccccttttccctagtttataagacaggggaaaagggagaaagcaaaaagttggaaagaaacagaaggaagatagccagatgaccttggcgtcaccacctggccccggtggttaaaataataataatattattaacccnnnnnnnnnnnnnnnnnnnnnnnnnntgaattccagacattgtaggagaaagcactgtaaaacttcttgttctgttagctgatggatgtagcccccagtcacgttcctcacgcttacttgatctattatgaccttttcacgtggaccccttagagttgtaagcccttaaaagggctaggaatttctttctcggagagctcggctcttaagatgcgagtctgccgacactccc

SEQ ID NO: 1117 - DNA, 707 bp, Macaca Fascicularis
  misc_feature (1)...(707): n = A,T,C or G
agaaatagaaaaatagtttagaaagggctagcgcagagtgaagggagggaagaagaaagagaagaaaggctctatatggtgatttagtggggtctacgttcttactttggaatccaaatgcaaactgttctaaaagtcnnnnnnnnnnnnnnngattactaatttggatctaaacatacatcttgacagccacatctatactttgatatggatgtgatttgatgtgcatcatcagaatttatttaccttaccaaagtgctcttggaagacattgctactgccagtaagctggaatatgagaatgtatgcaaatattttcaagaggcgagcctggagacagaccaagttacttagtatcctgcacagggctccttgattgatggctgacagccctgtgaccacaactgtaggctgtttgaaggccctccaggaacaaaagaattagctttgaaagcaagttattttcaaatgtgttnnnnnnnnnnnnnnnnnnnnnnnnnnataataatacagttgttttgctactaccacttgttaggaatatatgagtagtccatggatatgtgattataaaagaatcctatgtatgtatctagagtaagatgggaaagtgtcccgcttaccctccttctacctccaccnnnnnnnnnnnnnnnggtaatcactgnnaataggttacagcatgaatctgtagtctgtttttcata

SEQ ID NO: 1118 - DNA, 771 bp, Macaca Fascicularis
  misc_feature (1)...(771): n = A,T,C or G
gtggccagnnnnnnnnnnnnnnnnnnnnnnnnnnnnnnnnnnnnnnnnnnnnnnnnnnnnnnnnnnnnnnnnnnnnnnnnnnnnnnnnnnnnnnnnnnnnnnnnnnnnnnnnnnnnnnnnnnnnnnnnnnnnnnnnnnnnnnnnnnnnnnnnnnnnnnnnnnnnnnnnnnnnnctgaccttgtgatccgcccgtctcggcctcccaaagtgctgggattacaggcttgagccaccgcgcccggcctgctatttctttaatacctgccctcagagccgtcctgcttttaaactgatgcaaatggtggcagtgcataatcagttcatgggtttgcttgctttgggatttagtacaagattatttaaagaaataacaaaggagaaaagattgaactggattttgctgattgtcaggtatctgtaccccagggtcaacccctgagattggcccaatctgccagaacctaagatgccattttgaccacagtggtagcttctagagccacaagcctgcatttgagaggagatgtgcagcctccaaggctggactccatactcaagctgaaggaacatattggcaggcagctctctcagggtccacctgaggttccagctgctccaagacacagcatgttcagccatattcacggaagggctgggacctacaggaggctcctttgtgtagaggccagggcaggcctgtgacctagaaccaggtggacatgaggttcctttgactccttctctctctggcttgttccctgagcactggc

SEQ ID NO: 1119 - DNA, 755 bp, Macaca Fascicularis
  misc_feature (1)...(755): n = A,T,C or G
agnnnnnnnnnnnnnnntnnctnnnnngcaacataaacaacgtgtgcaacttnnnatcacgaaatgactactnnnnnnnnnnnnnnnnncccgagcccatgcccatgtcaatggcacccatcacgggggacaacataagaccctttattagtaggtgtgctgtgtgtgaggcgcccgccatggtgatggccgtgcacagtcagaccattcagatcccaccgtgccccagcgggtggtcctcgctgtggnnnnnnnnnnnnnnnnngatgcacaccagcgnnnnnnnnnnnnnnnctggccaagccctggcatcccctggctcctgtctggaggagtttagaagtgcgccattcatcgagtgtcacggccgtgggacctgtaattactacgcaaatgcttacagcttttggctcgccaccatagagaggagcgagatgttcaagaagcccacgccgtccaccttgaaggcaggggagctgcgcacgcacgtcagccgctgccaagnnnnnnnnnnnnnnacataatgaagcctgagtcagctaatgtcacaacatggtgctacttcttcttctttttgttaacagcaacgaaccctagaaatatatcctgtgtacctcactgtccagtatgaaaaccgtaaagtgccttataggaatttgcgtaactaacacaccctgcttcattgacctctacnnnnnnnnnnnnnnnnnnnnnnnnntaagctttcaatagtggcataccaaatggcacttttg

SEQ ID NO: 1120 - DNA, 1654 bp, Macaca Fascicularis
attttaaactcagcatttgcttttcttggttaaatgcaaccagtttaggggtaataattgcttaatatgcttggcacattattgaaatcccttatgagaggctcaaaatgagtcagaaggtcaatttattccttggctgggttcctttcacaacacgggttttcctgtgctgctgttcaggaggagcaattaaaactttttgtgtattcaaagctttccagctgaattctggccccatcaaatgatatcagagctctggcttttgcctggtggtgcagagctttcatctgttagtgaatctttggggaccgtttttccccaagcttaaaaacacaagatccaaactctaagggactccttacttatttctctagcaagcccctttactatctctgtgccatcacacggactttctccagctgttaagacactttgatagcattgttactggaccacacacagaactaggaagtctttacattatcatttcttcccgagtagtcttgccaatgttcagtaggcaacaaccacagaaagtttggtggctacctgagattcacaaatcagtggcttacaactgcaaacttcccactccacttgatctacacactagacagctaaaggacttcagggtgggaagaatttataccttcagctgcctttgaatgagttgatgagcgctttctcagaaaatctcactgaagaacctagtatatctcagttctatttgtgttccactgaagacgagccagacttttatgaaccataaatgtagtttgcatcctcttttttccataaaaatttccccttccactgcccagcttttctattttctctggctttaaatcctaggatttataaaagcagaaaatgttacagttcaaaaggttttttaatgctctgtccaaagccactggtttgaaagaggtgttctccactttaaggtgttctatctgaagaggtttggggagctaggcaaacagagcttttatttcagtgctgagtttaatgttgaatagatttatgtggaggaaagatttttctccttttttcttgggctggttgctacacagcaatgacagatgttttaatggttagtgagtagaatgttatcaaatagtcaacttcaaacatgggaattttacacaccaccaaatgcttattcaaaggaggctgtcctaagtctcatgcacaacttttgttatactgctaaaagtgcattgttatcattgccgtatctcagaggaaaaaaggaaacactttggattaatggctttaatagatgacctaaaaggcataatgtacaaatatatcaaggcaaaagaactaattctgttctggaactctcataagggtctggcaactgatctttatttttggatcctaggtagatggagtccgagagagactgtcagagcaacagtacaacagacttgtggactacatcacaaagacatcttgtcacctggcccctagctgttcttccatgccaataccatgccctgtggtggctgcagaacctcccccctccactgttaaaacataccattacttggttgatccacattttgctcaggtcttccttagtaaatttaccatggtgaaaaataaagccctgaggaaagggtttccttgaaaaaaaaaaaaaaaaaaa

SEQ ID NO: 1121 - DNA, 721 bp, Macaca Fascicularis
  misc_feature (1)...(721): n = A,T,C or G
tcctctttgtattttatttgtaatgtaatggctccatggtaaccaaaaggctgttaataatcttttttgaagttaattgtgagacattaatgtctccaaaatgattttaaccagagatagtggtactgtaattatataaggagtcagatttaaggattcagttactatcttgaagtaacttagtaacgttgaaagcaagcagcagttttagannnnnnnnnnnnnnnnnagtaaattgctgttttagaagagaaatcagatcatttggtaaagagatggcgccttcattaaagcccgagggtaggtccctgtttggtcagtttgtatttctgacccaaccagcctattcataggaaccacttcaaatggaactatgggacagagtgtggctggaaccattcacattcttcatcacttttgtggaaagacacccaacagcatcatcttcgtttatgaatgtgtgtcatcactgctgtggtcctggacgaggtaacatgcttttatatnnnnnnnnnnnnnnnctttactgtgatcctggaaactctaaaatctcatcttaaatgtatgatatatatatagtatttataaagttgtgtgttatgtatttaatctgttaatcttcataaatactaaaaacttctttaaaactacaacttagctcatctgattcttgtcaaacatagggagcttgtaagatcatttccagctaaattattaaata

SEQ ID NO: 1122 - DNA, 528 bp, Macaca Fascicularis
  misc_feature (1)...(528): n = A,T,C or G
caactacgtggagagacccatgtggcacaagatcaagnnnnnnnnnnnnncacatgagtgagcttggaaacagactcccaagttgagcattcagatgaaaccacagcccctgctgacagtttgactgcaactttctgagagtccttagccagaggcacctagctaagctgcactaaaatttttgaaccacacagattgtgcgataataaatatttgtggttttatgttgctatgttttggggtatattgccatgcaacaataaatagttaatacattatgtaggtgannnnnnnnnnnnnnnnnnnnnnnnnnnnnnnnnnnntgaagtattacagtaatatgaagtattttttctggtgtgatgtggccattttcaaaaacaatatgtataatgtgcacatcctgttgctttactttctcttcaattttcagttcttgcttactcctcttttcctgaccttgcacacaaaaaatcatccccaccatttttgggattgatctattggcttaaaaaaaataaagctgtc

SEQ ID NO: 1123 - DNA, 672 bp, Macaca Fascicularis
  misc_feature (1)...(672): n = A,T,C or G
ctacacaggcccatgtagggaaagggctctggtcagaccctcgggtnttggcaagtttctttaggctcatcagcagtgaccttggaccagccacctaatcagactgagcctgtttcctcatccaaaaatggggcccactctctccttagacgatgaatgtgagcatcagcacaggactgtgtagtgtggggcagatgcagaggtggggctctccagcagtggagtgggtgctagaggcagaccccttccctgcagcctgcttggtgatgatgttatgctgctgtgtgttcttccactgaggcaggggtacaggtggcctgggccaggagggctgagcagcagagtaccgagggatggagggagagaccccatgggagggtgccagggggctggctgagcagctgggtggggtccgtgaggtgagaaggtgcctggaaggagctctgatgtaggacagctcagcccaggcaaggggtgctgtgaggacagcagaggcctctgagtctggggtggcctcacccccacaagcagtcctggctactcagaagcactacccagagggaatgcctgggcagtttgtttaatttggtggcacatcaacattgtttgaaacttgttttttgttttcttttctagaatttgatttcttcaggaatgacctccttatttata

SEQ ID NO: 1124 - DNA, 716 bp, Macaca Fascicularis
  misc_feature (1)...(716): n = A,T,C or G
ctcactccgcagcagttggccagtagccagtggccttgtgctcccacccccgatgcgcagtgcagtctgtgttcgtgggcacttnnnnnnnnnnnnnnnnnnnnnnnnnnnnnnnnntttggactctaggaccctgaaggtgtgtacctgggttcttccctctcctcccnnnnnnnnnnnngannnnnnnnnnnnctgnngtcctggaacacagtcgttcaccctcccggctggctggctggctggctgagcccatgggtgctttctgaatcctnnnnnnnnnnnnnnnnnnnnnntttggagtgcggggccttgagcgggtgggagctgtgtgtcgaagtacagagggaggttggggtgggtcagagccaagttagagattttctttgttgccggacgccttcctgaaggtggacgtccccgacccggagagacgttgcggctgtggnnnnnnnnnnnnnnnnnnnnnnnnnnnnnnnnnnnnnnnnctgatgtagcgccagaacgtttgtgcgaggcagctctgcgcccgggttccagcctgagccttgccgggttgcgtcttcggagtgtgcttgtgacagtccttgcccagtatctagtccccgtcgccccgtgcaggaaacgtaggtaggacgttgtgtcagctgtgcactggcggccagtctccaagctgtgcgtttgtatcgcnnnctgtatttgtgtactttaacaat

SEQ ID NO: 1125 - DNA, 1905 bp, Macaca Fascicularis
aactgggtttttgtatcaggcagtgaccttgcactggatgccctgggcattgaatgagaattttgtactcaccgttgctgagggcagcctcagagcccaccatgtatatttattgcttcccttcattctcatctcctgctggactcaggatctccaaggacatctcagggaaagatgctccaggctgatgacaatgggcaggagaggtggtcaccgccagggtagagatgaaaagctagatttgtaccatttccaagatggagttgctggagccggttgctgtgaattcactgggacaatgagggagcagcgtcatgggaggttaggtggacttgcccaaggcttgaccctctgctgacactcagtttcataggtgcctcaggcatagagctgcctagtgagaagagagtctccacagcctcggggcagaagatttgggaggactagaggcagaggtgctgatctcactgctcctagatctgcagagctgatgctggatttggggaaggctcgcatcatcttccttccaggtggtccagaaatattcagagtgcttatacatggaagtctcactacagatactgcagaaaagaatgaggccctgtacagttcacagcaataaaggctacgtgaattgagtgccacgagggagaaataagcaggctgagctgacccagggaggcttctcagaggaggtgtttttgggaatcaccccaagtcacaaatgggaggcctcagcacccaagaggatgaaatcagcccgggatcattccagcccttttgccgcccacagccactgaagtgcttgtctgagtcttgctggaaacatgggcccatattagtgattacgtgccttgcagtagcagactcaaagctttctctgctgagaagtttccagcagttccatcagtgtgagacaggaactgatgacctgaacgacctggagcatggcaaggtccctgctgctggaggttttgggagaggccaggctgcctctctgtgctgctggtgagcgattctgagtttggggtggagggcatgcccccatgaccttccatgtgggctgatgcccccagctctgaccctaccaagtcagctcctgtctgtatgttcccaactttaaaagccaggttctcacttttcctctgcctttttgcttttcatgtttccttgctgattcaggctgtgggtagagtcagttccttgtacctataggaccgaggtccctgtttccttgctgtctgtcagggtagggctgttcccagcttctagagggacccacattcctttgtttgcggcctcctttctctgtcttcaaaccagcaaatgtgacccagtccctctcaccagtgagtctctgcttctttgctcctctctttcttccagctgggaagggagtgccattgtaattacaatgggcccacctggatgacccaggccaaaacccccttgctgcattaaggccaggtgctgtagtttggagaccaagcccgaatgctcaccgcttaatgtggagtctgagcccaactcaccacaaactcaggacaagggctctcaaacccagcagcagccctatagcccacaaaataagtccagtccaagcaaatgggagcagaagtcaaacaaatagattgtccctggggccatgcctttcactttgtagggtggggtattactgagagtcaggctagacctatgtttagagaagcagttttcacagtgactaccatttccacccaacgagaggcttctatttcccatcatagctccctaccctagggaggcctccatctggaaatgggaggatgacgaagctggaatcatctttcctagtgatcctgacatttagacagcacagaaataaaagagcaataaaaagaaaaaaaaaaaaaaaaaaaaaaaaaa

SEQ ID NO: 1126 - DNA, 701 bp, Macaca Fascicularis
  misc_feature (1)...(701): n = A,T,C or G
cccagggttgacaaagctggggactgaannnnnnnnnnnnnnnnnnnnnnnngaggccactgggtaggatgcctgctccctcagccctgtgtnnnnnnnnnnnnnnnnnnnnnnnnnnnnnatacactgtgtgtgataaggcccatgtgtctgtctcggcaggtcctctcctgggagaaacacttcaacttttgcaaaagattaattcatcaccatggcgcccagaaaaaaaatgcaaaagagaaggctcaagttgtggcagacccaaggtggctgcaaactctttgagattttcctcatcgagaggtgggggtctaaatcccctcccttgaacctaggcaggcccnnnnnnnnnnnnnnnaacagaatagcgtggnnnnnnnnnnnnnnnagtttttgaggctaagcctgaagagactggcagttcccacttcctgtcttttgggaataattgttcttgaaacctaagtgctatgctgtgaggaagccaagcagcctcgttgacaggcccacactgagcggaaccaaaccctggnnnnnnnnnnnnnnnntgccccgagctgacagccaggtttgacttgtcnnnnnnnnnnnnnnnnnnnnnnnnnnnnnnnnnccccagccccagtagggccatctcagctgatgctccaaggagcagagatgagccatccccaccgagccctgcccaaatcacagat

SEQ ID NO: 1127 - DNA, 679 bp, Macaca Fascicularis
  misc_feature (1)...(679): n = A,T,C or G
caaannnaaaaggatgaggagnnnnnnnnnnagactttgctggggccgcgtccccactaaaagggctgcgcatgtggtggcgttgatgggaaggacgcgtttgtccctgtgcactccggcctctgcacatgtgtcttgtgggcctctggaggctgagcccgcggccagtagtacccagcagcgtcctgcttgcttttcctgcctggtctatcttcccagctgcggacacagtgcccggtgttgacagtcgggctcgtgtggaggtggggctggaagcagacacgtcagtctggtggggcgggtgatgcccgccacagagcccgggctcccgtgcaccggtgcgaggtgcccacgagcctgttgggcttggatgccacacttggagcgcacaggtgccgggccacctgggtggggccacacaggccgtcacagaggctcgtctggagggggagccctnnnnnnnnnnnnnnnnnnnnnnnnnnnnnnnnggtcatgccagcctggcctggtacggctgagcgattaggaagctggcagcccgcgggtgatgcttcggaggcaccagtgacttggtccacaaacgtgggcgtaaaaggccccatgattcaggtggagcaatggtgcggtgccnnnnnnnnnnnnnnncctcccgccccgacgccttatggatcatctgaca

SEQ ID NO: 1128 - DNA, 1848 bp, Macaca Fascicularis
agagtcatccagccagagccctgagtggctgagctcaggccttcgcagcattcttgggtgggagcagacgcggggcagccacaagggccacagccatgaatggcacggaaggccctaacttctacgtgcccttctccaacgcgacgggcgtggtgcgcagccccttcgagtacccgcagtactacctggctgagccatggcagttctccatgctggccgcctacatgttcctgctgatcgtgctgggcttccccatcaacttcctcacgctctacgtcactgtccagcacaagaagctgcgcacgcctctcaactacatcctgctcaacctagccgtggccgacctcttcatggtcttcggtggcttcaccaccaccctctacacctctctgcatggatacttcgtcttcgggcccacaggatgcaatgcggagggcttctttgccaccctgggaggtgaaatcgccctgtggtccttggtggtcctggccatcgaacggtacgtggtggtgtgtaagcccatgagcaacttccgcttcggggagaaccatgccatcatgggcgttgccttcacctgggtcatggcgctggcctgcgccgcaccccccctcttcggctggtccagatacatccccgagggcttgcagtgctcgtgcggaatcgactactacacgctcaagccagaggtcaacaacgagtcctttgttatctacatgttcgtggtccacttcaccatccccatgattgtcatcttcttctgctacgggcagctcgtcttcaccgtcaaggaggcccgtgcccagcagcaggagtcggccaccacacagaaggcagagaaggaggtcactcgcatggtcatcatcatggtcatcgctttcctgatctgctgggtgccctatgccagcgtggcattctacatcttcacccaccagggctccaacttcggtcccatcttcatgaccatcccagcgttctttgccaagagcgcctccatctacaaccctgtcatctatatcatgatgaacaagcagttccggaactgcatgctcaccaccatctgctgcggcaagaacccgctgggtgacgatgaggcctctgccaccgtgtccaagacggagactagccaggtggccccagcctaagacctgcctaggacgctgtggccgactgtaggcgtctcccgtcccccacaccctcccccagccacagccatcccaccaggagcagcgcctgtgcagaatgaacgaagtcacataggctccttactttttttttttttttaaagaaataactaatgagagaaaaatgaggctcctcactcacccgggacagcctgagaagggacatccaccaacacctactgatttggagtcccaggttccccaaggccagtgggatctgtgcccctcctcctcccagctcatctttcaggaacatgaggattcttgctttctggaaaagtgtcccagcttagggataagtgtctagcacagaattgggggcacacagtagggtggcttaataaatgctggatggatgcaggaaggaatggaggaatgaaagcgaagggagaacatatctatcctctcagaccctcttagcagcagcaactcatacttggctaatgataaggagcagttgtttttccctccctgggcctcactttcttcccctataaaatggaaatcccagattcctggtcctgccgacacgcagctactgagaggaccaaaagaggtgtgtgtgtgtgtgtgtgtgtgtgtgtctatgtgtgtgtttcagcaccttgtaaatagcaagagctgtacagattctagttcatgttgtgaataacatcaattaatgtaa

SEQ ID NO: 1129 - DNA, 746 bp, Macaca Fascicularis
  misc_feature (1)...(746): n = A,T,C or G
aaggttttacnnnnntgaaattatacatcacagcagcgcctaggccatacaatgttagctggaaggtcaatttcagtgtatgatgtactttattaagatgtataaaacatcctgaagtttttatttagttttgggaataggcatcgatgggtggtatttgctttgnnnnnnnnnnnnnnnnnnnnnnnnnntgaannnnnnnnnnnnnnnatgcggtgtattgacgcatatttaactcgccctctnnnnnnnnnntagtcatgacactatacacatggttcatgttcatactgcagcttaaaacaagcaaaatacacagatgataatatactaaattttcctctatcctgtacatttcaaaaaaaggcatatgcaatatttacatttttaatttagtttacagaatggaaccaaaatgtataaatgttatgtttgctaaaacttcacaatgtatattgggtctttgtacattttgcctgacttaccttaaatttaaaatattttttgctatataaactttaacagttattaaacagtgttttctttttgggtacgtattgtttctggatatcaagatgttaaatatatttcttgctattgtgatatgacaagagacttaacttatcttgctctgtcttccactgtacacgctgtatataggggtcaatgtgatgctgctggagacgagaataaactggactagaatagtgcattgtatttagtctgtattgatcatggatgccctc

SEQ ID NO: 1130 - DNA, 78 bp, Macaca Fascicularis
aatggagttaagcatgtccatgcatttattcacactcccactggaacacacttctgtgaagttgaacaactgagaagt

SEQ ID NO: 1131 - DNA, 2908 bp, Macaca Fascicularis
aaaaagaggttttccacttaaggtgactagactaaaaatgttatatgcccaagagcctggttggccaaggggagaggagttgattcaagactgcaactacctcctgtgcctgcagtacacaaatcttacctcaagtctcttttgtgttgggaatatctatgataattgccagctcataatgaagtaccaaatgaaaggcttatagttgagcatcaagaatcaatgtcaaaaaccaaattgcaagtaaagaaacaagaaacttctacagagcaaccactcaccactcatgataaagaaccagatgaaaatcttacacttgggcatcaagactcaatgtcaaaatcagaaatgcaagtgaaggaacaaagcactctcaaaggacaaagaattactactcatgaagaagaaccaggcaaaaatcttgcacttgaacatcaagattcattgtcaaaactggaaatgcaaattaaaaaaaatgaaaaacttcctagagagaaaagacatagtacgcatggtgaagaatcaagtgaaaatcctatgcttaaacatcaagatgcagtgtcaaaaatccaagtgcaattagagaaacaagaaacttctgaaggaggacatagcatctgcccccaacactcttgcccaagactgaggtaccagataaaaattctatgtttgttcatcaagattcagtgtcaaaactccaaatgcaagaaaagaaaaaagtaactcctggaagggaaaggcgtaatactcatattgtagtaccaaatgaaaatgtggtttctgttcatcaagattcaaagtcaaaactccaaatgcaagaaaagaaacaaataaatcccggagtggaaaagcacaaaacatttccttttgaaatccaaaaaaaggatatatcacttgagcatctgttgcctgaggagaaagttttattatcaagaagagaatctcaaaccaaaaaacttcaagctaaagtaacttcaagaaaaaatcaaggtacggataaactgccagataggagttttacacctgaaagtgtagaatcagctgcaggacacatggatcaaattcagacaaatgaagttgaccaataccaaaaattgagaattacaaatgaagcagcctcagaacttccaaatgcagcagaaaatcttccagcagtgtacccatcaattagcgacctaataattcgattggatttaaacaaagtggtcgagactgatatagaaagcttgagaggtgctttgggaagacgcttattaaatgatgaattcaagacacagccaaagagtttccctgggtctgaaatagaacaattgacagatgcatttggaagagatatactaaaggatgaattcaagacacgatcaaagagtctccctgagactgatgaacgattgcgtcgtgcaactgagagaggtacaataaataatgcaatgaagacacagttaaagagaaagagtcaccctgagactggcctaaaacacttgaaaggtgttaatgaaaaagatataataaaagatctaatcaacatacagtcaaagaggcatgcagagactgataaggaacacttggcagatgctattggaagaggtgtaataaagggatcaatcaatgcacaactaaaaggtcaccaggagactgataagaacttctttgcatatgctattggaagaggtgtaaggaaggagtcaatcaagacacaattaaaaagtcacccagagactgataaggaattcttggcagatgctattggaagaggtataataatagggccaatcattagacaactgaagagtcaccaagagactgataaacaactcttaaaagatgctattggaagagatataataaagggaccaatcaatgcacaattaaagagtcaccaggagactgataaacaactcttaaaagatgctattggaagagatataataaagggaccaatcaatgcacaattaaagagtcaccaggagactgataaacaactcttaaaagatgctattggaagagatataataaagggaccaatcaatgcacaattaaagagtcaccaggagactgatgtagaacccttgacaaatgctattggttcaagtaaaacaattggtgagataaagacacaactaaggactcactatgatgtgaatttatttaaatacaaagatatgtccatacaacgtcaagaaggtatcttcaataggagcatcacaccaagtaaattcccaacaaaagtgatcaatttatcaccctttgaaaataaagaggaaacttatgagtactcttcaccctatgcgattgcaccttcaaaagcagtttatagaacatatagggctagttcaagcttttctaaagacatccatcttcctttactgaatcaactcccttcagggcattcgaaagttgttaccttaaaccaaaaaactattgaatttactctgccttctgtgaccaacacaattggaaaacctgcctataaagtgttacatgctgctgcccgaaaatctgtaccacacccatacttttgagaatgaaggaaattctgagcaagataagcaacatgacaaatttggaaatgcaggaaaggaaactgcaagtatagaagccttttgaaaataacactgactcgtgtggatggtgcttattgaaaaacagctggaaatacaatggataaacaggttaggcccagatcatagaagcctgacaaggcagtgaacgtctctttaccatatggaacaattttgaacttctaagatcaagcctttctgttgctgagagtaagaaaggagctctgtgttgaggttccagcttgcttctattcgccagtgtccctgtagtgctttctggtgtgatgtaaaatcaattaaacaaaacttgtgctctgcatgttttgaaagaaaaaaaaaaaaaaaaa

SEQ ID NO: 1132 - DNA, 554 bp, Macaca Fascicularis
  misc_feature (1)...(554): n = A,T,C or G
cacannnnnnnnnnnnnnnnnnnnnnnnnnnnnnnnnnnnnnnnnnnnnnnnnnnnnnnnnnnnnnnnnnnnnnnnnnnnnnnnnnnnnnnnnnnnnnnnnnnnnnnnnnnnnnnnnnnnnnnnnnnnnnnnnnnnnnnnnnnnnnnnnnnnnnnnnnnnnnnnnnnnnnnnnnnnnnnnnnnnnnnnnnnnnnnnnnnnnnnnnnnnnnnnnnnnnnnnnnnnnnnnnnnnnnnnnnnnnnnnnnnnnnnnnnnnnnnnaaaataaataaataaataatataaaataaataaatagtctagagtcagtttctgttgcttataagtaaaaaccctgacatgagatgggaaaactccagcatctgccacatttacgttataattttggaactgtttggtgacaagcatatctggccattagggttttctgcagtgcagacattatttctcataacgaggagactggaggtcagaggtgctgggatgttatgactggtggcccatgatttctgggagggggcacgactatgcctctctctttttttctttctttct

SEQ ID NO: 1133 - DNA, 2450 bp, Macaca Fascicularis
gaccgggaaccctggttagatgcagcagcggcggcagcagccctcccaggtcccacttccttggcgttcctgctgcccgtgactcaaggcaattgacttccatctgaaccctcagctccgaaggccttgcattagaagctagagctttggaggttctgaggacggtccctggggagcaagtggtaggtttcgaggcgcctgcttcccctctgattcctgcagttactgagggagagtgcgctagaaatggctttgctgccgaatgcattatcttgccattttcgtgtcccaatactgaacaaacgatcgcctgatcgatcggtaagattagctttattccttctccctattcctctccatggccccattccctctgcaagccaaaccccaatctctctctctctctctctctctctctctctctctctctctctctctctctctgtctctaggaacttcttttttcctctttgaaaccggcttcccaagggaactgcctgtgtgactgagaggctagtaatctgtttgtagatgatttatattttggctgcagaatgaatccccctccctactcggaatactctccttagagaagatcccccgccccctccccatgggttcgctctcagagctcggatctgtataaagagcgctgtgggagtcttttgccctccgctctagctctatctttctccggaccccgaagcttaagaattatccgcctcactctcttttttagaaataggagggaaaggtagagtggaaattgatttcttgcagagactgaggcgctgaatgatagagggaataaacatttgccctggataaaaatgttcttggtaagtaatcttattttctgcggttgaaaaggaaacagattgcttctcactgccccatcccccactccattcatttatttgccctttgtatgtaaatcacgagctgggtcagtggaaattttcttttcctctttcctaggagagtagtagcttgtaagggtgaatttgaagtagagggttttaaggagacaatatgaacgctttaaggtcctttgtatccgaccttaaaaacccaaagacaggtaaagcacttaaatctctgtttgtttactaaagtggtatttaagtatttctcttatttcctactaactctctttcccttctgaaaataaagaaaagagttttaggcagtgggctcatgtctatgcttttagtacgtcttggccatgttctgaaatacaatttcagttccaaaattgagaatggttatttttcacatttcgcaggtaaattaaagctatagaaaccacttattaaatgtgcatcttggtttcaattattgcaccagatacaagttagtagtagccacaatggttatttgcatattgtggtgatactataaattcataaagccctctggttttccatgagtctatagcacccccagcctgtgcatgttcacagtgaggaaggagtggataggtgtagcagtagggaagaagccaaacggctcttgattgtgcttacatcatatgtcaccaagtgtggagaataacatgttttgcaaattgcatcaacttggttttcaagagtaaactgatcatttttcatgcacaaaattaagggagatttgctttaagagaaatcatcgcatttttaattataaagtatattttactggtaaaacatttaaattaaacttttttttgtgttattattctactgtaatccatcatcctctaaatttaattaaaaaaagataaactaattgacacaaaatgtattcctgatgaaaacaggatggctgaaaaatcatctgaaatgtataatattaaaatgttattggtaagaataagcttcattttagaaaatcagtattctaaaaatcagtagtataaaatttcagaagagagataatcaagtgacacattgcaagacaaaatatgcatgttctcaactatctatatagtctttacagccatcaacatttacaagagaaaaaaaattcagtaagggcatgttggtataacatttttttccttctctcttcaggctgttgtccggctctaatgatgtcctagagcagaagtgtttcttctgttgtctcattttaccaagaggatgatgtctgtgtatgtctctgtgttttagagagactaacaaatgctgctaagaggatctgaggttcacataaagaggctgaaaattcggaattactttcattgcaaataaatgttaacaattgtgaaagttagagagcatacttttcacataagactttgatatgctgcctaaagctacttacaaaatttgctattcagagaaatacgtttgtttattgaggacccaccctgagttaaattacaaaaatgtaacattcagatttttattttatatgtgaaatcaatgtgtgattgctgttcttaaaaatttgaaaaaaaaaaaaaaaaa

SEQ ID NO: 1134 - DNA, 2221 bp, Macaca Fascicularis
ttaataagctctttaaatagttgaatcattaacaacctggtgggaggtaagtcatttaattgaaccactaggaagtgtattttcttttctttttctgccaactttttggtggcatttgtaaaagctgatataaaaggctctgcgatgttattttcagttattccataggcaagcctttttacagagcatatgtctccagttggcagcttgagatatttttgagcatccagttctagctaccagtgcctcccaatgcttagtgcacagtactgtagactggccatcacccctctccttggaaaatgccactgtgctgtttgaaaaaaagcagctttttagggctagagtattttctataaacagaagagctaagttcctgaagactaagctagatagatgcagctatatgtaaattgtatatttttatgaacttttgaagcacacactcccgtttccctctgcgtagctttgtggggatttcatgtgtatatgctgtctgaaagaatccagaggttggagtgccaataggaaatgaaaacaaatgcctcatactacagacagcctttgaaggtgaccagataactgtcttcattgtgaccagctggagtccctccttgcttgtgaagaaggggcttttgtaccttgttggagatgccacctcagaaggtcacgccgtgcaggaaaaaggttttattctctcgcggtgtacattagaatgtcagatgcctgcatccatgtggaccacaatgggcctctaaaattcggtgggcaggggttttgcttatgagttttctctggaagccgattttactcctggatgtattgaatgccccttgagctttatgagatacgagtccacatggataaaatgtcagagagtaaagttctacagaggatattccaggaaaaggccatgtctgtgcagtcctagttccagacaggtgagaagctcccggagctcctggctaccttgacaagctgggtagatagttattattctgggtaactgttgaaactttgacttttgaacaagtaattcctggggttctgtctttggtagcatcaccagggatatttgggtaggacggacaggggacacacagctaccttttctctcctgcccatcatgtttggctatactcagcaaaaatttaaggaatgtaacccttctcaaaactggccattttcaggggaggcttgggagagcagtagtatggtgagccccttacagatgagcacccactcctccttggtgaatcctgccttcagatgcttacccagtggtccctgcatctagtaagattatatttccagtacacttccttagggcagaaacaccatcctgtcaggtttggtcagtcccttctccatgaagggagtcatggtgaattcctgaaaatcttcttccttctgcagacggttggaggggtcccttagagaaggcatccagagacataaccaaactgaatatcaccccatattgattttcggaattgactctcaaactctgtgcagaatcttgtgttgggattatatcttgacattcctgtcatgttatttttcttaactggagtgtgtgctgcctttcaggtacaatttttgtgtaataaaagccagtgcattaagtttatatagactactttctatgcaagactgagatatggaatggatagcaagagatatgtactgttgggtacacggacagtaagtgtgttttcggatggagtaccagcaccgaaaatgggttgagggaggatgagttgtatatatgtttctgcccactaattttgagcagccatattatgaattaaatcatcacagccaagtaataacccaagaatggtattagtttcatgtgtaatagctcaaatggaataagcatgaatgctggagtggaacattatcctcaaatattctatgtcacttctcatttaaaggctcttgttatgaactactagaaactttaggcaaaatcgaaagtatttgtggcaaaataaaggcctattctactcttatttaaagtgaaacactgtatacttgtttctctccaaagtgaaattaggtatttataatttcaattgcctcgataagtttccaagtcactgaaatctgctgaaggttttactatattgttgcacaattttaagataatttttgtctcaatgtcaacttttttcactgaataaaaatttaactgggtcaagaaaaaaaaaaaaaaaaa

SEQ ID NO: 1135 - DNA, 3029 bp, Macaca Fascicularis
agtgaccggatgctggcggggattatgtggcagcctgcaagtagtcccagtgcggcgctgatttgtgtctaaattagctttccggaggactatttcaaattagtaaagagataggaggcattgtctattatgtctctcccgaaaacgccctccaccccgctaaactctgcatcaacgtctgagagcaaaaagttagtgtctgtagccacggaagggacgagaggacttcctgagctaaaggagaaaaaaaacatggtggatcgttcaaaaccccttcctacttcccttctgaatgagttcattcctaaagaagttcttctttctctgacctatgcggccaatgctggtccttgtcctgaaaacttactgcctcctaagaaaattaaaaccccgaagggcactcttccacgccttgtagaccatgtctggcatcaccctgttcgaaggaataaattcaaatacctgattgaccatcccgtctccctcacgggagctggaagggatatttcttttctgtatgatgttaaatataccaaaggacagactagggagaaggcagtttgtcccccacatttggcccgttcattacagtcacatgatggtgtcattgtgccgcataagccaaagacactaacagatactttgattcctgaagaatttcatattgtgtcaagtacaggagtttcaggtttggagtgttatgatgacaaatacactactctcctcacagatagtgaaaacaggctattgctcttcccatccatgaaacctaataaaagagtagaagtggcccagctgaatgatgtgatggatactatgctagagagggctggtgtggaaaatcaggaatatacaggaccaactaagatgcacaaactactacatatattgaagaaggaacagaccatttacaacacgatatttcatgaacttattcgacaagtcagtgtggactgtgcagacagaggagaacttctgtctaaagtcagagagaggtatgtgcaaatgcttgaccagattgcccggcagatgattgatttctacaaagacttggtaactcagcgagtgatggaccagcgcattttagaagaattgtataatttcaagcatgttattgaagaattgaccagggaactgtgtctagttcgggcgcatgatgtgaaattaacaaaggaaacagaaaaggctcacaaggatttggcgcaagctcttttagatgcggaaaagaatgccaaaatggtagaagaatatcatgacttatatacattacaaagagaaaggatggagaatgatatgaaacagttaatggcagaaagagatatctggagctcagccacatatgaattggccctaaaggtaattgaaagaaatagagtcatattggctagaagactttaccttaatgaaagaggctggaataaatacactaagcatttaatcatactgctggcaaacaaggatactgaagaccttgcattgttgcagaaattgacacagaaatggagaaacttagtgaataaatttaaacaagaggtagaagaaatggaagagtctacaagggagacactgaaaattgttgagaaaggacttaccaaatggcaggagagcttcaatgaaaaagacattttatcccctaataacggaaatgtatttgattcagttattttagacttcaaacagtggcagaagatgctgaatgagaaaaaagaagagtttactggggatgttctactgtcaaaatatgatactctcaagattattaaacatttacaggaaaactggacagatattgggcttgggatatttaatcgccataaaagtttggagggggagttgccatcagagcgacagtacatggaggaaattatcaaaaacatacaaaaactctacaaagaatatgaaataagaataaatggggacaatggttactccaaaattcttccaattttgattagttctcttgacttctgttctttcaagttggaaaacctggagttccctgatacacctcttgaagaatggcaggaaatagatgaaaaaattaatgaaatgaaattacagttggatttattgttaaaccttactggtattgttccacagcacatagacatggattctgtttcggtactccaagcatacatatttaacatgattcaacaatggcttttgaagataggcaatgaaattaacaatggtaacattgaacttcagcgtcacatggatgagttacatatatctatgatccagtggatggtaaacttgctgattttaatgatacccaactttactgaccaagactgtctcctaaagttggaggaggaaagtgctgagaaacacgatataggagttgcgcgattagagctagatgcgattgaactgacaaggaagttgtaccaatactcccgctatttgagcagttcttgcgaagggatggtaacagcaatggctctgagtaaatccactacctcacacagaaatgctactgaagacctttatgaggtggataagttgaagaaagaatgttatgaatggatcaacacatgctcttgcctcctttctaatatcaaaggcagaaaaattacattattgacatatgaagaaatagagcagctacttgaagaggaggctgtaaaagaattcattgagcctgaaatggatgagtctcttctctgttccaggagaattctgctcccatagtaaaacctaattttcaccttcccaacagaagagctgccctttctcaaagttctcaaagttctttctaatcgccttcattttcaagtttttaaaagctacctcttactttccttccaggatatttggatgcctgaaagaagtttatttccaaaagtcttatgttcaaagcatacactctactagttttaggaaaattcttattggcctaaactgagaaggtgtatgtatggaaggaaaaataacttgtgtgtgatacctaggtggtcagcaataaaaaatctgtgtctttttcaaacttaaaaaaaaaaaaaaaaaaaaaaaaaaaaaaaaaa

SEQ ID NO: 1136 - DNA, 1715 bp, Macaca Fascicularis
acagtgattcaagaggtttgagaaagcaggactcatgagactaaaacttaggaaattactatcctgccagcaatgggacacctctttggctaccacctcacctaaaacttgattgaatcagaaaattagctgaactttccacaccagtctcctgctttttaattcatagcatcctgtactaaatagctggggctttcaaaagcaggtgctatgtatatacagaaagaaatacataccttctgttgcctctcaaaatccgttatgctaaactcaccaaatatgttacacgttaagtgttttataccttgtgtttttagatctccagttaccaatttgctgtctatcctcctaccaaacatgatttaaccaattcttatcctgattgatattacaattcttgtaaataaaagaatccttttctccctctttatttttaccaagtagacttctttcattgcaaataaacataaattacaatattttaaggctctttgacataagcatccgctttcttacctaagcaggtaatacttttgtatacctaccagaccactaaagaagctaaatgtcaagaatgagtatttcagtaaaacctgcagaaattgtaatgaaatgggacaggtttaaaaaaatgccaagaaagttaaaggtagactccttacttttatatttcaagttttctattttgtatcaatatatgctgcattttctgattgaaattgctgttctgtccaatgaaacttgtgattttctgtagttgctttttacatttgaaagcaaactttcatactgtgtgtgcttaaccgtaccctttctgttagggatttgactaaaatactctaactgtttcattaattcctttttatgtgcttaatgtatgtggcatttatggctttgttatctcaaaagctatctgtggacaaaatccatgaagcctgttgactgtgatttacacacgtgaaagaaaaatatcaatttcctcctaagcagtgaatcagtgaataagaaactgttcagtggcctctgattcctgacccttttacccttcatggccttttttctattcttaatcattccttgagtaattgtgtgttcttgtaaaatgcaacatcaatttacatgcaatcaggtatggacacaagaattgcttgtgctctcgatttcaggactcagagataccataacagtcacaggactggcgttcactcagtatttttgttaataatgtggctttgctataaaataagttggtgtttcctttgctttggtactacaagagtttaaatgttgcagcaaatgaaagaatgaaaacacatttgaaagctggtgtcaaaaatcatcagctgtacttacaaaagttgttgtgcagcttctgaaatgtagtttattgctgtaaatatgtacaatttatgttagctcgtttattctgaaaacacaaataaaacttttttttaaattacaaatgcctacatataaaaagcttactttgtactatgttttaaaacatgcaagatgtcaggaatatctttttgtaatccttaaaaatgtttagaattttgaatctatcatttgagaacttttattataaagtttaatacaaagctacatccctttatttggaagaaattcttttcaggattactcagcaatcaaaaaaaaaaaaaaaaaaaaaaaaaaaaaaaaaaaaaaaaaaaaaaaaaaaaaaaaaaaaaaaa

SEQ ID NO: 1137 - DNA, 760 bp, Macaca Fascicularis
  misc_feature (1)...(760): n = A,T,C or G
tgataacattgatancnnngctgacttaactgtaaaaccaaaagaaaagtccaaaaagaaagtggaagccaagtctatatttgatgatgatatggatgacatcttctcctctggtatccaggctaagacaaccaaaccaaaaagtcgatctgcacaagccgcacctgaaccaagatcggaacacgaggtgtccaacatctttgatgatcccctgaatgcctttggaggccagtagagcatacagggtatccacatgttatcctgcagctacactgttgagttagtgatgatgttgtatatgcttatggtcttaactgggttacaaaaagcaagtattagaagagctagctcatcttttacccaatgtacttagtatttttctgcactggtttaatcacgcttaatactacaaaacaaaaataagtatttcacagtggttggtttgttttgtttttaaaccatagtttggtttagttagccttgctggggcnnnnnnnnnnnnnnnnnnnnntaaaagaagcaatctctttgtggctttcatgggtagtcagggaatctcagaggtagcaaatgccacatgaccaggagtctttgttatatggatgggaaccctaacttagggcctgggcaggtgaaagagaaagaaggtgagagattatacttcacgagtcttagcaatatgggnnnnnnnnnnnnnnnaattctgaaggtgcctctgcatgtcctccaaggcagggttggcaaactatggccccccact

SEQ ID NO: 1138 - DNA, 702 bp, Macaca Fascicularis
  misc_feature (1)...(702): n = A,T,C or G
ttaaaagcaaggtagtgaatcacgagcttgaatagggctctgtttttcttactggttttgtnnnnnnnnnnnnnnnnnnnnnnnnnnnnnnnnnnnnnnnnnnnnnnnnnnnnnnnnnnnnnnnnnnnnnnnnnnnnnnnnnnnnnnnnnnnnnnnnnnnnnnnnnnnnnnnnnnnnnnnnncgataaatattagctaaaagtatacatgccaatatacatgggttaatacagataccatgatggagtnnnnnnnnnnnnnnnnnnnnnnnnnnnnnttcagcttccgaactcaagtgatccttctgcctgtctttcaagcagctgggaccacagatgtgtgccaccacacatggctaggttgcccaggcgnnnnnnnnnnnnnnnnnnnnnnnnnnnnnnnnnnnnnnnnnnnnnnnnnnnnnnnnnnnnnnnnnnnnnnnngctgttcccagccctgaggttcttgatagtctaggtagagagaaaaattaagtaagttatgtggaaaacatacattctttaggagagtttttcctggcaccaaataaatactcatcccacagagttagagggatattgagtactggacttgatnnnnnnnnnnnncccagtactaaatttgtgaacttggacaagttatttaacctatcatgtataaatgtataacatactgtatgtttacttttagtcacttttgata

SEQ ID NO: 1139 - DNA, 1797 bp, Macaca Fascicularis
gaaaaggacgtccccattccccatcctcgcggcctcccgtcctccgtcaccagccccctccgtctcctgcatcacaagggaggatggggtcgactctcacgatccccaaaggcctgccccggcccctcctgggccagctgcctccctcctgtgggttctgatgcctcctgggcccacggcgtcttcccagcccagggcggccgcgcctccgctcctgtggatctcccaccctctccagcaggtggtgtcgtggaattctcagtcttggccacttcagtggatccatatttccatcatttgccttttacctggaggaattctctaaatatttttttgtaatgctggtctgctcgtgatatattccttcatcttttgtagagtcggtggctctgaggctgcgaggcgggacctgctgctgtgctgggtggctggacgtgttctacaatgggacctggggcgccgtgtgcagcaatgccctgaaggacctctccttgtccatcatctgcaagcagctggggtgtggggagtggggctggctggagaacaggcccttcccctctgccggcaccgggaccgcctgggtggacaacatcgagtgccgtccgctgcacaactccaccctgtggcaatgcccctcccatccgtggcacccgcattcctgtgaccttcgggagcaggtctggattacctgtgcaggtgggcattagaggtctccgggggtgcccgggaagagagtcatctgtcctgacaggtcactggcaggggatgccatcgaatcagagcttgggcctgggggtcactgggatccacagccttccttctgaagcttctccgggcaccgatgctctcagagctgctgtttaacctgcaggattgtcagaggacaggccacaggctgctggggagcccctcaactgctcctcctcgctcggctgcccagaggagggcgcgctgcgcgtgcgcgggggcgaggaccgctgctccgggcgcgtggagctctggcacgcgggctcctggggcaccgtgtgtgacgacggctgggacctggcggacgcggaggtcgtgtgccgccagctgggctgtggtggggccgtcgccgccctgggggccgccgcctttggccctggctccggacccgtgtggctggacgaggtggggtgccggggcagcgaggcgtccctgcggggctgccctgcggagcggtggggacgcggagactgcgcgcacaaggaggacgcgggcgtgcgctgcttgggttccccggagaccactgtgctgcccctgccgccgctggcccctcccttggcccctccacctgcccacaaggcctgggccctgcctgagatcacctgcctggtccttggctccctcctgggcatcatctccctgttcctgggcacgcagtggtgccgccgcagagcagcctgcagggagggtgtctatgaggacatcggagccttccccatggaggagaaagacgagggacctgcaggatccggggacctgggcctggaggaggactatgacgatgtgggagagcctgaggatggcgctggggaggaggcggaggaggccagggtgctgctgagccccgcaggtggggctcctttcagcctgggccccgaagctgaggctgggatggaagaccatggtggcctctgccccaggacgtgatgacctggagctgacagtggggatgtcagtgtgtggagagagtgggatacaccagggaaggctggggtcttccttgtcctcactcccaaaacagatgttattaaactctcttgaattcaaaaa

SEQ ID NO: 1140 - DNA, 761 bp, Macaca Fascicularis
  misc_feature (1)...(761): n = A,T,C or G
gcagcatgagnnnnntgnnnnnnnnntgnnnnnnnnnnnnnnnnnnnnnnnnnnnnnnnnnnnnnnnnnnnnnnnnnctgatatatgcactgcagagacaggaggcatcgcagctgtgtcnnnnnnnnnnnnnnnnnnnnnnnnnccacgctggcatctgatgggactggtcagctggagctatgataaaacatgcagccacaggctctccactgccttcaccaaggtgctgccttttaaagactggattgaaagaaacatgaannnnnnnnnnnnnnnnnnnnnnnnnnnnnntgtttctgtatatccatctatacatgtgtcattgcgtgaagcagtgtgggcctgaagtgtgattttgtctgtgaacttggctnnnnnnnnnnnnnnnnnnnnnnnnnnnnnnnncagtgaagggtgagtagacctccattgctggnnnnnnnnnnnnnnnnncactactaggacagtcnnnnnnnnnnnnnnnnnnnnnnnnnnnnnnnnnnnnnnnnnnnnnnnnnnnnnnnnnnnnnnnntccactnnnnnnnnnnnnnnnnctttcccacctttcagnnnnnnnnnnnnnnnnnnnnnnnnnnnnnnnnnnnnnnnnnnnnnnnnnnnnnnnnnnnnnnnnnnnnnnnnnnnnnnnnnnnnnnnnnnnnnnnnnnnagcagcagaactgggatgtggtgcatgcgtttgtgtacatggcnnnnnnnnnnnnnnntccttttccttccccatctcttgtacacat

SEQ ID NO: 1141 - DNA, 114 bp, Macaca Fascicularis
caagtgataaccatcacaagataaggccccagtgcctccagacaaagcagacactgccatggacaccgatgggaccaagtccaaatggattaatgcaggacaggatagccacgt

SEQ ID NO: 1142 - DNA, 748 bp, Macaca Fascicularis
  misc_feature (1)...(748): n = A,T,C or G
gagatangnnncnnntcgccgccannnnnnnnnnnnnnnnnnnnnnnnnnnnnnnnnnnnnnnnnnnnntccctctggtctcaagcgatccccaccacctcagcatcctgaatagcaggtgcaaactaccacactcagctatttaaaacaactttttggtagggggtccagtggtcggggagagctttgggggnnnnnnnnnnnnnnnnnnnnnnnnnnnnnnnnnntactccacccctttgtgttcaggtttcctcgagggtcttnnnnnnnnnnnnnnnnnnncacctacttgtagagtgctcgtgcttgtgagtgcttgcacaggctggtctcaaacnnnnncncaacaagtgatcctcctgctttgacctcccaaagtgctgggattacaggtgtgagccactgtgaccggtcagctacttaatatattttacacactatatcccctctttgattttgcagcaagagaaaggcccaggccttaatatttcttgcttggatattcagaatcataaactaaatggttctacataatgagctaaatgattcaacagcttccttctttcannnnnnnnnnnnnnnnngccacagtggtctggagacacaaatgtctccagtggagacacaaatccctggtgcccctccggagcctctgctctacctgagaagatgaaatgattacagacaaagccatcaaccacagcggagacactgtgggactgatggccagggaagaannntttga

SEQ ID NO: 1143 - DNA, 672 bp, Macaca Fascicularis
  misc_feature (1)...(672): n = A,T,C or G
agggaaaacatgtatcntggtaagttgctgctgcnnnatgaaaaggaatccatgggctgctgttannnnnnnnnnnnagaaagtgtggtttcaggacaatgtgagagtggaaagtaggggatgggagctgcctcccaagacgccggcaagcccatcactaggaggaccatggcccaagggcatggaagcaggtggccgctgagagggccgtcggacatccccacctccaccctcgtgacaggtnnnnnnnnnnnnnnnnnnnnnnaaaggacacttcgcctgcttagtcaaaaggtggcattgaatcatctcggctgtcacatgttttgtttagtttcatggatagtatgggaccaaacttgcaaattaatcattgcaacctaaggggaaaatagaagaaattaaggtggcggagggagcccatggggacaaaagtaattaaaatccactgaatttagctatttcacttggggcaacatttaatctccaagattaaatcttggtttatggggaacattgtatattttcatctcatttttatgtatcgtctttaagacaaattgttaagtgcaaatgaaaatcaggtaacatacaaagnnagntcaccaaatagttaaatttcctatgaaagtgagtgaaatacatatttttataataccatgttcaagtgaa

SEQ ID NO: 1144 - DNA, 716 bp, Macaca Fascicularis
  misc_feature (1)...(716): n = A,T,C or G
gagttccagacaagcctggctannntagtgagatccctnnncttaaaaataagttattgccaaannnngggcatttggaaagaagttcattgaagataaagcgaaagtaaaaaaataagggggaagggttggttaggcaatcattaatnnnagggcagaaagaagtacaggataggaagagcataatacactgtttttctcaacaaggagcaatacatacacagtcataatgatgtggtgactgcttcacccctaaatatggtaagcactttgggacaatatgggaggaagtgaagataacgatggtgtaagagctaaatcctcacctgtcatatccagaaatcactatataatgtacaaaataatcaagaaatgactaagtagttatgtgagggaaaaaacagaagacattgctggaagagttaaaagtcattgctctggagaattaggagggatggggcaggggactgttaggatgcattataaactgaagaagctttttaaaattttatgtattaatatatgcattcacttgaaaaactaaaaagataacaatttggaaaaacccatgaaggtaactaacagaaggaaaaattaagaatgaaaattgtttgcctnnnnnnnnnnnnnnnnnnnnnnnnnttgttttcattgtaagacttttggagccannttaattgtacttaaccattttcatctatttcttgaataagaac

SEQ ID NO: 1145 - DNA, 731 bp, Macaca Fascicularis
  misc_feature (1)...(731): n = A,T,C or G
agccgtgttngnnctgttgacttaatgctcataattttgagaagtccaggagtaaactaaatagaggactcatttgttatacttgaatattcttttatttgttgatgtaaaatatgtaatctctgattttatagttaacaataaaaataaaattttaagtgagtgaaagcagtgatttaaatttannnnnnnnnnnnnnnnnnnnnnnnnnnnnnnnnnnnnnnnnnnnnnnnnnnnnnnnnnnnnnnatatttaggaataaaatattagctattagtgtataacaattagatatatgttaattgagcactacagagcctgaaagcttaacaaagtggggctatagctagtaattttttggtaaaaatatagtgatctttttctacaggttattattataaaagacaaattatagttgtaaattagattaatgaattttgtgagttttaaaatttgtatgaaccatgtctccccttgtgtcatattttccaataatataattacctaacaatgacagaattacacattttccctttaattctctaagcattgagtaaacagaaacatatagggatgaaatatacacatgccaacattcaaaactttgtactaactagaaacaaaagtaaaaggggatttataaaggaaaatgatggagacattttagagaaattaagtataaactgcaacattctgttttctggcatgtattctgggtagcttctagttac

SEQ ID NO: 1146 - DNA, 402 bp, Macaca Fascicularis
  misc_feature (1)...(402): n = A,T,C or G
gcaacacccttccttgcattgtcngcnnnnnnnnnnnnnnnnnnnnnnnnnnnnnnnnnctcnnnnnnnaccttttccttgaaacctcctctgacccttggatgaatggtggtgctccctccgacttccnnnnnnnnnnnnnnncacgtatgtcatagcctttggcgcctgcttcaattgttagtttatgagtctggttgttcccattgggatgtgagcccccgggagcacgggacaatgttttgtctcatctttgtattcnngttgctcggtacagggcctgggatggtgcaggtgtttcatgaaagttaggtgaaagaatacatggtgaatgaatgaatgatgcataaatgaatataaaaatgagtaaaaccttgcagagagtgggaggcatacgtcatc

SEQ ID NO: 1147 - DNA, 2060 bp, Macaca Fascicularis
ttttccagtaacatttcaggaaggaggcagagatggagagagataaatattggagacagtatgtttccgaattacatacagaagaaaatggatttaaaagtcttagaataccatttttagttcttaagacaattataatttacatttaaactctttgacactagtggcattttctaccctcagtaaggaagttaaatggcaaagcagttaactgtaagtttgggagcttagagcagttattatattaatagttgatctaagattataggtattttatgattgatagtagctcttggaataaatacaaaactgatctattatccaagtccatgaatttctgttcagcgcagagagtataagagggtttccaatggctagaacaaaccagtgagggttttgttgggttttcttcttggctttctgtctgatgttgtgtttgtatgaggatgatttcaggtttgtggcatgttttgatacctttacatggaacatttcaaatacatgaaattgaatgaggtgataagtccactgtgttcaggaaagtagattagagaggtgctcttggttaaatccataaaaaatgtttctgagaggcccttgcacttgcgtttaccacctgtttacctgtagttcaattgcatgaacaccattctggaaaaatttccctgttaccgtgagccatgtttgagcatattcaaaataataacacatatttatgagtatgttcttaaaaattaaagacaataatgaaattacagagccattaaaaataaaggcaatgttttaaatttgtagtctgactcttgtcacaataaaagtgatttcttagctgtgattgttatttggaagcctcttgacatactattgtgattttattccaaccagggcaaaacgtgtcatggagagctgttgcttggatataatgattggcacattagatttactcctcaaatgtgtctgtggcctcagtaaacattgttaactgactgaaaatgtatttcatgctttatgagatacaaaactgagtggtaaaaataagaaagttaacatttctgtcttaagaaaagccattagtaaatagggatattaatcagaataatgaatgctattgaagaaatatgtttatgactgtctctattccctaattttcagaatgtttatttttctgtaagattctatcagatatgttgacagttgtggaaccaaaaagctttttagttacttctatttattgactttttttagagtaaataggggaaaatcccttttccattaataatctttcaagccacagtgagaataaggattgtttgaagcaacagcagcttagcctttgctaaggtgctttaaaaatgctgttagaataatataccttccagaggcacctgctcttgttcaaataggcttgatgtttctgtctgtagctgtcagaaaaatgaaagccaaatacttaaaaattaatatctcagaacacagatatcccagaagttctcaggtaaattgtatggctttatccaccataccaacaatttcaggttgtttcgcttttgcattaatggtaggctttccaggtttatatttaatgggcttgggtattgagttaggactgcgtggcccacctgcagacaaggcagccccttgcctgcctgataatgcacagggactgagacccataccctcatcgggagtaaccagagcctcaaagcaaggggcctgtattctcccaagtcaggagcccgagcttacttttggcaactttggagcttgtactgtagggttacttctcaggccagaaatttgcatcaaaggactaagaaaaatatatctaaaaataaacatgaaagccaagacttcatgccaggaactccagccacacacatcctgttggctggttctctagtctttctcctcacaagttctgattcttttaaaccaagcggaagcctgctccgatgacttggacttatgtctgcaccagggtctcattcctgtgtcttcaagcttttccatggagtggcaaaatgattcaaatccagaaaggaagggagtgaagttattag

SEQ ID NO: 1148 - DNA, 537 bp, Macaca Fascicularis
ggggggttcatatatttagttagaagagatgaggaagatttgaaaaccactggatgtaccaggaatttttttcttcaaaaatattttctgcttttatgagacttgaatatctaataaaagacagtatttagccagtcagggcagctcacgcctgtaatcctagcactttgggaggctgaggtgggtggactactggaaccctggagttcaagactggcagaagcaacagggcaaaacaagtctttacaaaaaatacaaagccggtggtttatgcctgtagtccaagctactcaggagggtgagatgggaagatcacctatgtgggagttggaggcggcagtaagccacgatcgtgccattgcactccagcctgggtgaccatctgagaccctgtctcaaaaaaaaaaaaaaaaaaaaagactacattcactgtatacatggccttttccccctaactagatatgtaccttcttaaaggcaaggattcttcatagtgctttgcccataataggcgctgatattcattggatgaatgta

SEQ ID NO: 1149 - DNA, 715 bp, Macaca Fascicularis
gaagagcatttgcacagagaaaaagtaaaaagatccatgaatgtcattttttatcttttattttcagttggctgatgttggaatttttgttcttgtcatgaacttgtaaaccaatcttgccaagatacaagttgttttggtttttcactacgatgacctcttgttcctcctgtcttgactgctgatgtttcctcaatgattctattgtctattttatgggaagcagccttcctataggtttccttttacacactgcagggctatctttatactttaaaaaaaaaaaaggacaagaactgtcactaacctcatggggggttttcgtaaaaccatttagcccaccttgagcaaagggtagattctgtgttgtttttttaagctcattgtaataaaataaatctaattcagcattattgtgctacctcaaaggtaaaaaatgttttaaggtcttcttttggtcctgagttctgcatacagtgtttgaaatgtctttcaattggaattattttttaaatcattggagtgaattttattttaatctgttttaaacttgtattttaatctcagaagaataagtgattgaaacgtgatcaattcttgctctgtggtgttaaacatataatgaacagtcattaagaattaagtcactgtttgccataaacaaggttgatgttctttttgttgttgttaaggaaaccctagggcttggctttac

SEQ ID NO: 1150 - DNA, 135 bp, Macaca Fascicularis
  misc_feature (1)...(135): n = A,T,C or G
gaggctgctgacatgggaaagggctccttcatgatatgcctgggtcttgagataaactgaaacctgnnngggaacgatggtatcaccattgatatctccttgtgaaaatttgagaccaccaagtattatgggact

SEQ ID NO: 1151 - DNA, 1604 bp, Macaca Fascicularis
  misc_feature (1)...(1604): n = A,T,C or G
aagcgtaaatcagagacattctaacagggttgatgaaaaattgaaacatgaaaactctgacagtaagcatgtactccaaaattaatgtaaagtcgattctgattttctcattaatttttgctaattcttaggttctcaggactaagtatgtgatttgtttgctttgtgagtggcttccattgagcccaggatttccaaatgtattataccatgaatagacaatacctagaatatctttaaattacaagtactgcagttaattttcagtatctcttcacacaagttacacttgagacttttaagtttttgaaagacacagtacttttctgcaccttcctacaggttgtttttcacgggaaaagagaaaactgacagttggcaaagcaaaaagtttccagaccacagggtgtctgctacttgcataatcactgaagccaaaatttccattttctacaaggcgactggagcactttcatttctggttaacctgaactgcagatgaaaatgaaaatccccccgcccccaacccacaggctgtgctctcagcttttcttggttccatttttgtgacttttcctgtttacagtatctgtgccctctcattttttttttattttttatttttgactcattgatactgtaccatgacgtctaaaaatacagcctaacaactggttttaagcaacgaggctgtttcttttgggagaggaacagcagaaatatcctgcatgtttttatgaaaataaacatttgacagtctgttcttggtgcctaataggagtttctaattggaaaagcacagtcagaatgtaaagagaatcttgcttttcactgcagtttcttccatgtagatatatgccctgatttttccctctcatgttgtttgttgagcacctttttgagcttggcccagcgccttataaactgtgggacctcagacaagttattctcaacctcctggaatctgagattgtggaaactatctgcttcacagggtaggtttgggagctcaatggagaaaatgtatgtaaaagccgatgacatagacaaagccatcaacacatattaacttgcattttatgtaggtaagaacaaaggtatccttgcccaagacatgactggtcacaatcaaatatggtgttagagtttaccaccttccttccccagctttggacatatggacagctaaaaatggtggttgtaatttagtctgttgattatcactagaaaaatgagattaaatgaatccccagctattaggtttttgggtctctccagggtttaactggtgggttgattgtcagcttaaatatgacagcttaatgtcttaataatgtagaagaggctggccatgnnnnnnnnnnnnnnnnnnnnnnnnnnnnnnnnnnnnnnnnnnnnnnnnnnnnnnnnnnnnnnnnnnnnnnngactagcctaggcaacatagtgagatccccatctgtacaaaaaattagctaggtgtggtggcacttgcctatagtcccagctattcgggaggctgaagtgggaggatcactcgaattggggaagtcaagactgcagtgagtcgtggtcctgccactgtactccagcctgggtgacagaa

SEQ ID NO: 1152 - DNA, 718 bp, Macaca Fascicularis
  misc_feature (1)...(718): n = A,T,C or G
aatataaaaagggctttataaccgatctnncttttgacatactcactttgagtggcatatgcctgggaaaatatttaaaagaaagaaaagctatttgtacaaannnnnnnnnnnnnnnnnnnnnnnnnnnnnnnnttttttgtttgtctgttttgnnnnnnnnnnnnnnnnnnnnnnnnnnnnnnnnnnnnnnnnnnnnnnnnnnnnnnnnnnnnnnnnnnnnnnnnnnnnnnnnnnnnnnnnnnnnnnnnnnnnnnnnnnnnnnnnnnnnnnnnnnnnnnnnnnnnnnnnnnnnnnnnnnnnnnnnnnnnnnnnnnnnnnnnnnnnnnnnnnnnnnnnnnnnnnnnnnnnnnnnnnnnnnnnnnnnnnnnnnnnnnnnnnnnnnnnnnnnnnnnnnnnnnnnnnnnnnnnnnnnnnnnnnnncgtgcccggcctcactcagnnnnnnnnnnnnnnnnnnnnnnnnnacaactgggaaatggttaagtaaatttgggtgtattgctagtgctatcacagaatgttatatagccattaaataatattgatacatgtaaaattgtatgcaaaaaagtgtgagattcaaaaatgttaataagaacataaattatgtttactgatatgtgtgaaannnnnnnnnnnnnnnnnnnngaaccagaagataacatgtaattcacttcagtttaacattagggattctttatttttcttctgttaa

SEQ ID NO: 1153 - DNA, 984 bp, Macaca Fascicularis
  misc_feature (1)...(984): n = A,T,C or G
cccagcagctgacagcaggccntcgatgagcagcggagcggagacgagggccaaactcagtgagctccgggccctctccattgtggccgatgactgaatccccatcactcttggacaactcctgtgacacggtcagcctcgctcgtccttgcccttctcagggctaactgctcctctcacaaggctggggacagaggtggccctggttcacttnnnnnnnnnnnnnnnngaatgactcttcctgagcctggcaccaggatccctagacaggccgctgtctccccactcacagccccagcaggtaagcagtgtagacaaacccttggggcttttttatttggagaaccatccagcatgcatcctggcccatggcctgagcaagctgcagcccttctgaagccgtgggctttgtcggctcagttgggggtcttagccctgcatgcattgtgggcatcaaatctacctccaaaagacccatcctggggagccctctggcccctcgttgccttttcacttaaaagcctcttttttctgggagaggccctgaaccctgcccaggagagctgttcctccaccctggcaggccctcagccagcttcctagcaagacaaaagctaccctcgtgactttgggacccaagtcgttggggttcccgaggtcactgagaactgttacctcgggacctcaaactgtcagtggaactgtcccaccacacagaatgtcccacaagaattcgcatgtctcaaagcaaaaacagtgggtttgtgtctcacctgagtatttggaattttattttttcaagtaaagttttcaatgaaatgtccacatggtattgttataacttagggcgagcaggggaaattcctcttccagggcctgctgccctccgctgagcagcagcaccctccagcagggagcccagcacgcaggggtctgtgcgcctccccggccctgccccaccttttggagtgaactgcaccgtgg

SEQ ID NO: 1154 - DNA, 695 bp, Macaca Fascicularis
  misc_feature (1)...(695): n = A,T,C or G
tcagaagcctatcaacannnnnnnnnnnnnnnnnnngcacaccagccccagagagctgacgttgcctaagtgtaaagcttcccacagtggcacactcacccccaacccggagcagagggtctaccacctctacgccatgtgctgccactcgggagactgcagcgggggccactacacagccctggcccagccccccggcagggcggagtggttnnnnnnnnnnnnnnnncaggtgcactgtgtggggccggaatttcctctgcaccacacgttcaggtctgagaccccgnnnnnnnnnnnnnnnnnnnnnnnnnnnnnnnnnnnnnnnnaggagccagaggcacccgggcctgacaatggggatatgagaaccatgacagatgtagctgctccaaaggagaaggtgcctnnnnnnnnnnnnnagggagagaccctcaagacagactnnnnnnnnnnnnngtggggaggacacagccagagcctctctcctctccgggacgacaagcccatctgccacagacagagtcctgccaagaagtacagcaggtgtaggacgcaggcaccagcgtggagaaaggtatctggtaggacaccacggcacccattccagtccatcccccaggccgctcaggtgctccctacagcaatgcagccacaccttcatcagcattccatggtttcatatcctcctggaa

SEQ ID NO: 1155 - DNA, 1944 bp, Macaca Fascicularis
cttttcctcaaagaccttgccgctcagctggatccaggcccttgcatcttggtggatctgaggcgtttagaggaacaagaacctagatgtggagccgaaatttgagggtgtgacctatctgatgcggagcggacctttgaggatctctgagtggaaggtgtactacaaattctcgcaatcctcacgctcttcgtctgcggcgacagttcacctggggtgggcctgatttgttcctggctctagcaaacaaaccccgggaccgggcagagctgggatgtgggagcgccctgaggccaggctacctgggggcaaactgaggaaagagtgttgaggattatttctagagttcaaaggtcagaggtcaatgtagcgaggagttgtgggggagttcaaagtcggaggggtgcttaggggcgaatcagggagggactgaatacccaagggacagatttgtggataaggacttggagggaggagaaaccgggagggggcaggtggcgtagtgctggggaggcggggacacaggggaagagagaaggggaaaggaatcccctgaatatctattcccagacttcaggcctgtcactcacagtctcggtcgggcctcccctagttgcaacctagctgtcggcagggtgaagagatggcttccccgtctagacagcccccgccaggggggtcaggactgcttcacgggagccgggctcgttcatatggaagcctggtgcaatcggcctgctccccagtgagggaaagacgcctggagcatcagttggagcccggagacaccctggctggactagcactcaaatatggggtgacgatggaacagattaaacgtgcaaaccgcctttacactaatgactccatcttcctgaagaaaaccctctacatccccatcctgacagagcccagagacctgttcaatggtttggattctgaggaagaaaaagatggagaggaagaagtacgcccaagtaacgatgaagtttggccacactcaactgagaggaagaaacaagagacaggagcaggacgtgccaatggtgaagtcttccccacacctggccaggaaacccccacgcccatccatgacctctctgcctctgatttccttaagaagcttgattcacagatcagcctgtccaagaaggctgctgcccagaagctgaaaaaaggggaaagtggggtacctggggaggatgcaggtctccacctgagctcccctcggatgcagcaacgagcagtcctaggtcccgtgccgctgacccgtacctctcggacccggacactacgggaccaggaggatgaaatcttcaaactctgatgtccccagaactgactgagagaagcaagatgttgaaggagaaacttcagggggagaggagcctgaggtgaggctcaagaacatggcttaccagcctgcctccctccactccagccatcttccccagcctccttgtccgccaaaaattccttggcctggggcagttttattggcaagattagggaatgggaactggacctttcccagttcttgggctgaatctagagttgagtcctttagactcaaaaggctctttttatatccctgttgcctttcctatcctttttaccattccctggccttagaacagggaagcagagactccccctcagcttcttcctcatctccaactgtgtgacataatttatttatttgcaatttgtagcactgatctatggtacagttttgtttgtttctcaaacagaagtaggtaagggaacctcaataataatggaaatctccctcagtctcctgtttggaaatgatgaaaggtgagagaagtggtgtttatatacctcctttcttctgtgatgactataaggtatacgaagctggacagattaaacattgagccctgaaaaaaaaaaaaaaaaaaaaaaaaaaaaaaaaaaaaaaaa

SEQ ID NO: 1156 - DNA, 2547 bp, Macaca Fascicularis
  misc_feature (1)...(2547): n = A,T,C or G
acagaaaaataggcagacttggtggtgcatgcctgtggtcccaactacttgggaggcttaccgagatctacttactgagatctggccactgcactccagcctgcatctgaccattaaaccaggaaagactgagcatacactgggctcaggcaccaaatcccgcagtagtagagaactggcatactgtatctgaggagatacatttaggatacatattaaaaagtctaaagttacacagccggttgtaaatattctaattcaacaagcatttaagaacctgccatacgagcttcaggaaagtttctggcacacaataagtacgatgtaagtggatgttctttgttatgtcatcatcatcatccttattatcatcattgctattattattggtcagacacaattctaggaagggcgaaggctcctaactcctgttttcctctttactcccaagtagagggtatccccagcattctgctcagtttctgatgcatgcttgttgcccaaaatatatctgaggaatgactgcataaataatggaagattagagagaggccatccctggcctttgagatcaacagtcaaaatctgctctgacaatttctgagagctgtgaataattctagccaagtgtcagaaggaacctggcaagggtagctctgggactctgattttcctgaaggaactgaaaagaaagaatacctgggtggaaaaggtatcctggtagctggacaggaaggatgttcagtggatgcattatgtaatgtctgcagagaatcgtggccataggtgctacgtaagcaccaaatatcattaatattactatttaaaagaacggagcagcctattccttcctaagtggtaacctgagcacagcaggattttactaagtctgatcatttattgggttgccagctggagcactgaccatgctcgggatgtatgtcacacagcctgatttggtgcagccagcactggttctgactcagcatcttacctgcctgaactattgcaacaccctccttcctgtctattggccttatgtcagcccagtaagcctgttattctgcatactcctaattatataagtcttgctgaactgtaatcgaatcatatcacttttctgcattacaacagttcatggtttcctttggcctaaaaaattgccaaactccttagcaaggcgcatcttggtcttgggccaccagcactctattctgagcatcctccgttgatctaaacactctagcggtctctggatgctcttccctcttaacaagtgacttttctgacccgtgttcccttggcaaactcatgagcatctttcaaacatcacttgctccctgaagccttccctcacacccatctgcagaagcagaattgagggccttcttgtctacatgtctgtggcactgaacagttctcttgtattggccaggatatttggatgcaaatcttggaagtctagatcaaacaaattaaagaatatgttgggatttattcactcgtgtcaccaaactgcacagtgactgggtctttggatgagtgtgaccagggcctcagaccaaatcagggagtctaccactagtaactatcttcatggggcagaaatgacaaacacttcagctctgcattcatacatacttaaagccagagaggaacaagagctcctccccatgaattctagttataaaacttcagaggaaccactctggatggcctggcttcgtccacatgagcatcacaggaaggggaccaggtgccatgactcccttagactgcttcaaggtacctgctcagacccagtgacggggtagcatgattagcaaccctcgtcaggacctcattagattgagagtgggaaagaagcagtgtcccataagaaggtgcaagctcagatagaatttcagacaggcggaagagtaggtgtcatctggactgttattcaaattcgataactaataacacttcagatcctaactgtgtatttgagtttttgagtttgcctctcactacagagtgagctcctagagtgcaaggaggcacatctgactcatgtgcctctgctctcacctagcatgatgcctggtgccaggttgccacttagctcatgcctgtgtgttcttgaattaacaaacggatagctctccaatgctctgtgaacaaaacatccagtgaacataattacggaattctgtagtgtttggaagttagttaaacaaatgtttatagaactgctataatttaaaagacatcgagtannnnnnnnnnnnnnnnnnnnnnnnnnnnnnnnnnnnnnnnnnnnnnnnnnnnnnnnnnnnnnnnnnnnnnnnnnnnnnnnnnnnnnnnnnnnnnnnnnnnnnnnnnnnnnnnnnnnnnnnnnnnnnnnnnnnnnnnnnnnnnnnnnnnnnnnnnnnnnnnnnnnnnnnnnnnnnnnnnnnnnnnnnnnnnnnnnnnnnnnnnnnnnnnnnnnnnnnnnnnnnnnnnnnnnnnnnnnnnnnnnnnnnnnnnnnnnnnnnnnnnnnnnnntaaaaaaaaaaaaaaaaaaaa

SEQ ID NO: 1157 - DNA, 711 bp, Macaca Fascicularis
  misc_feature (1)...(711): n = A,T,C or G
actttttcctatcttcatcttggttcgagaaggttatttccctntcatttgatttctttgttttaatttacatgtgcatatttattacctgtatataagaaaacatagaataggatagtatgagttaataaataaatacattatcagaatattttctgtatatttaatatacattgcaattaaaatgcactgtttagctgaactgtgcctcctaaaaactgtagcatataaagacagctctatgtgaaatataaaattatgtttttttctccatgtctatgatttattgaagtaatgttcttcaggacattttttaatttttatttttaaatttgtaattggcataataattgtacatatttatagggtacaatgtgatgtttcaatgcatgtagataatataatgatcaaattgggataactaccatatctatcactttaaacatttgtcgtttttatgtgacaggtgaccacatttaacatattctgttttagctgtgttgaaatatacaccaaattgtagtttgctatagtcatcctcctggaattattttttttctgagtttagtttttcagaacaccacaaactggaaaccaaattattaatcaaattgacagaaaaatgttattcttattaataaaaataccattttatatgtatatttgtaactgcaatgtctattgtgagctgtaatccctttatggaggtaa

SEQ ID NO: 1158 - DNA, 650 bp, Macaca Fascicularis
  misc_feature (1)...(650): n = A,T,C or G
gagcgccggagcccgcgctgggggctgccggggaccaggcccggccggacgctgcaggctcgctgcatggagaagaaggcagnnctcccccacgcccggcgctggccagcgcgacgaggcccagaggggcgggggagtccaagcccgcccagcccggctgctcctggggggcgctttcctgcccctcccctcctctgctccttcctgcatggacctctgccgttcctgctcctgctccggaagccgccgccgccgccgcgcttgccttgccccctctttttggcctccccctatttcctaggatccgcattcgggtggactctgccccaggagcttgacagggtgcagggcctcttctggcctctctcctctctctgtccatccactgtgccccttgggccacgccgacgcgctnnnnnnnnnnnnnnnnnnnnnnnnnnnnnnnnnnnnnnnnnnnnnnnnnnnnnnnnnnnnnactttgcgctcccggttgtcgcgccctgtgctcccgaccagcagccccaccgaccacctccttgcccctgcttctcttacgcccccgccccgggcgtgctcctcgcgcccttggcctctctgtccttgctcttttgtaaggggcgggcccggctcagtgacctgtgctgctctgt

SEQ ID NO: 1159 - DNA, 724 bp, Macaca Fascicularis
  misc_feature (1)...(724): n = A,T,C or G
agaatacannnnnnnnnnnnnnnnnnnnnnnnnnnnnnnnnnnnnntgaagcttgacttcttgtcgtaatgcagccatcttggaggaaattggccatttctgcttggattgttggcagggtcacgctcagctttgctttctacactaattacatagcattattcaagtattgttttccatttcccatccctgatttccagcttcttcaagctgactgttcttgcaggggccacttgcttctcctagaggannnnnnnnnnnnnnnnnnnnnnnnnctgcagggtctctatattacacctcaacgtacacactttgctgctactgtttgtactgtccacagtagaatttcctcatcttgctnnnnnnnnnnnnnnnnnnnnnnnnnnnnnnnnnnnnnnnnnnnnntaaataaaaagaaaacctctaaattggtaattgaattacctccctgtagctttatagtttgtgacatttcttgaccttgctagttctttcattagatctgtgcaagatctagtcatctggttaaggattttaagcagatgcaactataaacccaagaaactgtattactcttactgttggtcnnnnnnnnnnnnnnnnnnnnnntaagtatatggcccacgaggatgtgaaataactaggggaaactgtttttgtacactgtacatccttagtatttttacacgtatatgatagggatgaacatgattttccttcgtgc

SEQ ID NO: 1160 - DNA, 748 bp, Macaca Fascicularis
  misc_feature (1)...(748): n = A,T,C or G
gagtgttccaggttgaggagactgttgtggacaaggcatggcggtgtgattgccaagatgagtgggaaagggggataaggggtaggtcaagggatgctggggctgggggttggaatttactttcaggcatctgtagtcagtannnnnnnnnnnnnnnnnnnnnnnnnnacttcatgctgtgagcgtttagcggggagaaggtgggcatgnnnnnnnnnnnnnnnnnnngtttcatggagctaaaccttgaccaggacaggtnnnnnnnnnnnnnnnnatgtggcaagatgcttttttgcttttaatttaggtgtcaactatttggattcttccattctctcccatttctagcagataaccaggttttgtaaatccttggnnnnnnnnnnnnnnnnnnnnnnnnnnnnnnnnnnnnnnnnnnnnnnnnnnnnnnnnnnnnnnnnnnnnnnnnnnnnnnnnnnnnnnnnnnnnnnnnnnagtggtctaggtgtgacatcacttgatatccatcccccacccaaaaggggaaaaagaagacattgatnnnnnnnnnnnnnnnnnnnnngcaacccatcttcacttccaggacccactgatgatctcttctggagttttggcctgaagctaaaactggcagcccctggactaagttcggcatatagactagnnnnnnnnnnnnnnnnnnnnnnnnnnnnnnnnnnnnnnnnnnnnnnnnnnnnnnnnnnnnnnnnnnnnnnntagtatcatg

SEQ ID NO: 1161 - DNA, 1051 bp, Macaca Fascicularis
  misc_feature (1)...(1051): n = A,T,C or G
gcccaaaaggaaacccaaattnnnnntgggatactggggaaattgtagtgaagggcttaatgtagttaataaaagtgaaaagtcagtagaaaacagaaatgccnnnnnnnnnnnnnnnnnncatttttttccattttccctcatgaatagactcaccagtattttacccccttgttataaaattgtgcagagcaagaagatgatacttatttttgaatttgtatttttaaaactagatttatagacttttttttttaaaactaggacacttgcttccttcttagctaaaagcaccagttcagatttttcaggtaattttgttgttactcacttaagactggaattagtatgttnccggtattgctcattttttctcctggctatgatagaatctcatctaaccttgacatctctcctaggggaagaatgtcacaggccaatagcgtgggcaggggtggagatgctagcagttatgaaatcgagaatcacttttatgtatgtacttgtnnnnnnnnnnnnnnnnnnnnnnnnnnnnnnnnnngcagtccctttccaggattttgtttgctgtggcattggttgtatcagagcactttaatctgaaggatgatactgtaacttgatttatctaattagcttttaattatctacagctattttatttctctcctacagtactgggatcactgtaacactgtaaactnnnnnnnnnnnttgtatttttgtagtgttatgaaatttatttacatacttataaagaaaactgtatattcacttgaactctgaaaatgtacacgtatggctggacgcagtggctcatgcctgtaatcccaggagaccgaggcaggtgaatcacttgaggtcagnnnnnnnnnnnnnnnnnnnnnnnnnnnnnnnnnnnnnnnnnnnnnnnnnnnnnnnnnnnnnnnnnnnnnnnnnnnnnnnnnnnnnnnnnnnnnnnnnnnnnnnnnnnnnnnnnnnnnnnnnnnnnnnnnnnnnnnnnnnnnnnnnnnnnnnnnnnnnnnnnncacaccattnnctccagcctggc

SEQ ID NO: 1162 - DNA, 578 bp, Macaca Fascicularis
  misc_feature (1)...(578): n = A,T,C or G
caacccccccaaataccccagcanncaggtaggccagccctttcagctcagcacaccccagcccctaccccacccctaccacggagccatctggactgaggtgtgggagtgatggagcaggtttactgtgcctgcccgtgtgggggccannnnnnnnnnnnnnnaggaggtggggccttggtaataacactgctgcctcaccnnnnnnnnnnnnnnnnnnnnnnngaagattaagggagggtgtgctctgtggtctcctccctgccctctccccactggggagaggcctgtgacttgcccnnnnnnnnnnnnnnngccttgtttgttgggggtggtgggcaggtgagcagaagtggggagggaaatggggaagaagtctactccaaacctaggtctctatgtgagacnnnnnnnnnnnnnnnnnnnnnnnnnnnnacagggagacctggggtcccgtggataactgagtggggagtctgccaggggnnnnnnnnnnnnnnnnnnnnnnnnnntgtgtattgtgcattaacctcttcctcaccactaggcttctggggctgggtcccacgtgccctgac

SEQ ID NO: 1163 - DNA, 2858 bp, Macaca Fascicularis
tggtagggagagagtttaaatgtctggctggctctgagcttcagtcagttcccacagcagcgcaggtgagctctcctgaggatctcttcatcagctcccctgattgtagggaggatccagggtggcaggaaactcctccagcccagcaaggagctcaggatgttcctgaaggccgtggtcctgaccctggccctggtggctgtcaccggtgagtacaagctatcttcggatggggctcttaggcggctgctctgagtggtgcaggatggaagttgggccaaagcaaaaggacacttctgagtgcccatcagcccccagctggacatgaggtctgcctggctgccaagtggctcacgggagagctggcccagtcccagtggtgggcccactggcattggtgctataccagtttcacatatccctgtggcttccaaaaagctaagcccagacagggaaaattgcagattgggcacccccgccatcatccagtctgcagctcagagctggagcagaggggccacaaagggacagggtctcatgaattctccgttaccacccaggagcccgggctgaggtcagtgctgaccaggtggccacggtgatgtgggactacttcagccagctgagcagcaatgccaaggaggccgtggaacatctccagaaatctgaactcacccagcaactcaagtaagagggagtacagtgtgcggtggtgacaaggagttcttaaagaccatgcaatgtattggcaagggttgagcttagagtcaggagccctgagcttaggatacccactgccctgccactaactggctgggcctctgaaccgaggatccacatatgtaaactggaaggttggatcgaatcatccctgcgatgtccttttgctttgatgttctagagtttgacgaatggccacatcctatcatttgggctcacggaagaaagggagggaggaaaatgtcatgtgggctgatttctaatacgtttcagaaagacaggccccactggaatcaaggggagggagctgggaatatttgggaggcccctgggcacaggcaaggaaagcagcaccttgtgtcgctggaagaccccggcagaggtcaggaagacaacattctgttacataacgtgatcctatgttgcagcacaccccctcagggaaggaccccaaagtcccaccctctgcagacaaggaggggaaagcaaactgctggaggtgacatgatgggtagattgctgaggcaaagtctgtgggagataccgagatagaaattcagtgtcataacttagtctgtgacagccatcctctccaatctgaaccgccatagggagggtgaatttggtatccctgagcactcacctggtcctagcaagtgtgcataaggtgagtggtatacagcaaagtcttgcacgtgagtgccaagtgtaacgtggcctcccttgtgcccttccccacagtgccctcttccaggacaaacttggagaagtgaacacttacgcaggtgacctgcagaagaagctggtgccctttgccaccgagctgcatgaacgcctggccaaggactcggagaaactgaaggaggagattcggaaggagctggaggaggtgagggcccggctgctgccccatgccaatgaggtgagccagaagatcggggaaaatgtgcgagagctgcagcagcgcctggagccctacacggaccagctgcgcacccaggtcaacacgcagactgagcagctgcggcgccagctgaccccctacgcacagcgcatggagagagtgctgcgggagaacgccgacagcctgcagacctcgctgaggccccacgcagaccagctcaaggccaagatcgaccagaacgtggaggagctcaaggagcgcctcacgccctacgccgacgagttcaaagtcaagatcgaccagaccgtggaggagctgcgccgcagcctggctccctatgctcaggacgcacaggagaagctcaaccaccagctcgagggcctggccttccagatgaagaagaacgccgaggagctcaaggccaggatctcggccagtgcggaggagctgcggcagaggctggcgcccttggccgaggacatgcgtggcaacctgaggggcaacaccgaggggctgcagaagtcgctggcagagctgggcgggcacttggaccggcatgtggaggagttccggctccgggtggagccctacggggagaacttcaacaaagctctggtgcagcagatggaacagctcaggcagaagctgggcccccatgcgggggacgtggaaggccacttgagcttcctggagaaggacctgagggacaaggtcaactccttcttcagcaccttcaaggagaaagagagccaggacaacaccctctccctcccggagcccgagcagcagcgggagcagcagcaggagcagcagcaggagcaggagcaggagcagcagcagcagcaggagcagcagcagcagcaggagcagcagcgggagcagcagcagcaggagcagcagcaggagcagcagcaggagcaggtgcagatgctggcccctttggagagctgagctgcccctggtgcactgaccccaccctcgcagacacctgccctgccctgccacctgtctgtctgtctgtcccaaagcagttctggtatgaacttgaggacacatgtccagtgggaggtgacaccacctctcgatattcaataaagctgctgagaatctagcctcaactggttgccagatgactcctccttgcagctgggaaggtggggaggtaaccatgactgggcagagcttagcagcggcctggcaggagacacccaggattggggagatgagactgcag

SEQ ID NO: 1164 - DNA, 637 bp, Macaca Fascicularis
  misc_feature (1)...(637): n = A,T,C or G
tccagaaaagctgactcattcccattcccctttactttgcatttcccactgtcatcagtctctttccctccttttaggttagaaaatttctcatattggccnnnnnnnnnnnnnnnnnnnnnnnnnnnnnnnnnnnnnnnnnnnnnnnnnnnnnnnnnnnnnnnnnnnnnnnnnnnnnnnnnnnnnnnnnnnnnnnnnnnnnnnnnnnnnnnnnnnnnnnnnnnnnnnnnnnnnnnnnnnnnnnnnnnnnnnnnnnnnnnnnnnnnnnnnnnnnnnnnnnnnnnnnnnnnnnnnnnnnnnnnnnnnnnnggaggtagcagtgagctaagcttgtgccgctgcactctagcctaggcaacagagcgagactctgtcttaagaaaatgtatcggccgggcgcggtggctcaagcctgtaatcccagcactttgggaggccgagacgggcggatcacgaggtcacaagatcannnnnnnnnnnnnnnnnnnnnnnnnnnnnnnnnnnnnnnnnnnnnnnnnnnnnnnnnnnnnnnnnnnnnnnnnnnnnnnnnnnnnnnnnnnnnnnnnnnnnnnnnnnnnnnnnnnnnnnnnnnnnnnnnnnnnnnnnnnnnnnnnnnnnnnnnnnnnnnnnnnnnnnn

SEQ ID NO: 1165 - DNA, 600 bp, Macaca Fascicularis
  misc_feature (1)...(600): n = A,T,C or G
atgtnnnnnnnnnnnnnnngcccagctagtggactggtgagtcttgcccggnnnnnnnnnnnntgacggagcaatgaccnnnnnnnnnatttcctcccagctcatgcttagttccctagtgaaggccagtggatctcattcttctctggaacccgggaacaccccttcccaagttctaagttctcctcnnnnnnnnnnnnnnnnnnnnnnnnnnnnnnnnnnnnnnnntcctgcacagcatctctaccacttctggaaccctcctccgcctgccagagacatgaagattctgctcatcattgctcagctccccnnnnnnnnnnnnnnnnnnnnnnnnnnnnnnnnnnnnnnnnnnnnnnnnnnnnnnnnnnttgggaaggcttgggagccaggaagagtgttggnnnnnnnnnnnnnnnnnnnnnnnnnnnnnnnnnnnnnnnnttgcctgggctctgacccggtggtggggtttgagcagtgcttctcnnnnnnnnnnnnnnnnnnnnnnnnnnnnnnnnnnnnnnnnnnnnnnctgttccctttcnnnnnnnnnnnnnnnnnnnnnnnnnnnnnnnnnaataggaaggtgggatttct

SEQ ID NO: 1166 - DNA, 810 bp, Macaca Fascicularis
  misc_feature (1)...(810): n = A,T,C or G
aaagcagtatttagtatnnnagacaaacacttnanttnnagnnnnnngccaagtaaaacaaaaactgccagtaaaataatattttgtaaatnnnnnnnnnnnnnnnnnnnnnnnnnnnnnnnnnnnnnnnnnnntcagtagacaatgttatccttgatccaggttttttgccagctataagggaatccctgtccttgagaggcttatagtctataagtaacattacagaattcgttagcacacccattcattgttaattttacctagataaacgattnnnnnnnnnnnnnactgtaaccagcccttgggcattttaaagggcgacatgtggcataccttctttttttttttaagaatataatgtttttcaagagtgtagtgttnnnnnnnnnnnnnnnnnnngtgtgcaaagtaacaggatagtttgcctcttcactttacccctggataaaggcacttgaactgcccgtcactgattagcagatattgacttgttgccactaagtaaactcttgtgtgctctatgaaagttttttgtaattttcttgaaattgtgatttttcactgacagtaatgacaactttaatgtatgtaattgtctatgcattttaagttaaactgcctaaaatgtgatttgagacatatacatttgtttgtattataaattgtaagcaatcagtttgagatactaggttttatcacctgctgctgtatttgtaaacaaagacaaatgttgctttaagaagtaattataattaggaataggctatggatgtgatacttgatattttttaagataaacttgtttgc

SEQ ID NO: 1167 - DNA, 1569 bp, Macaca Fascicularis
  misc_feature (1)...(1569): n = A,T,C or G
tttaaaaatagatttaatgcagttttataaatttctttatctatttcagtgtttcataactgtttctttgatgatgctttttaaacccagttttttagtaggaagcttgccatcatacacatgaatatgcatgtttaataataatagctgttctttatttaagcaatcactatgtgccagaccatattctaagcatttgatatgtattaacccatttaacccttataacaatgctctgagtagtccaatttacaaatgaagaaatgaagcataggaagtttaagaaactttgctcacgtacagcctataggcatatcgaattcatataaagaatgctccctgcacttgaataacactgtcatgttccttctcaatcttctcttctcaatgcaaaatgatcctgctttccatttctattcttttgcttaggaattatcaatatgaagtttatatgttaggagagggatacgtggatgcatatttcctaatttgttcccataaagggcttacaatctagttagagaaataggacacgtaaatttaacatcaataaagacgtggagtgttctgtaatagtacatgcctaggctccgatgagtaatgtgcacggcggggctgccaagatcaggatagatttactttgtaggaaaatgaggctccctgcggatgatgagtaggctctgtttaagacagtaaccagcagacttgctctgaaacccagctctcaatccagtttcaccaagaaacattagaagactatttctatgtacctacttttcaaatatgaccagatattaacattttaatggatacaaaataatgtcattttcccatggcttctttcttttttctttttcttttctttctttttttttttttttttttttgagatgaagtctccctctgttgcccaggttagaatgcagtggcaaaatctcggttcactgcaacctctgcctcctgggctcaagcaattctcgtgcctcagcctttggagtagctgggattacaggtgcctgccaccatgcccannnnnnnnnnnnnnnnnnnnnnnnnnnnnnnnnnnnnnnnnnnnnnnnnnnnnnnnnnnnnnnnnnnnnnnnnnnnnnnnnnnnnnnnnnnnnnnnnnnnnnnnnnnnnnnnnnnnnnnnnnnnnncatgcccggtcttttttttttttgnnnnnnnnnnnnnnnnnnnnnnnnnnnnnnnnnnnnnnnnnnnnnnnnnnnnnnnnnnnnnnnnnnnnnnnnnnnnnnnnnnnnnnnnnnnnnnnnnnnnnnnnnnnnnnnnnnnnnnnnnnnnnnnnnnnnnnnnnnnnnnnnnnnnnnnnnnnnnnnnnnnnnnnnnnnnnnnnnnnnnnnnnnnnnnnnnnnnnnnnnnnnnnnnnnnnnnnnnnnnnnnnnnnnnnnnnnnnnnnnnnnnnnnnnnnnnnnnnnnnnnnnnnnnnnnnnnnngtggcttctttcttttttgatagaaaaatgccagaaatttcagaatagtcattattagcccacaattatttttgttttcagtgaagaaaaaaaaaaaaaaaaaaaaaaaaaa

SEQ ID NO: 1168 - DNA, 751 bp, Macaca Fascicularis
  misc_feature (1)...(751): n = A,T,C or G
acagatgatnnnctnnntaaattaaataatgtagattaaacaaaaggatcaatgaaaaaggcaagagttgagatatagaaccgtatgtatgagaatttggtatattgtcaaaggatcaatttaggctggtggacaaaaagacaacagtgctggctgtctgtggggtaaaaatggttacatcatatcctctcatagaaaggaagagttaaccagagttgtaaaaatcaaagtaatgcttcaaaatatttgaatatgtaacctgtatataggattatacttggatgcctgggatatccaagcctaatcctatataagggttagatatctaagtctaattctaaatgcaggttatttcaaatattttaaannnnnnnnnnnatttattagtattaataatatttatattatataaaaatgtattatatataaattttataaattatagtatataatataaattatatcagctttataaaatataaatcgttatataattatataaataatataattattaaatttaagttatgtaaattatataattatataatataagtcatatatgtaattaaatgtgtacatttagcacatgcatgtacatacatgtacatacaggccaccaccactactgaaagtattatgctaaataaaaatcaataaagcaaaatgtaaataatgtattagagaggacagaacnnnnnnnnnnnnnnnnncatttgataaggtttgttttgtggatatgttaatccct

SEQ ID NO: 1169 - DNA, 1955 bp, Macaca Fascicularis
gaatagcatgccagcccgtgagtccacctgtgctatccccagtacccagagagtgagcagactttgatgaagttctgggtaatcactagtctgaccaactttgaatggtacgtggcccaaggggctgctagggaggaaagagaaggacaaccttcttgaagacacgcttgatttgtataacctcataagaatggttcttcagttcttgaaagcagagttatgggccaccacaataaagtcacaccccctgatccaaacccaccagcagagtttataagcctagagcaccatcactgaagagcgcattggctgcaacgataatatgtcctgtgtgtactgggagtattactctcagcctcccacagagagaggccttttggagactattagagaaaaaaaaatactcacaccacgccgtgtgaccagacagtggctcagaactaatactatatattggggtcactagggtgccttagtcaaagatttagggggcaagtacttagacccccttaagccctaggagaccactatacccacgtgtaatatttctgcagcttctaaacatacagttgaaaggtataccttaaagatggaagaaagtctgcattggttctctgtcctgtaaaggctgtaattttatgaaggggctgggaatttctcctctttaccaaaatagtcagtaaaaagcagtgtcttgtccctggaggaaacgtggatctccctctttctttggtagtacccggggcagcggagtcctcactctggaccatcacagacttgcttccacgctgagcacagtggttgctgctggtcctcatgtgggctacttactggagcatattagcagagttcctggctcctgtcctgtagtctataatttggtaattttctaccttactgcagttagaattttagaaaaaggtgtctgacttgttttttgctgttttctatttgtttacctggaagggatggaagtacctttacattataattttgcctccaagttgcattgattttccagatctgagccataatttagtcagcctgaccatcccctacgatgtcctattgatgagatctggagatcaggaagaagcagcaccttagaggcctttatgtatttatatacacactcaacaggatggaaaaactttataaaatatgcgaagccatggatggctccaaacatatctttaaacattcaaggattaataattccagtctttcaccaactattgcagtcaacagaaagacaaggaatgctctccaatacattttataaggcaagcattatcttgctagagggtctgaccatgactgtgagagaaaaggccattacaggttaatctaactcatggatgtaggagcaaaaatcatccatagaataatggcagaacaaacccagcaatatacaatatatcacttgaaataaacatggtttattccaggaatgcaaagttggaaaaaccaacagtaaaatgctcaacagtcttagattgaatttcccccagaagcagacacaagataagaatatgaatcgaatcaatttatttagtagtttcaggaaccaccagtagaggaggacgaaataggattaaaaaatttaggcagaatgtgttatcaaactcgctaccactgcatgcaactggagtttactcccacagaggtttcagacagcatgaaacacacacctcagggttatccccagccgaaggagaatctggaatatataaataccagctcctgtcagttatcggttgagggtgctggccctgggagggaaaaaaagaaagttggaggttgatacccaggcacttcaagcctgccttatgaggagagagaacagttttctgcagcttccaggacagccttcaggaggacaatttcagatggtggcagctggagactcgcttacatattgacgtgctcaattcacaaaaaaaaaaaaaaaaaaa

SEQ ID NO: 1170 - DNA, 734 bp, Macaca Fascicularis
  misc_feature (1)...(734): n = A,T,C or G
gacttttccttcttgatgaccatagatatgttccagaggcagaagagagagattaccccacannnnnnnnnnnnnnntttcaaaacatatagaatgtcaaagttccagatccttctacatctttagtcctgtctgaggttggtagctgcctttctgtagctgatagatggctagagttccatcnnnnnnnnnnnnnnnnnnnnnnnggagatttgaattatctatttgatgagatatttatttcaataacccacctctctcaccccacatttatatccctaaatttgaccctctgggccgagtcatattgccttcaggagacttgatcccagtagattgaggtcttccctttcagcagaaagatttatttccctggcttgccagtggcactgatttcctaanncccaatgagtttaatattcttcctcccnnnnnnnnnnnnnnnagcctcttttgattttttattttatgtgtgtctaatgaccaggaaaaaaataaagcttaggttttaaaaagttttaaaaaaaatctgtttcagaaactgtcaaatgtaccatatttgtattaagaattgttgggaatttttgtacaatgaatttacatttatttatggtgacttatatttacgcttgtgatcaaataatgatgttaaattcttaaatcatatttgctatgcagctaaagatgatattttgatttgtattttgggggtacctgtgttgagttgataaaca

SEQ ID NO: 1171 - DNA, 760 bp, Macaca Fascicularis
  misc_feature (1)...(760): n = A,T,C or G
gagatgcatgcnnngtatcatattgaaaagtatgnnngannnncnttaaagttgtaatgttatgtgtgaaactgtacatattttaaatggtgtagctttggcaggttttatttggttgacatgattttatattaaaagagaacgctgctttcatatagcttagcccctgaaggcggggctactccctgtttgtacaacgctgcttatagtttgtgactggggtgggcgagtgtcttcctctgaaattcttaggagcctccacccctgtcctcccctgaaactcccctgaaactcccctgtgcacaccccnnnnnnnnnnnnnnnnnnnnnnnnnnnnnnnnnnnnnnnnnnnnnnnggcaagtgttttaggggaggctgagaccatgcctgagcctggggggcgatgtggaggcaggcccagctcctccgggcaactttgcgtttgtttggaaggaagggaggtgggtaggagaggagcttggaaggatgaggaggagcggtcctgcctcacacattgtctatttttaccgttaacctagggccacactgttatgaactccagtatagaaatttagccttgtgaaaaagtgttgttttactgccctaagaagatacacatctctaggcatctctgaccagaaagccaacaaagtcttttgcatcgggtgtggcccttttgtattttatttcccgtatttaaatcagccttccttacaccctagccccagtgctgagagctttgagggtagctgaaacccc

SEQ ID NO: 1172 - DNA, 2863 bp, Macaca Fascicularis
ataaacaaaaggaaatctccccgagtggttgcaatgtgcagccagggttggcactgactggatgacgcattgaatccaacaaccatgggtccacccaagtcgtgccttggatgcagaagtgacagaggctgccctgttcctgaggaacttgcagccctgagggagagacaaacacatgaacaaacagtggtctgtgcgatgggtgtccttgaagtggtgcgagccaggcatagggagatgtgtgtgtgcagttctccatggagacgtcgggaagagccttgggagaacaaggtgattcctgggcttctaaaggggccatttggataataatggcagctctttcagggcttatagctctaatttctttaacttggttacaatttgatctcctggctctactggaagaacacattggcaaaagtcatcacctttttcaccctgaagggcagatcccatgtaggtaagtggtatggtgcagccagccccatggtcatctacaccagagtggttccaaggctagcgtccctggccggctgcgctgtgcctcaggatggagaggaagattcacagaagtgaagacatcggcgattggcagcctcttagtttgtcttgacctagtcaaggcaacaggttcaaggtgcatcatgaataaccttgccctcttcaggacactccctcaccagagactctaatggccccagtggaatgtgcctaccctaagaccctacaaattgtggtggaggtcttggcagctcccagtttgggctgggatgctgtctttctttgaacagaaaacacatgtagatagaatgttccatctgctctgatctttcaagtatttctcattcggtcccatttaaccagtcacaaagcattttagtaggctgtgtcaatcggaggctgggataatagctatgccattaccttgagcattgttgaaacatgaaggctaaaatgtgtctcattattcaagttctcacagcgatggcatctagccaaaatggtcccattaactctcgaggccttactttccatgctctccccctttaaataataatttcttttaaaggaagtaaagaaaagttgaaggctatcattgacctccatacagcagagtctgtcatgtctggagatgcattatctatgcatggggctttcagagttcatctgacgaaagcttgatgtacggttctcagagtcaagaaaattcttccaccttggattcaaaaatgaggagttttaagtgcaggcgaggagccgaggtttctggtcttgttggaaatgccctggtgacagctttctgtgctggattcttcctcctcagtctgtatcactctttttcttccagtggacacctaatgtaagtctttgggtttcagtatatgtctataaagtgggggattgggctggacttctgacattcttctggttctgaacttcagtgtttctgactttttcctattggcttgatcttcttaaattggttcacaaaaacaacacaaatactgtaatagcaatagctaatgcttacaggatggttaccatgtgctgtctgcatcctttcctttaatcccatcatcaatgtcacgaggaaggttctatcgttctctctgttacacagataaggaaatggaagtgcagactggctcagtatcttgctcaagatcacacagctggcaagtgtcagaactggctgcaaacttgggcctgactgtcaaccctcagcatgttcagcctctctggtgctattcagcaaaacacccccaaacccagtggctcgtaaccaccatcattttattatctctcatggtttatgaggatcaagaacttgggaaggacttgctacatggttctggcccatgaccccttttgcagttgtgaacagacagacagtgactggagtgagaaggagagaagcagagagctgtctgggctttcttctttcctctctccccctctccctccatctcacgtcatctcagggcctttccaggtggtggctccatgagagctagctgggcttcctgacagcatggtggtctcagcacagccccaagctgttcatttggcagcttagggtctccaagagcaagtgaatccactgcccagaccagaacctgaataagcattgatgacccagcctgctagccccagaagtcacacaacacacttgaagttgtgccagtatgctcttttggccagaagagtcccagaatcccatccagtttcaaagggatggaacacacattccagctatcaatggaaagaatgtcaaggtcacattttaagaggaatgtatataatgaaagatattgttgggcaacctttggaaattacagtcttccgcaatgtctgtattcatcagctcaggctgccataagatgataccatagtctaggcagcttaaccatcaggaatgtattcatttctggaggctggaagtccaagactaaggagccagcagggttcttttctcctgaggaccctctccttgacttgcagatggccactttctccctgtgtcttcacatggccttttctctgtgtgagagtaaaaagagagaggtccctggcatctctcccccttctaataagtacaccagtcctattggatgagggccccattgcacagcctcagttaatcttcattacctccttataggccctgtctccagtgcagtcacattgagggttagggcttaaattacatgaatttaggtgggtggggaggggtggtgggagcagaaacacagttcagtccataataatttctaactgcaaagtcttaaatgctttactgcacttacagaaaaaaaaaatggctagtatgatagaaaaaaaaaaaaaaaaaaataaaggcaaa

SEQ ID NO: 1173 - DNA, 1392 bp, Macaca Fascicularis
tcaaattatatcagtgtgcatgtgtgagtgtgcacataaccatgtgcaatttttaggtttatgtcagttcagtggataatgtgtgtgggagtgctatctgagtgtgtgggaaaagcctttggttgcatagtttaacagctttttatttcagcacaatagttcgtctttactgtggatgtcagtccttaagaatgttaagtaaagctggtctcctcatgagttacatgtcatttgtatagaactgtataatgattaatatctgcagagaaattagaccaaatgaaacctgctggcataggtttgatttatattgccttcatcattctggtttcagacgaaatggttattgctctctaccactgctgaaagaatagagtcttaaactttaataatcacagccttgtgatgcaagcacagagcttatttgtttgaaatgcctattattctcatcttgctgtatatgttggaatggagatcctttttccagtgatctccattgcaagctttttaacagtgttttttaatactcagtatacataaaattcatgtgtagcacttgtaaaaatgcagattccttcaacctatcttcaaagagtctgattcggaaacttgaagcagggccaagaaatttgtattttgagctagtctccttaataattttgatgaagattgtctatagaccttattttgaaaaattctgctatttagggaatatgcagagaccaacagttcctttacttcttagaagcatttcctcattttctcttacttccttcccactacaaataagtcaaagcacgcattattcattatcttaagagaaaaatcccaaagaaaaacatcctaagactagagcagaatagattttcatgaattctttgccatttcatctgctgtatgtcaaccataaccctttctccatattgtgtgtgtatgtgtatgggttttttcccaaaataaaagcctacattattatagtcttagctctgggtagatgggagcacatctctgagtgagatgtattctaatgatacccaacaagaaataaaaataatgatctttcccaaggagagttgtttatttctaggcccttacttagtatgagtaggaggaaattgaaagtgacccataatttaatgatgtatatggccccaaaggtgattccattaactgcacataaaatataaccaaaatgaatatggaatggttagtgaattcagctacattttaccaaacaaatcctgtgccattgaactgctgagtttgtccaatttgactcaatcaggactatgaagctctcagataattgaagatcatgaaccctgacattaactaaaaacttgaagccaaattcatgtttgagaataaatgccaaaaaaaaaaaaaaaaaaa

SEQ ID NO: 1174 - DNA, 754 bp, Macaca Fascicularis
  misc_feature (1)...(754): n = A,T,C or G
aannannnnnnnnnnnnnnnnnnnnnnngcaaaaccggacctcacgtgacaagacatagtcttgatttattccacttgctaggaatagtcttcactgaataaatatgaatnnnnnnnnnnnnnnnnnnnnnnnnnnnnnnnnnnnnnnnnnnnnnnnnattaatatcaatgtgcaattttattttcccaaagtttccaacaaaaccatctagtcccaaggacttcagataaagagttgtgagttttatctgctaatattaataatgagtgtgctgagattataccccagaagcaacaagcttcatgtcagcaggacctcatctgcgnnnnnnnnnnnnnnnnnnnnnnnnnnnnnnnnngtgcctgacacttagtaggtgcttcgtagtaacaaccaaatgaatgggcgaatggatgaaagaattatttcagaggacggtgttaaggagaaccaacttgaaatcccttttgacccttcaatagtgggtaggggtggggactgccttcgaaagccaggctcagttgtaagcaccagtcccattatggtattgattggtttggctgggaaatgagcagacagttggaaggcgagannnnnnnnnnnnnnnnnnnntgaaggttcgtgtttgacagacctccagtttgtggaacttcatgtttccccttgcaaaccgtgtgtgcatttgggtgtgtgcctcagattgagtcatccgaagacatactggcaaggcatcaccacgctctactcataaaa

SEQ ID NO: 1175 - DNA, 779 bp, Macaca Fascicularis
  misc_feature (1)...(779): n = A,T,C or G
cagagcacaagtcagcatgagttncnnnatggcatcaaattgcaacttgannnnnnnnnnnnnnnnnnnnnnnnnnnnnnnnnaatcagggcacacaagttgcagtaacacaagactaggccagctctggcatccagtannnnnnnnnnnnnnngattttgggttatagttcaagaaagtctaaacagagtcagtcacaacaccaaggaatgctcaagggagctattgcaggtttctctgctaagattannnnnnnnnnnnnnnngggttctacctccaaagacctcaaatcatcaccgtatccctggatttcctgagggtgagatctgctatttcacatcagaactctggagtctgtatattcagggaagattgcattctcctactggatttgggctcttagagggcattgtgggaactaggcccctcacagaaccaaacggtcccatccagggagaaagaaatagtcttttttttttttttaatagagatggggggtctcactatgttgcccaggctnnnnnnnnnnnnnnnnnnnnnnnnnnnnnnnnnnnnnnnnnnnnnnnnnnnnnnnnnnnnnnnnnnnnnnnnnnnnnnntnnnnnnnnnatggttttgatctgtctgaannnnnnnnnnnnnntgaggcacagccccatccttgataatctatttgctcccaaggaccaagtccaagatccttatannnnnnnnnnnnnnnaaagtaaatactgcccccactccctgaagtttatgaggttgataaggaaacataacaga

SEQ ID NO: 1176 - DNA, 1823 bp, Macaca Fascicularis
  misc_feature (1)...(1823): n = A,T,C or G
aaattcgacttgatccaaaacaggagcaggctgcctccctgggacattcatgccatgccagagcaagggagaatacagggaaataaggcagatgtgatagctctcctcaaacaattgaaggactgtcatgatgaagaagcgattagatttacttggtttagttccagaagataaagaacttatttagtgatgggggacaagctttggcttgataaggagaacttctgactcatttgcggaccccgaagtggaatgagctgaatcgttaggcagtaaattgtgtccatattgtttatatacgggttagatgactgtttgcacaagggttagataaggttttagacattaaattgggttcaacctgcaagaagaagcaggcagatttaggaaaagtcaattcgccctttctgtcatgtgattctgtggcactattaaattcattgttacttttctaggcacctctgtcaattttacccccttaagtaagtgataatagagttgatagtaaagtctttagagatttctcaaactttgttcctcagccctctggagatttctgaaggatgcctcagaagtggctgacaaggttgaaatgaaggctagctgaggctctgagccctttacctatgcttcaaccagaacaatcttgcttttatttgttttacaaattaaatgtactggcttccttgaagattttctttttaactgaaaaaaaaaaatagttctgctgttaaagaaaaaaaaaagttaaaggctctgatatttcaagatgttccttttattgacagggaaactgagatatggaagaagtgtcttgccaaaggtcacacagctagtaaatttcagagctgggactcaaatctagctgttctagttcaaatcttttgtttcctccgctctacaagtctgccttgttagaattcagtaaaagcttctctccattctactggccaccactgtaatccagaatctcatttcttctaatctactattctgtattagccacttaactagtctccttgctgtctaattctattctatattatatatactgttgccattttattcttcttgtaacattgttttcatcctgagatttccctgtttaagaaccttctccctatctcttataagaacttttcaggctagccttgtgttagcattctttaggatcctcattgttcagctgaatgtgagcctaaatccatcctattatgagtaattaatgggctatataatagtgagattaactgagttcctccctattcctagacttcacctttggcaggattttcatgtgtacggttttaatcaggcatgacaagaagatacaaaagaaatagaaaatcacagcctataaaaagcaagttacataataataccaataatataatcctatttatatctcacatgcatgcattttttaaaacaagaatgaatatatagaaattgcctggaagaaaacacattaggcnnnnnnnnnnnnnnnnnnnnnnnnnnnnnnnnnnnnnnnnnnnnnnnnnnnnnnnnnnnnnnnnnnnnnnnnnnnnnnnnnnnnnnnnnnnnnnnnnnnnnnnnnnnnnnnnnnnnnnnnnnnnnnnnnnnnnnnnnnnnnnnnnnnnnnnnnnnnnnnnnnnnnnnnnnnnnnnnnnnnnnagtgggaggatcacctgtgtctacaaggcagaggttgcagtgagtcatgatcttgctgctgtactccagcctgggtaacagagcatgaccctgtctcaaaaaaaaaaaaaaaaaaaaaaaaaaaaaaaaaaaaaaaaaaaaaaaaaaaaaaaaaaaaaaaaaaaaaa

SEQ ID NO: 1177 - DNA, 649 bp, Macaca Fascicularis
gcactcccccaccccatcctctctcaggctgccagggagcttggtgccagctggtactattattccgggtgttaatagtctctgtgtttggagggtgttcgttcacagagatcagttttgtttatcattgcaagtttttgctgttatctgcagacagaagagcctgcaagtgacaaaggaagtgaggcagaggcccacatgcctccaccgttcacaccctatgtgcctcggattctgaacggcttggcctcggagaggacagcactgtctccgcagcagcagcagacctatggtgccatccacaacatcagcgggaccatccctggacagtgcttggcacagagctccatgggcagtgtggctgctgccccacaggaggcctgaggccgggtctcactgctctgaaatgacacaaccagaatggcctggggctcaggcccttggctgagcgggaatgtgttgggactgcccagctgagccatcagatgcccatcttttctggtcccagcagtggtgaggggagcacatgcaggcctcgcccctaccttgctcacccagttccccctctggcacaagcttgcggctctgcagctggggtgacatccccagtggtttgtcgccaagaccatgtggtggacttttcgccccc

SEQ ID NO: 1178 - DNA, 2147 bp, Macaca Fascicularis
attttgatgagagaacgtagtgaggtcacatcatgagaggggaataattgcttaataatgtggactggtctgtttcctatgtcaatatcatagggcttttattagtttattattctatttcttcccgtctttgttttcacaatggtattccaaatgcaaataataattatatttggtctccttttctgaccaacttaaatgtgactttaaatattaaagataaacattttgtagaactgcttcaaaataattggggatataagttggtttaagttacattaattcaaagaacaggtgatttactttttcgggtcaataatgagactagtaaacttggaaggtcaatgaaagaagtctcttaatgttatgtgttcaaatccatttctaagtgattgctttcagggagacaagacagtaaaaagaaaatcacagattcaagagtaaactttcacactactgtgctattaaaacttagtgtcaggcatcatgtcccaacaaagcctagtaaaatgtttacagcaaagtaaatatttgcttatagggatttgaatgaagtaggttcaaattcagatggaacataacctaagcctggtttgaaaatgcatttcataacatgcctctgtttaaaagcactctcatgtgacgaccactctcagccaggcatctgcagaatcaatactttctgcattctttacatgaatatttataaattttaaaactctgcaaagtgttatcaacctaatgacatttatgtcgaaatgcaattaggcacaaaatgaaaagcacaattaatctggcatcatcaccatggctgggtcaagaaataagttttgttaggaggtaaattttcacaccctaggatgatattttgataaaaaaaactttgagagtataattaagccttgcgagaatgccaaacacatgaattatattattgacatccattattgaatattataaaaatcatatttgatttcttgtaatgaatgggattatttggcaattttaagctttttgcaactgtgcagtgcaagttttcgtatcatgttgggactctccctctttaacattcaatgtgatatctctgctgtaactggagaccacctcctcttaaaactcactttgaaacactataaatatagcaaagaatatatgttatctgacctttgacactgaatcaccttgggagtaaatgcagctataaatcattttggcatatttctctctgcctatgaggtctgtgagacaccatcatttttctcgccaaggtttgatatctcagcatatcttcaaaatccaattaatatctgccgtcttggttctgcaacttgacttcaacttaaagaactggatgaatgtttacatggctgctacttctctcatttcttgcataaagaaatgtacacatcatacctcaaagtcacaaaaactatgtcaagttttacatatatgcattgcactgccctatctggtcaagattttttactgagtatccttaaattgggtcaatcaaagaaatatttgccaagcacctctcctccgggccatccatgaactgccttcagggagctcagatctgatggaagactcaaagatttttttttttttttggctgtacagtggaacttggattacactttaactttctctaggaatcaaagtaacctctgaggacctcagcttgcacaaagaggattgagataacatttccaaagcttgttcttcctgagctgacccaacacttagaaaaacgtgacatggatcagcaaccccattttctttcctgttacaaagaacgtgatctgctggaactggaaatgtttaattctcagaattcattgaaatccattgatgatcatatttgacatctactggtcatcctgagtgaagtttagccattcagagttcaagccatgggtcttcatatacagatggttataagcagactcacctctgcttaaggtgagaaatgcaactgcaattgaccatctgcactggcatctagtcaagtgattgtccgaggaaaggattttggagattcccatctgatattcttctatttggtctcttgtacccattgtcttcctgtaccacacacataataaagtttaagaatgtcaagcaaaaaaaaaaaaaaaaaggccaca

SEQ ID NO: 1179 - DNA, 681 bp, Macaca Fascicularis
  misc_feature (1)...(681): n = A,T,C or G
acnnnnnnnnnnnnnnnnnnnnnnnnnnnnnntggagtggcaggccatattccacaagttcgatgaggatgcctctggaaccatgaactccntcgagctgaggctggcgctgaatgcggcaggcttccacctgaacaaccagctgacccaggccctcaccagccgctaccgggatagccgtctgcgtgtggacttcgagcggttcgtgtcctgtgtggcccagctcacctgcatcttctgccactgcagccagcacctggatgggggcgannnnnnnnnnnnnnnnacccacagacagtggatggaggcggccaccttctcctaggatctcaggacgggtgcacctgctgcttggggcagggnnnnnnnnnnnnnnnnntccctagcccctgcctggcacgggtgctgctctctctggcatccacccaccnnnnnnnnnnnnnnnnnnnnnnnnnnnnncggccgggtgaccactctggcctgtgtgctgctcactcagaaacaaggacagtgacagcccctcttgagtagatgacacgagctagtccacgttgacagcttaggacggtactagctctgccctggctctcctaggagtggaggacagacacgagagagaaaaaannnnnnnnnnnnnnnnnnnnnnnnaaaaatattacatgttttattatcctgtcccca

SEQ ID NO: 1180 - DNA, 2638 bp, Macaca Fascicularis
  misc_feature (1)...(2638): n = A,T,C or G
tactggagtcatccggctgtcgctggcggttgcgcggtttgtgtgggctaggtgagggcggggaggcctggctgtctggatctctgacaggtgaggcgggggacgcagaagtccagccgccctctcatgcagcggagtccgaaacaggcctaccagtcagttcttatttctgttgggtgtttccatgctccaccatgttaagagttaagaatcagctttttttactttcacctcattacctgaagcaggtaaaagaatcatcaggctccaggctcatacggcaacgatttctacaccagcaacagccccttcacccagaatgggctgccctggctaaaaggcagctgaaaggcaaaaacccagaagacctaatatggcacaccccggaaggaatctctataaaacccttgtattccaagagagatactacggacttacctgaagaacttccaggagtgaagccattcacacgtggaccatatcctaccatgtatacctttaggccctggaccatccgccagtatgctggttttagtactgtggaagagagcaataagttctataaggacaatattaaggctggtcagcagggattatcannnnnnnnnnnnnnnnnnnnnnnnnnnnnnnnnnnnnnnnnnnnnnnnnnnnnnnnnnnnnnnnnnnnnnnnnnnnnnnnnnnnnnnnnnnnnnnnnnnnnnnnnnnnnnnnnnnnnnnnnnnnnnnnnnnnnnnnnnnnnnnnnnnnnnnnnnnnnnnnnnnnnnnnnnnnnnnnnnnnnnnnnnnnnnnnnnnnnnnnnnnnnnnnnnnnnnnnnnnnnnnnnnnnnnnnnnnnnnnnnnnnnnnnnnnnnnnnnnnnaaaggaatttatggttcgaaacacatacatttttcctccagaaccatccatgaaaattattgctgacatctttcaatatacgtcaaagcacatgccaaaatttaattcaatttcaattagtggataccatatgcaggaagcaggggctgatgccattctggagctggcctatactttagcagatggattggagtactctagaactggactccaggctggcctgacaattgatgaatttgcaccaaggttgtctttcttctggggaattggaatgaatttctatatggaaatagcaaagatgagagctggtagaagactctgggctcacttaatagagaaaatgtttcagcctaaaagttcaaaatctcttcttctaagagcacattgtcagacatcaggatggtcacttactgagcaggatccttacaataatattgtccgtactgcaatagaagcaatggcagcagtatttggagggactcagtctttgcacacaaattcttttgatgaagctttgggtttgccaactgtgaaaagtgctcgaattgccaggaacacacaaattatcattcaagaagaatctggaattcccaaagtggctgatccttggggaggttcctacatgatggaatctctcacaaatgatgtttacgatgctgctttaaagctcattaatgaaattgaagaaatgggtggaatggccaaagctgtagctgagggaatacctaaacttcgaattgaagaatgtgctgcccgaagacaagctagaatagattctggttctgaagtcatcgttggagtaaataagtaccagttggaaaaagaagacgccgtagaagttctggcaattgataatacttcagtgcgaaacaggcagattgagaaacttcagaagatcaaatccagcagggatcaagctttggctgaacgttgtcttgctgcactaaccgaatgtgctgctagcggagatggaaatatcctggctcttgcagtagatgcatctcgtgcaagatgtacagtgggagaaatcacagatgctctgaaaaaggtatttggtgaacataaagcgaatgatcgaatggtgagtggagcatatcgccaggaatttggagaaagtaaagagataacatctgctatcaagagggttcataaattcatggaacgtgaaggtcgcagacctcgtcttcttgtagcaaaaatgggacaagatggccatgacagaggagcaaaagttatagctacaggatttgctgatcttggttttgatgtggacataggccctcttttccagactcctcgtgaagtggcccagcaggctgtggatgcagatgtgcatgctgtgggcgtaagcacccttgctgctggtcataaaaccctagttcctgaactcatcaaagaacttaactcccttggacggccagatattcttgtcatgtgtggaggggtgataccgcctcaggattatgaatttctgtttgaagttggtgtttccaatgtatttggtcctgggactcgaattccaaaggctgccgttcaagtgcttgatgatattgagaagtgtttggaaaagaagcagcaatctgtataattacctctttttgttttagcttttttctaaaatattattttagttatgatcaaagaagagagtaaaggtatgtcttcaatttaattttaatacctgatttgtactttccttgaaagctttactttaaaataccttacttataagcctggcgtcatgctatacgtatgtacatacagtttcacttcaaaaat

SEQ ID NO: 1181 - DNA, 714 bp, Macaca Fascicularis
  misc_feature (1)...(714): n = A,T,C or G
gatgcactttgtnctcagggangccaaggtaggaggattgctggagcccagaagtttgagaccagcctgggcaacacagtgggaccttgnnnnntaaaaaaaaagaaagaaagaaatcagctgggcatagtttcttatgcctttaatcccagcactttgggaggctgaggcggtggatcaccggaggtcgggagttgaagaccagcctggccaacatggtgacaccttgtctctactgaaaatacaaaaaaaaaaccccaaaaaacaaaaaacctaagtnnnnnnnnnnnnnnnnnnnnnnnnnnnnnnnnnnnnnnnnnnnnnnnnnnnnnnnnnnnnnnnnnnnnnnnnnnnnnnnnnnnnnnnnnnnnnnnnnnnnnnnnnnnnnnnnnnnnnnnnnnnnnnnnnnnnnnnnnnnnnnnnnnnnnaaaaatcnnnnnnnnnnnnnnnnnnnnnnnnnnatccaagtttcactttttgtgatacaataagccattttttcagtaatgtctactaaaaaaaaaaaagccattaacctttctctgacatttgcatgattttaacaaannnnnnnnnnnnnnntaaaatgttttgttggaatgtggcatttctttgaattttataacattaaaagaatccacgacatggtacagctctccacttttttagctttttaaatgtccattaataagtttgaatatgttaaaattatac

SEQ ID NO: 1182 - DNA, 769 bp, Macaca Fascicularis
  misc_feature (1)...(769): n = A,T,C or G
gaagaatgtgatgtggagccgcatcggcatgagggtgtcttcatttgtcgaggaaaggaagatgcactggtcaccaaaaacctggtccctggggaatcagtttatggggagaagagagtctctatttcggaaggagatgacaaaattgagtaccgagcctggaaccctttccgctccaagctnnnnnnnnnnnnnnnnnnnnnnnnnnnnnnnnnnnacatcaaaccgggggctaaggtgctctacctcggggctgcctcgggcaccaccgtctcccatgtctctgacnnnnnnnnnnnnnnnngtctagtctatgcagtcgagttctccnnnnnnnnnnnnnnnnnnnnnnnnnnnnnnnnnnnnnnnnnnnnnnnnnnnnnnnnnnngatcgaggatgctcggcacccacacaaannnnnnnnnnnnnnnnnnnnnnnnnnnnnnnnnnnnnnnnnnnnnnnnnnnccagaccagacccnnnnnnnnnnnnnnnnnnnnnnnnnnnnnnnnnnnnnnnnaggacactttgtgatttccattaaggccaactgcattgactccacagcctcagccgaggctgtgtttgcctccgaagtgaaaaagatgcagcaggagaatatgnnnnnnnnnnnnnnnnnnnnnnnnnnnnnnnnngaaagagaccatgccgtggtcgtgggagtgtacaggccaccccccaaggtgaagaactgaagttcagcgctgtctggattgctagagatgtgtgttgatannngttgcacgt

SEQ ID NO: 1183 - DNA, 3419 bp, Macaca Fascicularis
ttttactttctcctcaagcaacacctggacctgctcctttccctcagtctccaagttcctttgtgaaacagggtgtaccatcagagatgcaggtaaaaattcaagcaacttgaacttgattctctaccaagacttcacactcccgggtcaccatggatagattttccacgttgttcccaagttggctgcaaagacaccagatcatgtgtagaaaagacgcacttcgggggcacaggaagtgtatcactgggaacagaatccagagaaacagaatgaagaagttggatcagcactgcaaagccagatgctaaattcattaatagatgccttttggagagtttttagaagctcaggatcataagattgaagcaagaatttgaacaagaaatagaaagcaaaacagatcacattattcatcctcacaagatcatacttccacctgcagcagtaatggtgctttaaattgggttgcatcacataagatctaaacataaacccatggatgacttgcctcctaccttttccacgccagcccacccagcgtactctcactgcttccttgcaaatcgtgctacctgcctacttgtcagactcaatgctttctcattccttatgatcctcggtaatcttcgatctccctgccacatttgacaatgctagtcacttccttttctcaatactgtacctctcttgctttctgtgatatcagaatataatgtgtcttagttctatgttactgtgcaacaaattaccctaaaacttagcatcctaaaacaacacatatttcgtatctctcagtttctgtgggtcaggaagccaggcacagcttacctggatccagtttcagggtcttgcccaggctacagggaaggtgccagctagagccatagtcctctcaactggggctggatccatttcctgacccagtcattgattgctggaaggattcagttcctcataggttgttgggctgaaaccttcagtaatcactggctgatcactggaggatgccctcaattccttgctatgtgggcctctccatagagagcttcatcagaccaagtaagtgacagcaacagagagaatgccacaaggtggaagccacagtctttttttaacataagtgtggaagcgacatctcattatgtttgctgtattctgctcactagaaggaagtcactagatccagtccaccctcaagaacagtggattatatgagtgtgactagcaggaggtggggactgttggcccaccacagaaaacacatgtaatatctactgagtaccatacctcgtatttctcaatgtgagtaagtgatggccatatttgacattatattcccctgctcaggtaggaacctccccaacttcccttgggttcaaccccagatgatggagcaattattgtgccaccagacataagaaaacttaagtatgcctcctctatcccactccatacatactttattttcttccccgcaaggcagccagaatagtctttctaaaacccaaatttgattatgccaccttctgctcaaaaccttgcaatgggttctcaatgtcctttgctttgaagaccctgcgtacggaacctacatttacctctccaatctcttcacctgtctctcctgtcaagtttcaccatacttactttctatcagttctttaaacatgccattttcactcacctgtcggacctctgctgaatataccccttaactttcagcctctgcactccaagaaaaggggagtcctttctcttacctagaacctccatgagggcagagatcatgcctgttagtttatcactctgtccttagtagctaggatggtgcacagtggtactcgaccatgggtaaaagaacgtaccttacagaagatgttggcagaaggtccatagataaagggactatgggacttgatgagttcaggatttgcttccagacatctgcttcctggactctgctttctcctgggatgctgtcctacgagcagaaggcagtaacatcatacgtttaaggcactgtgattttagggtggccaaatgcatgaagaagaatttacatcaagtgctttctttcatattggaggttcctgacatgtgttttcaaatgaatgaataacttaagagaccaaagtaaaaagaacacctgtcagtcttaaaaataacatcagctagcatttgttaaatacttttggcacatcaagtgtggtgctaggtgttttacatgtagtaatctcgtttaatgtttacaacaacactgtggttaggtatcattattcctatgtctcaaatgaggaaactgacacacatgagggcacagtgatttgtccacagacatacagattataagtaaactgaatttggacaaaatgataatgactgcaatggtttactaagcctttattatgtgccagggcttttaccagtacttgatttgagttctcttacttaatccttctagaaatctattaaaattgggaacagatctattcttgaattacagatgaagaaactaaggttcagagagtttaagaatattgcctctgacagcacagcttgcaagaggaagtgctgagactgattttttttccagaacatactttattatagcgatattttaaagaagaatttaattttcaagtatgaaatattttaaggagtatgttaaaactataagctgacaacagtgaccaaagttagccctctctctttctccctaagaagaaaaggctgtataaatatttaggaggcttgaaatcatcactttaagaaaaaaatgaaatatcttagtgaatttttggtctgttcgatagtgaaatcaagattaatttacatccttctcagcaccacatctcacttattccaaaattgaccacatagttggaagtaaagcactcctcagcaaatgtaaaagaacagaaatcataacaaactgtctctcagaccacagtgcaatcaaactagaactcaggactaagaaactcaatcaaaacccctcaactacatggaaactgaacaacctgctcctgaatgactactgggtacataacgaaatgaaggcagaaataaagatgttctttgaaaccaaggagaatgaagatacaatgtatcagaatctctgggacacatttaaagcagtgtgtagagggaaatttatagcagtaaatgcccacaagagaaagcaggaaagatctaaaactgacaccctaacatcacaattaaaagaactagagaagcaagagcaaacacattcaaaagctagcagaaggcaagaaataactaagatcagagcagaactgaaggagatagagacacaaaaaaccctccaaaaaatcaatgaattcaggagctggttttttgaaaagatcaacaaaattgatagaccgctagcaagactaataaaaaaaaaaaaaaaa

SEQ ID NO: 1184 - DNA, 732 bp, Macaca Fascicularis
  misc_feature (1)...(732): n = A,T,C or G
gaggcctccatgagggccaaatgtgccacgggacnnntagtgccatgcctgcgcagacctgtggaataaacagcacttctgagcaggctcattttaaagggacttgcaaatttgggcctgccttgtgtgccttcctcataaaacccactcctcccagaatgtgcttggaggtgctgctnnnnnnnnnnnnnnnnnnnnnntttcttcaaaaaacctaaacgtggtcatctcttggatgaggtgtggccctgcacnnnnnnnnnnnnnnnnnnnnnnnnnnnnnnnnnnnnnnnntgcgctagggtctccgctgaggaagtggcaggtgttgtggccctgacctggccccgtactgagtgtggggcccacctgtgccctcatgggcagctgaagggggagctttctaccccaggttcctttccttactgagaagtcttcagtaaacagttgccgctctccatcccctgcttttttaaaaatgttttttctcacataagaaaatgttatctgtgtgctggggaaaattttgaaaataacaaaaaccagaatacaaccacccaaaatcaaccacagagataaccactgttcataattccttctccagtcttttttcttggcacatacacattcgtctttatatatgacatatagatattttacaaagttaggatcctattctatgcactgcttggtgatcggatctattcaatgtatgaaacatttgaaagtcct

SEQ ID NO: 1185 - DNA, 721 bp, Macaca Fascicularis
  misc_feature (1)...(721): n = A,T,C or G
gggnnnctttgcagatgaaattaagaatnnngagatgagtagttcatcctggattgtctgcgtgggtcctaaatccagtgacaagcatccttaaaagagacacaaggagattggcagacagaagaagaggaggcagcaatgtgaccctggaggtggatccacaggtcaaggaatggctacagccatcagagaaagaggcaaagtgaggattctcccctcgaatctctaggagtggtccagccctgctgatgtctagatttttgnnnnnnnnnnnnnnnnnntgtgacagagtaaactattgtttaaagccaccaagtttgcggtgacttgttagagcagccacaggaatgaatgtacggggaatnnnnnnnnnnnnnnnactgctggtgggaaaacaaactggcacaacccttatggtgggaaatttgacaacatgtacataaactacctacatgtttcccttgtgacccagccattccacttttaggaatctgccctgaagatacaactccacctattaaaannnnnnnnnnnnnnnntggatgatgtttaccacttgttgacaaagaaaaatgttcacttgtgttaaatgagaaagataggtttcagaacagcaacaatgttctagctgattctgtttttaaaactcanntgtatgtagagaaggacagtaaagggatttatcatgaaatgcaaaaagggggcaactgttattttagat

SEQ ID NO: 1186 - DNA, 704 bp, Macaca Fascicularis
gccaggtccatgtttatttatttctttagtctatgcattaatgaaaatgatcctgagtggaggttagttgaacgttcaatgtactggagcaagcatcataaaagctgctagtagccgtgcgtttgaacaggaaaaaaaaaaattggggaaaatgaaatgtaaaggcctgtatcttgcagcttgtatatcttactattgctttaaaaatgtataaaacagctggaaatgttttaaatacaaggtctttgaattaaatgtggattttaaatatgtaatcccttgacaaatgaccaaattatggtgaactatagctccctgtgttcttcgatcaatacctataacttacaaatctgcctggagatgtggacattctgcatttgcttctgtatctggagagatgtttgtatatatccaggccgtacacacacacatttccatatctctctgcagatatatttccccttcaattgtgacctggtatttggaactctccttttcgtttggtttctcttccttttcatgtggtgtctctgtgctaataccagttcttgttttgcaatctgtttcgaggtccattgctttactaagacccactgcatcttggctgatttcaaagtgacacctgaatacagtgtttaaaaaaaaaaagttttgtttgtaaatcatgtgaccagcttctctcaacctgacatggaaagtctctt

SEQ ID NO: 1187 - DNA, 718 bp, Macaca Fascicularis
  misc_feature (1)...(718): n = A,T,C or G
ggtcacaggaatccccatgaactgctctgtgaaactgcagctgagcctctacatgaaatctatcgcaggcattggacaaactgggaagattgagccggtggtcctgccgctgctttggtttgcagagagcggggccatggagggggagacgcttcacacattctacacccagctggtgttgatgcccaaggtgatgcactatgcccagtacgtcctcctggcgctgggctgcgtcctgctgctggtccctgtcatctgccaaatccggagcaaactggccccggcagaagtcagtggcgggattcggagacggcaaacgtgttccatcaagggccaggtagtaaatattttaggctttgtgggtcacgaggtctctgttgtacattctttgttagtttttgttttgtttgtaaaaacttttaaaatgtaaagaatgaccaggtgcggtggctcatgcctgtaatcccattgctttggggggtcaatgcgggaggatcactgaggccaggagtttgagaccagcccgggcaatgtagtgagacccagtgtttaaaacaaaaattgnnnnnnnnnnnnnnnnnnnnnnnnnnnnnnnnnnnnnnnnnnnnnnnnnnnnnnnnnnnnnnnnnnnnnnnnnnnnnnnnnnnnnnnnnnnnnnnnnnnnnnnnnnnnnnnnnnnnnnnnnnnnnnnnnnnnnnnnnnnnnnnnnntgagtaaa

SEQ ID NO: 1188 - DNA, 636 bp, Macaca Fascicularis
  misc_feature (1)...(636): n = A,T,C or G
atccctcctcccgnnnacgtgaccgaggaggagctgcttcagatgctagaggaggaccaagctgggtttcgcatccccatgagnnnnnnnnnnnnnnnnnnnnnnnnnnnnnnnnnnnnnnnnnnnnnnnnnnnnnnnnnnnnagctgtcaacagcgacttctaccggaggatgcagaacagcgatttcttgcgggagctcnnnnnnnnnnnnnnnngagagggccttgaggacaaatacaacttgcagttgaatccggaatggcgcatgatgnnnnnnnnnnnnnnnnnnggctccatctcgcagcagaacatccgctcgcagcagcgtcctcggatccaggagctgggggacctgtacacgccggcccctgggagannnnnnnnnnnnnnnnnnnnnnnnnnnnnnnnnnnnnnnnnnnnnnnnnnnnnnnnnnnnnnnnnnnnnnnnnnnnnnnnnaaactggatggagccctggggcnnnnnnnnnnnnnnnnnnnnnnnnnnctggtgatggggggcccnnnnnnnnnnnnnnnnnnnnnnnnnnnnnnnnnnnnnnnnnnnnnnnnnnnnnnnnncaaggcagccttccaccggaagagaaagcannnnnnnnnnnnnnnnnnnnnnntg

SEQ ID NO: 1189 - DNA, 713 bp, Macaca Fascicularis
  misc_feature (1)...(713): n = A,T,C or G
ctggcttcacnnnagagcatttccaacannntncagtgcttttccccttctcacaccaccgggcctttgcacgtgctagtgcctccccaacttgctctgccttctccttcacccagacaactcctactaagtctctcagactcctcagctgtgtcccttcctaggggaggactctcctccctccagtgagcctggcagtcctccctgggatccctgctccttgtcttccctgccgtcctcactgccgtgcttgttctctattcagaaggaggcagaggctggcctgcccccactctcctgtagactgaccagatgaattgacctgggcagggcaggtgtgtttgaccaattnnnnnnnnnnnnnnnggctcagtcaagtcgacacataaagttaactgccatagggccccttcgttgtatttgtctatgaataaaaaacggcatcaactccaggtatctgagggttctggaggcaggttctgtgatccctttttacagatgaggatgcagaggtccagttgtcactcacccagatcacactcttatctgctgatggcaggagtatttgacgggatgtgtgagcccggccatctccctcgggacacatcagctcattaaatttgccagccnnnnnnnnnnnnnnnnnnnnatttgccttttacaatgcaccgattacaagttaattttgaaagttataggtggcattagaattt

SEQ ID NO: 1190 - DNA, 616 bp, Macaca Fascicularis
  misc_feature (1)...(616): n = A,T,C or G
gacttttccaccctggggcctgtgtcagccactggccctctgnnccctggaagcatacgacctctgggaaagacagccctgagcttcggttttccaagcacggtgttccccaagaattctgggctggcggcctggtggcagtgctggagatggccccgagcccctccccatggggcacccaggagggctctgccagaatgtgcagcctgtgggtagccggctggtgtccctgtcgtggagttggggtgcgtgatctggtgcccgtccacgcgggtgtgcggcgtgaacatgtatgtcctgtacagcgacatgcgtgtggagagagccgcccgtgagtgccacgcgggagaggcggagcggccaccagtgttttgtgttcaccccacccctgcgtccaccatgaccctcttccccacgctgacctgtgttccctccccatttatctttcctgttccggggaggtggggctgggatgtctctatctctgtctcaacttcatggtgcactgagctgtatcttcttccttccctattacaattagaacctgagtataaatttactttttnnnaattattatcatgagaggttgatgagttaattaacatgagaagattcc

SEQ ID NO: 1191 - DNA, 667 bp, Macaca Fascicularis
  misc_feature (1)...(667): n = A,T,C or G
gtccccgcagacacacatctccaactcagacgggcccagnnnnnnnnnnnnnncggggtaggccatgggcccacctggggccagnnnnnnnnnnnnnnnnnnnnnnnnnnnnnnnnnnnnnnnnnnnnnnnnnnnnnnnnnnnnnnnnnnnnnnnnnnnnntggggtggcccccaggagcctctccactgtcggctgtggggacatctcacccatttgggttacagccagtcttccccacccagnnnnnnnnnnnnnnnnnncagagacattgcctgtcagcccctgaagtgcttgcctcccccagtgcccatcaccagccgttcctatctgtggggtccaagacaggctttcgtgcagccaccagctgccgggagcagcnnnnnnnnnnnnnnnnnnnnnnnnnnctgtctgtccatgcctccaggctctcccggagagggggacagatatttatttcctaaagtttgcacttaattgtgaggattctcaggattgttgggggctacctgaaaagaggaatgtgttgaatgttgcatttgctgtccacttgtcctagaagtttagtgttcttgtcactgtcatgtgtttctgtgggcagagctggttctggagggtgggtcagtgcacccgaggctcagagcatccatccacccnnctggccctcc

SEQ ID NO: 1192 - DNA, 2909 bp, Macaca Fascicularis
tcaggattatcaggtaaaagtataagatttttttctgatcctttgtatacaataaatgaactgaaattcaataacatataaggaattatctctggactctgaagacaatctctctgtgcatatggagttcttcaaatattgtagcctgtttacggtctctgagaaataactagctaaaacccataatctttaatacttcctaaactttgttaataagagaagctctattcctgacactacctctcatctgcaagttcaaatcatcattaattttgtagtctattaactgggtttgcttaggtcaggcattattattattaatcttattgttaatattctaaccataagaattaaactattaatggtgaatagagtttttcactttaacatagacctatcccactggtgggatatgagccaattccaaagaaaagtcagtcatgtgcttttcagaggatgaaagcttaagataaagactaaaagtgtttgatgctggaggtgggagtggtattatataggtctcagccaagacatgtgataatcactgtaggagtagctggaaagagaagtctgtgactccaattagccagtttcagcagaccttgtgaggactagaggaagaatgatcctggctgttttgtactgcctgctgtggagtttccagacctccgctggccatttccctcgagcctgtgtctcctctaagaacctgatggaaaaggaatgctgcccaccatggagtggggacgggagtccctgtggccaactttcaggcagaggttcctgtcagaatatccttctgtccaatgcaccacttgggcctcaatttcccttcacaggggtggatgaccgggagtcgtggccttccatcttttataataggacctgccagtgctctggcaacttcacgggattcgactgtggaaactgcaagtttggcttttggggaccaaactgcacagacagacgactcttggtgagaagaaacatctttgatttgagtgccccagagaaggacaaattttttgcctacctcactttagcaaagcataccatcagctcagactatgtcatccccatagggacctacggccaaatgaaaaatgggtcaacacccatgtttagtgatatcaacatttatgacctctttgtctggatccattattatgtgtcaatggatgcactgcttgggggatctgaaatctggagagacattgattttgcccatgaagcaccagcttttctgccttggcatagactcttcttgttgcggtgggaacaagaaatccagaagctgacaggagatgaaaacttcactattccatattgggactggcgggatgcagaaaagtgtgacatttgcacagatgagtacatgggaggtcagcaccccgcaaatcctaacctactcagcccagcatcattcttctcctcttggcaggtaagatgtgctggatgtatgatgtcagagcagggaggaaccgaaacaatcacttcttcaggcaggatataaattctcttctgaacacccccactgaagcccccatcaagaatagaaaaattagaaattccaacatttctacccttcttctactgactcaggtggtgacaatttgtttaacatgagggtgttttgtacagattatctgtagccgattggaggagtacaacagccatcagtctttatgcaatggaatgcccgagggacctttacggcgcaatcctggaaaccatgacaaatccagaaccccaaggctcccctcttcagctgacgtagaattttgcctgagtttgacccagtatgaatctggttccatggataaagctgccaatttcagctttagaaatacactggaaggtaatctctttcttttcactttcaattttttttctgaatttgtatttacagattgaatacacattgggtatccagaatgtaaagagtctcaatgcggaatgaattttatttttgattttatattttgaattgggctttaagttatagttataaatcaaatgggataatcacttgggttttcagtcattaaagtaaatttttttttcatttttttttactgaacaggatttgctagtccacttactgggatagcagatgcctctcaaagcagcatgcacaatgccttgcacatctatatgaatggaacaatgtcccaggtccagggatctgccaacgatcccatcttccttctttaatatatgccttactttactttaaaaattttcaaatatgtcttttatacacaatatgtttcttagtctgaataaccctttcctctgcagtatttttgagcagtggctccgaaggcaccatcctcttcaagaagtttatccagaagccaatgcacccattggacataaccgggaatcctacatggttccttttataccactgtacagaaacggtgatttctttatttcatccaaagatctgggctatgactatagctacctacaagattcaggtaaagtttactttctttcagaggaattcttacagctaataagtagtagaactggccttcaaaggactgtgaaaggttgaagatgatggtgatcgtaacaatggtggtaacaataaaaacaatgggatgtctttctatttcaggctcagactcttttcaagactacattaagtcctatctggaacaagccagtcggatctggtcatggctccttggggcggcgatggtaggagccgccctcactgccctgctggcagggcttgtgagcttgctgtgtggtcacaagagaaagcagcttgctgaagaaaagcagccactcctcatggagaaagaggattaccacaacttgttgtatcagagccatttataaaaggcttaggcaatagagtagggtcaaaagttagagtgacctcactctaactcaaa

SEQ ID NO: 1193 - DNA, 528 bp, Macaca Fascicularis
ggagtgtcaggagaggaatagtgagtcttacgagcagcacatccatctagaacaccaccagaggcagcaagtggcctaccagaattactcagaatttttccacgagaaggtggacccggccattgatgaaggaaagctggtggtgcaggacattgagcaaagtgtatggatccacagtcacgtgggctccaaggagcacagtcacatgctgcaaaaggttcaggagcacatcaagagggtttcggatatggtggaggacctctacaggaggaaggcctgggctggcgcggaggaggcgatgactcggctggtcaacattctgatcctgtcagtcagggatgcacgagactggttgatgaaaacagaggcccgcttaaagaaggaaggtgttgttcaggaagatgattatgaaaatgaagttgaagactttggtgagcttcgtcctagaaggcgttctcggaaatgtggaaagcagagaaaatactaatgtccatacagctgctgcctcctcatccttcggaacattcc

SEQ ID NO: 1194 - DNA, 548 bp, Macaca Fascicularis
  misc_feature (1)...(548): n = A,T,C or G
tgtggatcagtattctgcggaaagagttacttatattgatgaaaaatctaaagtatagtcagtgtccctatgtgtagaaaaaggaaggctgaaccttcttgcaatgttcacctggaataggctgggagcttttctagaataaatgaaacatttacggcttatgctccatcatggtggtggtgcttttttaagtcagttcttttcattggtcaagataacctttatttttaagtaacatactttttataaccacctggttaagtgtcatcagtctgtctntgcattacctcctcttttccttgttaactccttaccctgtgtctttatgacacaggctttggagaaagtatttcccagcctgtagcagactttccttctcagtgctcccataggctttgcagctgaactatttaattcatcggtccatcttccaaccaatattgagcccatttaatgccagatacagtatttggcactgggcatggtgataaaaaatgattcctgcctttatatgacttatggactttcaggaaaaaaaaaaaaaaaaa

SEQ ID NO: 1195 - DNA, 774 bp, Macaca Fascicularis
  misc_feature (1)...(774): n = A,T,C or G
atcatagtaatnnnnnnnnnnnnnnnnnnnnnnnnnnagattcataattgatatagtgctaaacttccaaggaaaatttaaacagttactgcattacctgttcaaaataaggcttgttggaaatcctagtccatcaagtaatttcaaaaatttatttttgatatgagtagccacagctgtcatataccccatcccaaaaggaagaactgtcttaaacaagatgaatggaaaggtctggttaattctgaattttatgtaatgataacatattctttcataaaannnnnnnnnnnnnnnnnnnnnnnnnnnnnnnnnnnnnnnnnnnnnggtggggtacgtgtgtatggcatgtgttcttgaaatgatgtctctctgaatatccaaacaagtactgtactgtagaaatgctctttgaaaaagtctgtcaactgaccatgatcaatctagcatatatatatgttcagtgggctggccttggtcctcagggacagtgtgtgactctagtggtcttcctaaccagtctcttgcctgaagatatctgggacctctactggctttaatgacaaataatgttatgttgaggttatgcttcctttgttatttgctgattttcctactaaatgtagcatttcaattagatccagctttcacattttgagataattgtaaaaagaatgaaattatgcagaaatggccaatatctcttatcaatctgttcttttggtaaccctcatgcactataaattgtgtacagttaaaatatatatatatata

SEQ ID NO: 1196 - DNA, 2497 bp, Macaca Fascicularis
atccggggcccacagtgatgaccaaaactgcacctcacacatgccccatgcccacgatgaccaagatccaggtgcactccacagcttccagaactggcaccccacggcagacatgccgcgcaaccatcacggcaaagcaccaacctcaggtttcccttctggcctccatcatgaagagcccaccccaggtatgcccagggcctgcgatggcaaagaccccaccccagacgcacccggtcgccaccccagccaaaagcccactgcaaacgtgtctggcagccaccacgtccaacacttcatcccagatgagcccggttgggttgaccaagccctcgcgccagactcgcctggcagccatgataaccaagaccccagcccagttacgctcagtggccaccatcctcaagaccctgtgtctggcctctccaacagtggcaaatgtcaaggctccaccccaagtggcggtacgaggctccatccatgacaacccacccaaggccaaggccaccatgaatatgaagcaggctgcagaggcggtgaaagcctcatccccctcctgtttggctgaggggaagatcaggtgcctggcccaatcacgtctgggaactggagcccccagggctccagctaagcttcctttggaagctgagaaaatcaagactggcccccagaaaccggtgaaagctgacatggcattgaagaccagtgtggcagtggaagtggctggggctccatcctggacaaaagttgctgaggaaggggacaagccatctcacctgtatgtgcctgtagacgtggctgtcaccctgccccggggacagccggctgccccactgaccaacgcctcatcccagagacatccaccttgcctgtcccagagaccactggccaccccgctgaccaaggcctcatctcagggacatctgcccatcgagctgaccaagaccccgtccctggcccatctggtcacctgtctgagcaagatgcattcccaggcacatctggccacaggtgccatgaaggtccaatcccaagtgcctctggccacctgtctgaccaagacgcagtcccgggggcagccgatcataaccaagcgcctcatcccagctcaccaggctgctgatctcagcagcaacacccattcccaggtgctcctaacagggtccaaggtgtccaaccaggcctgccagcacctcagtggcctgagtgccccaccctgggccaagccagaggacagatggactcagccaaagccccatggacatgtgccggggaagaccactcaggggggaccatgcccggcagcctgtgaggtccagggtacgctggtgccactgatggcacccaccggacattccacatgccatgttgagtcctggggagacagcggagccacgcgtgcccagccatcaatgcccagccaggtggtgccctgccaggaggacacgggccccgtggacgctggtgtggctagtggccaatcgtggaaacgcgtgtgggagccagccaggggtgctgcgtcctgggagacccggcgcaacaaggcagtggtgcatcccaggcagtcaggggagccgatggtgtccatgcaggctgcagaggagatccgcatcctcgcagtgaccactatccaggcgggcgtccgtggctacctggtgcgtcgcaggattcgagtgtggcaccggcgggctacggtcatccaagctacttggcgcggctaccgcatgcggcggaacctggcacacctctgcagagccaccacaatcatccaggccgcctggcgcggctacagcacccgccgggaccaagcccggcaccggcagatgctccaccccgtcacgtgggtggagctgggcggaggggccagggtcatgtctgaccgaagctgggtccaggatggcagagccaggacagtatctgaccatcgctgcttccagtcctgccaggcaaaaccttgcagcgtctgccactccctgagctccaggatcgggagcccgcccagcgtggtgatgctagtgggctccagccctcgcacctgtcatacctgcggacgcacccagcccacccgcgtggtgcagggcatgggccggggtgctggaggccccggggcagtgtctcgggcctccgcctaccagcgggctgtcccgagtcccaggcagccacgtcgcagggacaaagcggccacagccattcagtcggcctggagaggttttaagatccgccagcagatgaggcaacagcaaatggcagcgaagatggttcaagccacctggcgaggccaccatacccggagctgtctgaagagcacagaggcgctcttgggaccagcggacccctggtccagctcacagcacatgcattgggccagttcacagcacacgcattggcccggcatctagggccctggctccctgcagtggggactttgtgggaggcactcgtggctctctgggtctgatgaataaagtcctccacagcctaaaaaaaaaaaaaaaaa

SEQ ID NO: 1197 - DNA, 697 bp, Macaca Fascicularis
  misc_feature (1)...(697): n = A,T,C or G
tgctggaattctgcctagctgtgctcactgctgtgctgtggtggaaacaggcttactctgacttccctgggagtgtgcttttcctgcctcacnnnnnnnnnnnnnnnnnnnnnnnnnnnnnnnnnnnnnnnnnnnnnnnnnnnnnnnnagaactattgacnnnnnnnnaaaaaagggagaaatattaatcagaaannnnnnnnnnnnnnnnnnnnggaaaannnnnnnnnnnnnnnnnnnnaaagcttgagtttcctaaatgtaagcctttaaagtaatgaacattaaaaccaaacattatttcactgtcatttaagatatgtgttcattggggaatctcttgattnnnnnnnnnnnnnnnnnnnnnnaagcaaagagctgtaaattaccatttactaaactagccaaatagtctgaatttccagaaaactnnnnnnnnnnnnnnnnnnnnnnnnnnnnnnnnnnnnnnnntttcccagaaaactaggcagaatgatcattcaatggatcactgtgaagcaaannnnnnnnnnnnnnnnnttaccccttaattgtcaacagtcaacaggagttaactgacttcttgtggtgctcagactctttatnnnnnnnnnnnnnnnttatcccatggattttactcattagtgtgtaaaggcaagccccatacaatgaagtctcagggtccatgaaagtagct

SEQ ID NO: 1198 - DNA, 1910 bp, Macaca Fascicularis
  misc_feature (1)...(1910): n = A,T,C or G
gaaacgtcaccactatctggacagttggacatgtttaatggcaaaaattagtattgatgaatatgctctgcactaccaggctggttcagtaagaaatatgtaaaaccttttgtttgaaaaaaaaaaagagattagcaataaactgaacataaccaacagctgaccccactttaaattaaagaggagaaaaggtgtttgcctacttggaatactataaaccagtgcttctcaaactttaaaatacatacaaactaccctgagtttcccctatcttgttaaaatgcaaattctgacaagtggaacggaggttcttatttctaacaagctcccagctgatgtcattgctgttggtcctaggaccatactttaagcagcaaggctataaagcaaacaggccctttaagtgacttgtaccttcttaaatttccctgcactccctaaaatgtttttacattgctattaagtctgtaattccaccaattacatttctgtaaaatgagctgtagatttattcacaacttaatattaattcttttaatcgaatagttttcctcatcatatccactgagttgggaacttcaagaatgaacattggtttttataaagaagaaggaattttaataatgaggcactgtgtactaaagagtgaacaaaacagtgggcacaagggggttagaaggaggtgggtgtttggcagcttgcagagtattgtgaaagcagagacacctggggtcagggcaaaggcgctatgaggaagtaggaggaggtgaagaaagagaggtgtgaggctacctgtacaaacatcacagttttagaagccttgcctcgggtcaggctgaggaaatctaatgatctcaataaaaacagcaagcctattcctaactttttatagaaaggtagtaagatccatgtgtatatcagtaaggattattgttttttcttaatttgcttatgcagttgtgaaatgcacattttgctaaatgcacaagccagttgaaactgtagcagatgtcctttaataaaaattaaagatgtcaagacaggatttagagctcaagttaagaccagtgaatggcaccatagaataataatgcctaaatcagaggtctttaaacaagcagatttaattggattgctcagtgtcattcaggtagttgatgaaatagcctgaacttgaataccaggactcttgactcttcatcaagtgctttttttttcttctatcatcaagtgcttttttaataccacacactagttcaaaagtctaagttaacatttcccaaaaggcttcatattttggtttcagtaagttctttttaaaaatgtgtggaagcagacnnnnnnnnnnnnnnnnnnnnnnnnnnnnnnnnnnnnnnnnnnnnnnnnnnnnnnnnnnnnnnnnnnnnnnnnnnnnnnnnnnnnnnnnnnnnnnnnnnnnnnnnnnnnnnnnnnnnnnnnnnnnnnnnnnnnnnnnnnnnnnnnnnnnnnnnnnnnnnnnnnnnnnnnnnnnnnnnnnnnnnnnnnnnnnnnnnnnnnnnnnnnnnnnnnnnnnnnnnnnnnnnnnnnnnnnnnnnnnnnnnnnnnnnnnnnnnnnnnaaaaagagcaaaactctgtctcaaaataataataataaaataaaaatgtatggaagtatttttgtgcttagtgatcttatattttaatggttcaactaatttccttgttgctgtgtttggtttttgtttttgttttttatggacctcatctgactggcatgatatattttttaagggatctgttttcatttctaggagacccatacaatttattgcatataaagtcaaaacagaaataaatcaatttattttcagaacatattccaggtgacatcaggagcatttgttttgagaaacaataaacgctattctcc

SEQ ID NO: 1199 - DNA, 659 bp, Macaca Fascicularis
  misc_feature (1)...(659): n = A,T,C or G
ttggcgcttggtctctactacttcaaatgagataactaaagtaaataacaagattaaacactggacacaggatttgtagaattctggatgtagatatggcttcggcgatatcggaggaataagttctagtgttttacagcataataggatgactatgatgaacaataatttattgtatattttaaaatagctagaggaaaggattttgaatattctcaacacaaagaaatgataaatgtttaaggtaatggatatgctaattaccctgatttgatcattacacattgtatacatgaatcaaaatatcacactgcttgcctgggcannnnnnnnnnnnnnnnnnnnnnnnnnnnnnnnnnnnnnnnnnnnnnnnngcatggtgacatgcatctgtagtcccaactactcaagaggctgaggtgggtggattcttgagcccaggggtttgaggctgcagtgagctatgatcacaccatcacactccaccctggctggcagagtgagaccttgtctcaaaaaacaaacaaaaacaccacattgtactccataaatatgtacaattattgtgtgtcagttaaagatgaaaacagcnnnnnntgaagtgcacatctgattaaaagattgcatgatgtttctatatgattctaagcacnnnngac

SEQ ID NO: 1200 - DNA, 742 bp, Macaca Fascicularis
  misc_feature (1)...(742): n = A,T,C or G
agttgacaccaatgtccaaacattaaacaaaatcaaaaaggagcttcaaaaatttaacgccccgttaacccccgggccaccggtatggctgctacctgtagtacagcagatgcttccattcctaattcccatactaatcctctgtcttatgttatgtcttgctcccattctaataaaatttctccaagccaaggtccaagagatcacttaagtcaccttcaacnnnnnnnnnnnnnnnccctacacccaactgccaacctcagaccctaactatgcccctcaacagcaggaagcagccagacagacaacggcgccccaaattcttataatcaataagaggttggactgtttgggtgagggagaaaggacaagatggaggaaggtgaatagaaaagatgcagtccctttgcttccgcgttcttcatccaacttacccgcacgtgggaaaatgcagcccgtgccgggaaaaaagcagaccaatggagcaggcatgaggtgaggacaatttgaggaaacagaaacagccacgcctatggagacgccccatgcacgcccttaccccacccactgcccccccattccagtaccgaggacataaaagtcgccgccagcaggcaccggtgcgacttctccggcccccacatctcgtggaccgaggaacctcgccggagagcgccggctcgacttccctggccccccacaccagaggaccggtgaacctcgcccaagagccctgagcagt

SEQ ID NO: 1201 - DNA, 724 bp, Macaca Fascicularis
  misc_feature (1)...(724): n = A,T,C or G
tnnngaaatcatttgattgctgagagaatatggttaaaatactcatagtaaatcatttccaaaacagtttgctaatagtctggctactcttcagtctttctttccttgacttgggtgatactctgtatgatttagaaatgtcaggaaggtagttgaaagttcagtgtcctctatatatggtaaacattatcttcctggagatttcctctcaatggatggctttaacattgaaaaacataggtaacatatacataatagatgattcattgatattacattacaatacactaaaataacattatcttgtttctaaactttatggccaacctgtatttaagaaaatgtgagcctttaatttaaaattgagtaaagcacaccccttnnnnnnnnnnnnnnnttcaatgtcttgagtgctttagatgcagagtgtcatctagaagtcaaaattctgtcagaannnnnnnnngatattttgataaatcacagaatgtataataataacaaaatgatattttacccaacatggtatggtgtttgagagcattaagagcacttgtacaaattatcttatttcattctgattcaccatgagaggctgagtattataatttacattttatagagggaaaactagggtttgggnnnnnnnnnnnnnnnnncaagnnnnnnnnnnnnnagctccttgtctcaaatccaggtcacaaggtcctaagctgtgggctat

SEQ ID NO: 1202 - DNA, 751 bp, Macaca Fascicularis
  misc_feature (1)...(751): n = A,T,C or G
tnttctgtagtctcactaataattgtctgtatataaatattgnnntattcatcctaattggaaatccttaaacttcctgtaactgcttagaaatctctttaaatatgtctgtgcttcccattttctcaatcctctgtttcttagcttctatgtcatatttcctatttatactgcatcgtataaatttattttactttacatttcagccactttggtttgtccttgtcagaggaagcttgtcagtaggaatgatttctggtctatgtggtgaaggatttataaggcaaaaggagattgggaggtgatttgatcataattttaactttagtaagagaaaatcttaaaattactgtcagcttaaaaaaaataagtgtttctttcttcctcatataaaaatccaggggtgcatcatccagggctagtgagttggctctgcttctcaggggcttaagctcctttcaagtcactgtggtgccacacttcgtgtgtttccctatacattatggtccaagaaggtatctgtgttacaggaggcaggattgaggtaagatgaaacacagggtaaaaagaatttctgtcagttctctgttcgtgagtatatccttttgcctgaaactttatcatccagacaaagcatgtaatacagaaaggttttagtcacacacaattggaaggatgtctttaaactggtgtttgcaatgctattcagtgtctcagaaagtatgtactcaagaaaagtatttattaataa

SEQ ID NO: 1203 - DNA, 716 bp, Macaca Fascicularis
  misc_feature (1)...(716): n = A,T,C or G
gggtgccgagctgctgctagtaggggcatgcggggnnnntggtctgcaggcagggctgacactccctgtggcctcctgccnctgccccccaaccggctgtgtcgccctggtaccagctgctgtcccctcgctcccctcccctgggctccctgtgtcgagggtgggcagcagctgcttgtcctgagacctcccgggtggtgtgcaggagctnnnnnnnnnnnnnnnnnnaggtggagctcagtctgggatggcgcccagggcacagggatggctgtttctgactgtgcctttgttttcagatgttgtgatctcaacagcctgtcacccaacnnnnnnnnnnnnnnnnnctgctgcgctagaaaatgacaaaacaattaaactgtggannnnnnnnnnnnnngtccctttgcgcctgcccgcgaggnnnnnnnnnnnnnnnnnnnnnnnnnnnnnagaaacatggtgtcttggaggtggtnnnnnnnnnnngcgcctgggggtnnnnnnnnnnnnnnnnnnnnnnnnnnnnnnnnnnnnnnnnnnnnnnnnnnnnnnnnnnnnnnnnnnnnnnnnnnnnnnnnnnnnnnnnnnnnnnnnnnnnnnnnnnnnnnnnnnnnnnnnnnnnnnnnnnnnnnnnnnnnnnnnnnnnnnnnnnnnnnnaaaaatttttaattttttattacannnngggtgaagttnnnnnnttaacatgcgtt

SEQ ID NO: 1204 - DNA, 703 bp, Macaca Fascicularis
  misc_feature (1)...(703): n = A,T,C or G
tatatatgtgannnnnnnnnnnttatagatgttatagggtagctgaggttatggctcnnnncttaactgtaactcaactattctgtattcaatgacatttttttctaatgattaattggttcactcacttgatcattatatcagaatgaccacaacattcagattcatataatagcgaactttataaacctgtattgtgtagagatgtgaaatctctatatttcaagagcagaagagttctttctagacaccttacatcaaggggacactggtccaattattatcgcttatataagcactcctataaattttgaaaaattttatacatgcaacaaaacattcctacatttgaagacattaagaaaaatcacaggtgactcatccgatcattttatatattaataaatattatgacatatatgtgaacacatcacaaatcatattggtgtaccaagaggcaatttatgcctctcttaagtatgtactgacataacctaatatactaaaatgggaaggggcttttagtcactgaaatatgcatcgtgtaacaaagatgaagaaaatacatggcttgtgcccatcataaaaaaagattcagactgaaggcttagctttggttttttcaattaaattgttaaactgtgcacagtgatttttttttagaagcttgagacatttgtgatgttggctgtttaaatctttg

SEQ ID NO: 1205 - DNA, 204 bp, Macaca Fascicularis
tgtgccatcatggggggcatgggtggagcacaggggctccctcaccctcggcaggcaaagggagtgggtacaggaggcactgcccccctttcctgccccctcctcatctttaataaagaccatggcttctcatctttaataaagacctgtttgtaactcaaaaaaaaaaaaaaaaaaaaaaaaagggggaaaaaaaaaaaaaac

SEQ ID NO: 1206 - DNA, 737 bp, Macaca Fascicularis
  misc_feature (1)...(737): n = A,T,C or G
cagctcaccagccactgagtgcagggcnnnaggtccagncnngcagaaaatgcaacaaggagagaccctagggagtagtatagatgagggaagggactcatggaaggaatggcctgctgagtagtcagcagtgcttaggaaggcttcctggaggaggtgtcccttgagcaaggcctaggatgaatagaattcatctaagggatttggtcacataattctttgtatttgtaggctggggtgtagcaggagccttccatgggaagcttnnnnnnnnnnnnnnntctgcctggaacatccgggctggagtcaaactacagccattcctaagggttccaccaactcaaggaggaacatcaggcctgtctctcaaagaccaatgatgttttcccatctctgaatgctagggggtcagtggtgggtacctggttacccctgnnnnnnnnnnnnnnnnnnnnnnnntcagggccgctctcaacaccctcagccactagggcacatccagaattttagagacatccaggtaggcaaggggggagcactaatgtgagcaggcctgtctggactcaagctacaggcccctgctgtgcatgatgtgggaacctggtcattcccatgccccatatagaacccagggctgtggctcccccactgagcatcccttgtcccactgtcctcccctgccttgggcactgcccagccctccactcctgcatcacagcagttttaagatcccatta

SEQ ID NO: 1207 - DNA, 1879 bp, Macaca Fascicularis
cgtgtctttcctcatggcttcccaggagtttgaggttgaaactattgttgaccaaagacaagacaaaaatgggaatacagtgtatttggttcggtggaaaggttatgacaaacaggatgacacttgggaaccagaacatcacctcatgaactgtgaaaaatgtatacatgattttaatagacgtcagactgagaaacagaaaaaactagaatggaccaggacaattagaatttgttcaaacaatgccagaagaagaacttccagatctaccaaagcagactatactaagagctctcctaaaatgctagtgactggcgaactacacggatccaaaagcagccagttatttgctgccagcaagaacgttaggagaaaggcagctttatttctcaccgatgcaaaggatatggagttagtaaattcaaccctcaagacatttgcacctgacagtcctgtggacaacaagaaagctgtgagcggctttcaggaactcaagaaactggaccctattgcagtagatcagcaggacatggtggacttcaaggtgacagaagggaaaccaatcagggaccctttgtcaggtcccagtgcagaacaggctggaatagagaacaggaccctgctacagccactaatgtctcagatgtctggttcagttactgcttctgtggccaaaagctcagctccccaaaaagctatagtggtattaatagacccgttagcagccactgggacagcagacacacatacatcagttccaagagtgaaaggtggccaaagacatgttactgatgatggcagagaccagtcttttgtcaagaaaatgtacttcaccataaggctaacagagagtgccagcacatacagagacattgtagtgaagaaagaggatggattcacccagatattgctatcaaccagatcgacagaaaaaaatgcactgaatacagaagtaattaaagaaatggtgaatgctctgaatagggctgctgcagatgacagcaagcttgtgttactcagtgcagctggaagtgtgttttgttgcggtcttgattttgggtattttgtgaagcatttaaggaatgacagaaacaaagcaagctttgaaatggtgaacaccatcaagaactttgtgaatacttttattcagtttaaaaagcctattgttgtatcagtcaatggccctgccattggacttggtgcttccgttctgcccctttgtgatctagtgtgggcaacagaaaaggcgtggttccaaaccccttatgcaacatttggacagagtccagatggatgttctactgttacatttccaaaaatcatgggtgaagcatctgccaatgaaatgtttattgctgggcgaaaactgacagcgcgggaggcatgtgccaaaggcctggtctctcaggtgttcttgactggaactttcaccgaagaggttatgattcaaattaggaagctttccttacataatgcagttgtgatagaagaatgtaaggcccttgttcgctgcaatattaagatggagttggaaaaggccaatgagagagagtgtgaggtgctgaggaagatctggggctcagcccaaggggtcgaatccatggtaaagtatgttgaaaatcaaattaatgagttttaattgtcagtctgtctgctcaggacccaagaactaagacgaaccaaatacatcatgaggtgcaagatgccctaatccattttcatagcacgaaacaatttcacccaagctgaaggcttggaagcagatctggaaatgtccaaggtatgtctttaaattaccatggcattttttaagcactgtaactttaaaagaattaattcaaacatattcgttgttccaagaatgctgcaaaaaaaaaaa

SEQ ID NO: 1208 - DNA, 734 bp, Macaca Fascicularis
  misc_feature (1)...(734): n = A,T,C or G
gtgcaccagcagcncccanctatggacatggactgacctccactcaaaggtttnnnnnnnnnnnnnnnnnnnnnnnnnnnnnnnnnnnnnnnnnnnctccaatgagtgcccagggcgtccaggcaggcgtccgctcaacagccatcctacctgagcagcaacagcagcagcaacagcagcaacagcaacagcagcagcagcagcaacagcannnnnnnnnnnnnnnnnnnnnnnnnnnnnnnnnnnnnnnnnnnnnnnnnnnnnnnnnnnnnnnnnnnnnnnnnnnnnnnnnnnnnnnnnnnnnnnnnnnnnnnnnannnnnnnnnnnnnnncagcaacagcaacaacagcaacaccagcagcaacagcagcaacaggcggctcctccccaaccccagcccnnnnnnnnnnccnnnnnnnnnnnnnnngggcttcagcagacccagcagcagcaacagacagcagnnnnnnnnnnnnnncttcaacaacagctctccaatacccagccacagcccagtaccaacatatttggacgctactgagccacctggaggaactgcttgtgcactggatgtggccccaccctttcctcttaattcccaatcccgttcttgggctnnnnnnnnnnnnnnnnggggcccttccctcaggctccgtttttaataagtttttagtatttttgttaatgtgaggcattgagctgttgggttttgtatattatttatatagagacc

SEQ ID NO: 1209 - DNA, 773 bp, Macaca Fascicularis
  misc_feature (1)...(773): n = A,T,C or G
tgcaggggtagggagcctnnnnnnnnnnnnnnnnnnnnnnnnnnnngagcgtgaggctgtgnnnnnagaatcagtgatgggtgctgcannnnnnnnnnnnnnnnnnnnnnnnnnnnnnnnnnnnnnnnnnnnnnnnnnnnnnnnnnnnnggctgcgggctccagacttcaccgcagggtggccgacagtggcattgggaccaaatgaggatgtctaactgcttcctgggtnnnnnnnnnnnnnnnnnnnnnnnnnnnnnnnnnnnnnnnnnnnnccctctccatcactccccatgctgcagcgcacaggtgggtggcagaggcaggctgcatccctgaatcatgttgccccattgcctattaatagaacaagtgnnnnncaggatgctggaacacaccagacatagagggagggaggtnnngccagatgtgtctacacagttgtctacacagcatgacagtagcagtggagttgnnnnnnnnnnnnnnnnnnnnnnaaannnnnnnnnnnnnnnnnnnnnnnnnnnnnnnnnnnnnnncgtttcttagtctcaccaccctttgttggctcagccatnnnnnnnnnnnnnnnnnnnggtgttgtgtgcctgagtctctcacttctttgaggttgggggaagcctagtccagaaaatgaaaacccatagaccagcctaacttcctttcaaccaagtgacagcctcnnnnnnnnnnnnnnnnnnnnnnnnnnnnnnnnnnnnnnnnnncatacaannnnngagtntcatgtcctgt

SEQ ID NO: 1210 - DNA, 371 bp, Macaca Fascicularis
  misc_feature (1)...(371): n = A,T,C or G
ccccaccccccccccacacactacatacaccacacaccacctacaccacaccagacacatgcacacgtatacaccacataccacacattcatacacaccacaaaactcagggcctgctttgggggaaggtaatttnnnnnnnnnnnnnnnaagaacgtgcctcacatcatgtggctgtggaggtggggagggcaatttagtcttgnnnnnnnnnnnnnnnnnnnnnnnnnnnnnnnnngcccgggcctggggccaaggtggacggtgaaacaggaaggctgcccccatttccacatgtgctcacatggggctcccccacctgaggcctccaactacaggtgcgccgctgccccgactgcacccacctttgg

SEQ ID NO: 1211 - DNA, 642 bp, Macaca Fascicularis
  misc_feature (1)...(642): n = A,T,C or G
aactcttccatcaagatggannnnnnatcgaggactgtctgcacattgaatttgagtacaataaatccaaataccacttgaaagatgtcattgtagggaagatatnnnnnnnnnnnnnnnnnatcaaaatcaagnnnnnnnnnnnnnnnnnnnnnnnnnnnnnnnnnncgggtacaggccccaacgnnnnnnnnnnnnnnnnnnnnnnnnnnnnnnnnnnnnnnnnnnnnnnnnnnnnnnnnnnnnnnnagtccatcnnnnnnnnnnnnnnnnnnnnnnnnnnnnngctcacgcccaccatgcgggacatcnnnnnnnnnnnnnnnnnnnnctattacctcaacctggtgctgatagacgaggnnnnnnnnnnnnnnntcaagcagcaggaannnnnnnnnnnnnnnnnnnnnnnnnnnnnnnnnnnnnnnnnnnnnnnnnnnnnnnnnnnnnnnnnnnnnnnnnnnnnnnnnnnnnnnnnnnnnnnnnnnnnnnnnacccccagccagctgtctgacaacaactgcaggcagtaggcccccagggccaagaannnnnnnnnnnnnnnnnnnnnnnnnnnnnnnnnnnnnnnnnnnnnnnnnnnnnnnnnnnnnnnnnnnnnnnnnnnnnttgacccgttac

SEQ ID NO: 1212 - DNA, 339 bp, Macaca Fascicularis
ccccttttttttttttttcttgttttttttttttaaagagataaaaagtagttttattttttctaaataggattttgatcacaaaaatgctggtaattcaaacctctaaagcggaaaagcatataacctgagaaaaatgcaaaacatatttcatctctcacatgagttagacttagaacacctaagcattctccttacgagattaatacagtcacgtgttgcccaatgatagggatacattctctgaaatgtgttgttaggtgacttcgtccccgtgcaaacagcacagagtgtacttacggaaccctagatggtataactattacacgcctagactat

SEQ ID NO: 1213 - DNA, 741 bp, Macaca Fascicularis
tgcttttgttttgggaaaggatttggcctcttacttccccagtggattgaaagttttatctcctgccctgtcttggcacaactctggatagactgcaggttggaatttgctggagtttggtgtctttttcaaattcctttggattctcttcagccaaatcagcagtctcgtcctatggatgaagtgattgcaatttcccatctgcaaagcatctctctagcccagattttgtggagccttaaaatactccctcgctgccaccctgaccccacagctggagaaccctatgcttatgtggtgggcagggccactgttgatggaggatggcgaggaaggggtggtgctcaaaggatctgtggtgctggaggtctaaatgcctctcaggacggtaggtcaggaacctcagagcagcttcatgtctgccaaagctgagagggagcaaacttgggaagcattttgctcactgtcctacccaagttttaatagcataatagttgatgccaaaggagatggtgacgtcccttccactgcagttgctgtcacaaccttgatgtctttaagctaatggccatttgcatctgtgtcttcaaacagatcctggttacagccattttctatcgttcacttctggggttaagtaatgcagggttctgcaaacaaggtgtcgctgtccaaatgtactgtactggcatagagagcactgctttgttttccactgttgtagagaaaactagggagaac

SEQ ID NO: 1214 - DNA, 766 bp, Macaca Fascicularis
  misc_feature (1)...(766): n = A,T,C or G
agatggagagcggcagcgggtgcaccnnnnngnncnncaacagcagcggcaccactgcgtgagggccgcgagcgcagtgggcgcgacggctgtggagacaagcagaagagcggcggcgtcgcggaccaaggcgaaggacaccgcgggcagccgggtggcgcaaatgcatgtccttttccgccatctgttcccctcattccaggaccgttgacagggacagagactggagagctaggaggggccgcgacgctgtggcgatggctaggtcctgggttgtcccgggttccaccgaaggagaggcgccttggacgctgcttgggcctgcaaggaacagaacatgtcggggtccaactcaggtacttgtctcaggtctcctgtaaccaccggcctggaggacctggggacttgggcaccacctcaccaagagagagtgaaggaccaagctggcctggctccgagttccaaagctacacgactaaggagttgggagaagggatcgtggtcttgcttgggagagggcaagttaagcttccagtggccatttctgggcaggccgacgcgcagggtttattaggaaacattctctagaagaatgagttaaaattgcataccaccaatgcagagaaaatgcctcactctgccggcctggctcggccattaatggggtcttggggtgcgggtagagtcagcctctgacaacctcctcctgagacgaccaagccttaactggtactttttctnnntgtatcnnnnnnntgacttctta

SEQ ID NO: 1215 - DNA, 684 bp, Macaca Fascicularis
actggaggcagggagggggtccccaaagcctgaggatcagaaagggttttcccgcatggtcccccaggcccccgttcgcctcaggaagacggaggatgagcccctgggctgctgggggtgggcggtgcgggtggggcgggttaaggttcccagtgcccgcgccctgcccagggagccccggagggcggcgtcgctgtgtcttctcagaaggccgcccgtgtgaccggatccttcgtgtccccacagcacgtttcttggagcaggctaagtctgagtgtcatttcttcaacgggacggagcgggtgcggttcctggacagatacttctataaccaggaggagtacgtgcgcttcgacagcgacgtgggggagttccgggcggtgacggagctggggcggcctgacgccgagtactggaacagccagaaggacttcctggagcagaggcgggccgcggtggacacctactgcagacacaactacggggttggtgagagcttcacagtgcagcggcgaggtgagcgcggcgggggcggggcctgggtccctgtgagctgggaatctgccatctgtgagcatttagaatcctctgtatcttgagcaaggagttctgagggcacaggtgtgtgtgtagagtgtggatttgtctgtgtgtctgttgtggggaggggaggcgggagggggc

SEQ ID NO: 1216 - DNA, 721 bp, Macaca Fascicularis
  misc_feature (1)...(721): n = A,T,C or G
gcctctgggagggcnnnnnnnnnnnnnnannnnnttctagnnaggacaagtcgggtccattttcaagggagctgaaatatttggagggggtgctctgagacccacagccaataaatagggaagcgacnnnnnnnnnnnnnnnnnnnnnnnnnttagggttgattttgatggggctgaggggcttagaggtagaccccctgccctggtcaggccccactccctctggctggtgggggcnnnnnnnnnnnnnnnnnnnnnnnnnnngggccggggcaatgttgcatggtgtgattaacctactaacccagggctcagccgggacgctgtggcgtgtggcgaggtgcctggcnnnnnnnnnnccaactaacccactaaccaggcccgagcatgccctactaaccacccccccgcagccagatcctactaaccatgcagctcatgggcctttcaaggggctgggatatgggggcagccaaggctccagaaggctctgcctatgggctgggatcttnnnnnnnnnnnnnnnnnnnnnnnngggaatgcaaataagactcaccaactctgccacttnnnngttgggtgactttgannnnnnnnnnnnnnttctctcaacctcagtttcctcagtggtagaatgcgagttctgatacctcacaggttgcagtgaggattcccgtgaatnnnnnnnnnnnnnnncatggccagatactttttaaaaaaa

SEQ ID NO: 1217 - DNA, 714 bp, Macaca Fascicularis
tgccagtggattcagatagcaatgcttggagtagaatccgttactaaaatagttccaaagttgacaaaaaattttcgaagatagaagcagttttacattgggggttgctgaggtaggcacaagaaaaagtcaggcataaagcacaaggcagactgtttgagtggattggttgctgctcactaaagttcttcccctgatctctaaatatggaggtcattaccaagaaatggctttggtatgaatgagagccagatctccactgtgtgagccagtgaattatggctaattcggctgttacagccactggttggctggattttaaaccataaaacttgaagattacctacaaaaggaacagtgtggctataagcctgagctttaatggaatatacatcctcacggaaaagttggaaataaccaaaactgaagtcttaatttaccttcagtttaatctgtggatttgttcaaatactaaagatcctcaggtccagaattccagcatcatttattcttttaaaatttttaagaacttgatccattgtatcagtacctcacaatcagagttggcaaatgatggatgagtgattcaagcagtgcacccggtggaagctgaaatccatctgtgaaaggaactgaagttaacgtgaatatgctgactatatcctggaagcatttttataccatcttgaaatttcaacaaactggctttgccag

SEQ ID NO: 1218 - DNA, 1808 bp, Macaca Fascicularis
caaacaaactctatttggtcaatgtaagcaggacccataggcataactactcgttaagtggcctctgcattagtgaacttggctttcagaggagtatatatgcttagcttggaaaattgaccctgtgattttggtacactgccagctgatgtcgtcagccctatgcaggccatggatgctaaactcatacatactgagctccagctgagctttgtcaccaaccctcctgatgaaaaccagatcgtgggacaccaggtcattctgtacgtctgtcatgggatggatgaatttaaagagctctactaccatcgcaacccccatgcccgcttggatgacctctgatcacaagcatgggtcacaggtccaggatccatagatgccagtgcagccccaaggcttggctccttcactccatcagcaggaaccttttggggatgtgacagagaggaagcagctccgggccaagctccagtgtaaggacttcaagtggttcttggagactgtgtatccagaattgcatgtgcctgaggacaggcctggcttcttcgggatgctccagaaccaagggctgaaagattactgctttgactataaccctcctgatgaaaaccagatcatgcatctctgcgaagaaactgccccagaaaatcagaagttcatcttgcaggaggatggttctttatttcacgaacagtccaagaaatgtgtccaggctgcgaggaaggagtcgagtgacagttttgttccactcttacgagactgcaccaactcggatcatcagaaatggttcctcaaggagcgcatgttatgaagccttgtgtatcaaggagcccatcgtaggagactgtggagccaggactctgcccaaaagagacttagctaagcagtgaccagagccctccaaaaactaggctgctctgctttgaggagggaatcattttgccatttgtaaaagttgtgttccatttagtaaaaatgtgaataagctttgtacttactttgaaaactttttaaatgttccaaaataccctattttcaaagggtaatcataagatgttaacccttggtatttgaaaattaaaaccttataatacttttctatcaagatgtatattttacagtcaagccttttactttcattagcaaaaggtaaagattttattttgatatttacaagaattcccaggtaagaagatatctgcatgggtggaaactgggttcaaacaacgtactttgcattaactgataatatctcagctgtggggttaaagttttcccggtatagagagactgacactaggaacactgtattggtttattcaggtcattgagatcttctagatgtatttttaaaagaatgctttttggttatgtgttgctaccacagttaacactccataatgttcatgtcagccaaagaggactaatcaaagctgaaatctcaaagaacaatttgctttactaagctaagtaaacttgagagcggaacttctaacaatgcctcactatagtgtggttggttgcctttagcaactaccactatgactttaaaacatgtttataccatttttaatttttatcagacagtagtgtcagggagaaatgtaatgttccatatgaaattccttttacgagtttgttcattaataacatttagtaatttaaatcagcgttcgagtttgtgctgccgcaactgctgtgaaaatttctctgagtaattctgatttgtgaatgatcccagatcaaccctgagattttgtaaacctgattaagtcaatatgaatgattaaaaagatgtgagaacacgc

SEQ ID NO: 1219 - DNA, 625 bp, Macaca Fascicularis
caaggcttagcgtgaccacaactggaccgggcttcccagggagtatgtgcccagatgataggcccggcccacgccgccgccccctctgagtgatgcaatctcaccacggggctgtgcaccccactctgatgctcaggcctgtggcctcactgggacgaaccgtgggtgggggacccaccctggtgctgcctccagcacaaggagacctggacacagcagacacacatcacaaggcaaacacaaaaggacacacccacctggccaccaagccacacctcctcagacacactcagacaccactccaggctcacagccccgtcttagtgaagccacccacgtggggtgtgccaggcgcccccagatacaaacgcagccacgcacagacgtaacacacaggtgccaggcccagtgctcctggaggctggcgggctgtctctctcacacagatacacatgcactccctgggatctaggaggccctgggcttcccgtgtctagccccggcgtagacttgctcattagggtgtttgactctgggatgctgggccgggcgggcatttatgctctgagcagcgaggaccactgggatggaggtgggcgccaagactgctgctgctgggctgtgc

SEQ ID NO: 1220 - DNA, 772 bp, Macaca Fascicularis
gtcaccaaattggacaaacaaaatgcaaacaagttgcattttaaaaaagcattaaaaaaaaaacccaacaaggatagtgtacataatatgtagagttgtgcaaacattgtgcaaaacattggtacgggctgccttgctgggcacaactctacttattatgtaaactatgttgttctttagaagttcttttaaaagtgcaaattgtctgtgatcacttttgggcaaagcccaaagcacctacaagtcctgccccaattattcaaatacctcgatttgggcatatttcaaatgatatatcaagcacaataaccgaggaggtgctatttccaggattctagacccctctaccattcctgtactaatagtccctccattggataaagcaaatgtggcacatatacaccatggaatactatgcagccataaaaaagaatgagttcatgtctttgcagggacatggaggaagctggaaaccatcactctcagcgaactaacacaggaacagaaaatcaaacatcacatgttctcactcataagtgggaattggacaatgagaacacttggacatagggaggggaacatcacaccaggggctgtcgaggggtggggggcaagggaagggagagcattaggacaaatacctaatgcatgcggggcttaaaacctagataacaggttgatcggttgataggtgcagcaaatgaccatggcacatgtatttctatgtaacaaacttgcacgttctgcacatgtattccagaacttaaagtaa

SEQ ID NO: 1221 - DNA, 2327 bp, Macaca Fascicularis
  misc_feature (1)...(2327): n = A,T,C or G
ttctcagggagaaacacgtcaccaaatttgtggccatctttaatattcgcatttcatgtagttctactctatgaggataagcatgctggcatctgacctggtcacagtctgaactgtacagcaaaggatgggggtggtgaaatgtgaagtgatgagcattagaaaatgctttttgcctctgaggaggatttccctaggcaaaaagtggaaagtagttaaagttgatctttgctgttatatttgctattaatcttgtggtgaaggttctggcaaacatattgaataactgaattctgtttcagcaaccaatgcctgccatcgccacatctactaagtttcctaagacaaggtttccaaattctgcaattctgtatcatgttgaccatttttaccatatcagggtccttcttgaagtattttttaacttctttttctaacttagttgactccattttatttaagttttaagataaaattttcatcgctattataaatggaaagccattatcacttgtcataagtagagatacttctgaaaataaaaatgagaactatatagtgttattcacttctagtaaagacatgcaatctttttgtttaaagtgaagaataggaagaattaggtattgaagacatactatcaccaaatgaagacatttctcttgatttaaaaagacttgaaaaaataattggaaaaggaataacttatttagcatgcaaatcgaggttgtgcaatgttctgcctgaatatcaggtaagatcacctcatatgtcaggaatagtatcaggtatttcgggaatgtattagttagattgtgctatgtagaaactacctcaaatattagcagtatagaataatcatcattcagttgctaaccaatatgtgggctagtagttctggcatggttcaactgagacagctcctttctgctccatgccatgttatctgggctcatcatacaaagttgactaagctcagatagcatggctgaaccatgaaagagttgaccccttgagatggctggacagttttcaccatgtggtctttcatcctgaagggtgctagtccagccttgctcacacagtagtagcaatcaaactgggcaaaaacttaggccaaaacatacaacattactcccatcacattctgttggtgaaaagaagtcatcacaccagcccagattcaatgagtggagaaatagatttcacttgctaatggcgatagcaacaaataattatggccatgttttatctccccaaatgagagacttttcttagaaagcatatagcacaagagatgttacagaaaaatacacagtatttgcaattatatagctttgacttcaagcttggaactgggttagatcatatataagctgaacaaactacttttgtttctctatgagaagacctagaacagcatttctcaagatgtacttcatgaagaattggtgtttagtgaggtgttactaagtattctggaaacaaacatccaaaatagaagacttctaatattttagggaatgctataaaatacaattcactttgagttcatgtgagtatgtaaaagaatttgagtaaatcagttttactcaatttcccagactgatcatagatcactttgatcatagaccttccaaattccatttaacaaatatttattacacacgtactttgttccaagtcctctgctggacctgtggattagatcagtaagcaaagcacatgcagacctgttccttaaagatcatacaatgtggtaggcaagctcagtattacccagatggccatataaccacaatggttgcatcaagaatacatatattaagatgaaaacatactgaatattgtacagatgacccctgagcaacacaggtttgaactctgtggttccacttgtatatggatttttttcaataaatattttggaaaaacattttggagatttgtaacaatttgaaaaaacttgcagatgaacctaaaaaattaagtatgtcatgaatgcataaaatgtgtgtagatactaggccagatttgnnnnnnnnnnnnnnnnnnnnnnnnnnnnnnnnnnnnnnnnnnnnnnnnnnnnnnnnnnnnnnnnnnnnnnnnnnnnnnnnnnnnnnnnnnnnnnnnnnnnnnnnnnnnnnnnnnnnnnnnnnnnnnnnnnnnnnnnnnnnnnnnnnnnnnnnnnnnnnnnnnnnnnnnnnnnnnnnnnnnnnnnnnnnnnnnnnnnnnnnnngcagaggttgcagtcagctgagatcacagtttactccagcctgggcaaaagagcaaaactccgtctcaaaaaaaaaaaaaaaaaaaaa

SEQ ID NO: 1222 - DNA, 2422 bp, Macaca Fascicularis
ataactggggaagaagtttctgggcccagaagaaaatgtaggtagtcttagggttaggtagcagctgtcgggaacttgcccctgcccataagatcctaaagggcctccattggactctcaccagacagttagaacttgtttcctcctccgtgtcagccagcaagaggtgcttagggggctgtgcccagcaggacctcactgcccagcaaaacagcaggggagccaagtggcctagatctgctgtggagtacccaacagtttgcctgcctgtctgccctcctcttcaccttattctcatcactgacgtctaccattggcttggaaatcagaaacccatatccatctagatgattgattttgatgatgtggctgcaataaatccagaactcttacagcttcttcccttacatccaaaggacaatctgcccctgcaggaaaatgtaacaatccagaaacaaaaacggagatccgtcaactccaaaattcctgctccaaaagaaagtcttcgaactcgctccactcgcatgtctactgtctcagagcttcgcgtcactgctcaggagaatgacatggaggtggagctgcctgcagctgcaaacacccgcaagcaattttcagttcctcctacccaccctaggccttcctgccccgcagtggctgaaataccatcgaggatggtcagcgaggaggtggaagagcaagtccattccatccgaggcagctcttctgcaaaccctgtgaactcagttcggaggaaatcatgtattgtgaaggaagtggaaaaaatgaagaacaagcgagaagagaagaaggcccagaactctgaaatgagaatgaaacgagctcaggagtatgacagtagttttccaaactgggaatttgcccgaatgattaaagaatttcgggctactttggaatgtcatccacttactatgactgatcctatcgaagagcacagaatatgtgtctgtgttaggaaacgcccactgaataagcaagaattggccaagaaggaaattgatgtgatttccattcctagcaagtgtctcctcttggtacatgaacccaagttgaaagtggacttaacaaagtatttggagaaccaagcattctgctttgactttgcatttgatgaaacagcttcaaatgaagttgtctacaggttcacagcaaggccactggtacagacaatcttcgaaggtggaaaagcaacttgttttgcatacggccagacaggaagtggcaagacacatactatgggcggagacctctctgggaaagcccagaatgcatccaaagggatttacgccatggcctcccgggacgtcttcctcctgaagaatcaaccctgctaccggaaattgggcttggaagtctatgtgacattcttcgagatctacaatgggaagctgtttgacctgctcaacaagaaggccaagctgcgcgtgctggaggacggcaagcaacaggtgcaagtggtggggctgcaggagcacctggttaactctgctgatgacgtcattaagatgatcgacatgggcagcgcctgcagaacctctgggcagacatttgccaactccaattcctcccgctcccacgcctgcttccagattcttcttcgagctaaagggagaatgcatggcaagttctctttggtagatctggcagggaatgagcgaggtgcagacacttccagtgctgaccggcagacccgcatggagggcgcagaaatcaacaagagtctcttagccctgaaggagtgcatcagggccctgggacagaacaaggctcacaccccgttccgtgagagcaagctgacacaggtgctgagggactccttcattggggagaactctaggacttgcatgattgccacgatctcaccgggcataagctcctgtgaatatactttaaacacactgagatatgcagacagggtcaaggagctgagcccccacagtgggcccagtggagagcagttgattcaaatggaaacagaagagatggaagcctgctctaacggggcgctgattccaggcaatttatccaaggaagaggaggaactgtcttcccagatgtccagctttaacgaagccatgactcagatcagggagctggaggagagggctgtggaagagctcaaggagatcatacagcaaggaccagattggcttgagctctctgagatgactgagcagccggactatgacctagagacctttgtgaacaaagcggaatttgctctggcccagcaagccaagcatttctcggccctgcgagatgtcatcaaggccttgcgcctggccatgcagctggaagagcaggctagcagacaaataagcagcaagaaacggccccagtgatgactgcaaataaagatctgtttgctttgaaaaaaaaaaaaaaaaaaaaaaaaaaaaaa

SEQ ID NO: 1223 - DNA, 761 bp, Macaca Fascicularis
  misc_feature (1)...(761): n = A,T,C or G
gtgcagagagatgaaaagtatacatgctatagcatcagaagtgtgacaaatcatttgtgggaaccaaagatagcannnntgatgacaactcccacagtgattggccagttgtatgatgagtacactgctggaaagagggtaaactgggagttagttagtggatggtcccaattccctgcctacagcagagtgccaaccagccctgagtgcaaaattcgagttcaatgtgtgttcttgtgtgtggtgtgctttatggacccgcaaatactatattcattattgatgataagatcttcacagaatcctgtaactactaatgcattgaggttttaatctcagtacatcagccaagaggaaccagatcacagggtagtgatgtctactgggatgatactcataacatctacacaaaacaagnnnnnnnnnnnnnnnnnnnnnattgtttatcagaattgtatctcaattggctgagcattacttttgtcaaaatgtgttatctgtaaaccatgtgtagtgaaattcttctgtaactttggattaaaggtatttatggtctttttgtttgtttgatttttaagtaagttatttcttttgtcgacctgctgatggtatggttccatccttctgacctcagcatccaatctttttaaggatttttgttttcaatattgttattttaaattgtggttgaagcaatacaaaattgaaatatggattgtgcatgactgtgtcttgagtgtaaaaatattgcagtttgaaac

SEQ ID NO: 1224 - DNA, 184 bp, Macaca Fascicularis
cagaagcactacccagagggaatgcctgggcagtttgtttaatttggtggcacatcaacattgtttgaaacttgttttttgttttcttttctcgaatccgatttattcacgaatgacctctaaaaaatcgcttctacatctcaaatcatgtacatcacttacaatctaaatgaaagccagttat

SEQ ID NO: 1225 - DNA, 766 bp, Macaca Fascicularis
  misc_feature (1)...(766): n = A,T,C or G
taagaggaatgcnttcatttnnncatgcttcgcttatgaaattttgtctcttttttggtctttttnnnntatattcaagttacaaatgtacaagtgtcctaagagtgctccttttgtattttacatatacacagtatgaaaatacattggaacactaggaaagttttttaaataacagttctaatttatcagaaaattgtgttttgggattgagttctttgactcagcccagaatcccacgccctgggcctggttttctaacgcggtcatctcatctcgatattttactttagaatctggaatctcctccttaatatatgaccatgactttgaaagccaaaagaggaatcaacaagaaataaaacaaaccttcatctttaaataaaaagaaaaaagaaagaaaccaaaatgagaatcaacactttatagtataggctcactgggtttttctttcttttctcttaatttaaattcagttatttttaatggttaatacataaatggtgcgaaatttaaaaannnnnnnnnnnnnnnnagtgggaaacccaagcctccctctctcctccagcacccattacctctccctggaggcaactcttttgattcatttcttacacacactgccagagatactctnnnnnnnnnnnnnnnnnnnnnnnnnnnnnnnnnnnnnnnnnnnnaaaaatataagtaagatgtcatacatactgtcatacacattcttttttaccacttaatgttatatcttggatatnnattacctgga

SEQ ID NO: 1226 - DNA, 752 bp, Macaca Fascicularis
  misc_feature (1)...(752): n = A,T,C or G
tgattagatatgtccnnnnngagcannntggaaaatgcaatccatgtcaccaaatataattgctacaagtaagatgaaatacagctcaccaaaacactaaactttgctcttgagcaattatagagtttgatgtccttttaaaaaataagaaaacctaggttttatcatactaaaattttattttgtatatgatgtttggttttttaaacttactaacataaggatttcctttaatattccaaatacagttcttgttgaaacagtatccaacatgaaatcttatctccttgcttttagacttagtgctatttactatctaatgacttttatatggtaagccagggtacatcctatatactacagataccttaggtttcagtacttttatgcagcttcttcattgtgtcatatctgtaacagagctctgatgaaattaaaaaatatatgattaataggattgtttcaccatttcagaaatcagagtagaaaacaaaatagctgccaggtacagtggctcacacctgtaatcccagtactctgggaggccgaggtgggcagaacacgaggtcaggagtttgagaccagcctgaccaacatggtnnnnnnnnnnnnnnnnnnnnnnnnnnnnnnnnnnnnnnnnnnnnnnnnnnnnnnnnnnnnnnncagtttctcaggaggctgaggcagaagaatcacttgaacccaggacgtggaggttgcagtgagccaaaatcatatcactgcactccagc

SEQ ID NO: 1227 - DNA, 1464 bp, Macaca Fascicularis
gtgatgatgaaatccctaggaaaaggccagaaatttggtctcgatctacaatagttcaccctagggaaaaagaaaatattccacgaggcagtgtccagtttgctcaggaaatagatcaagtatcttcttcagcagatgaaacagaggatgaaagatctgaagctgaaaatgttgcagaaaatttctctgtatctaacccagttcctcagcagtttcagggaataattaatttagcttttgaagatgcaactgaaaatgaaagtcgtgaattttctgcaaataaaaagtttaaaaggtcagttttactttcagttgatgaatgtgaagagctgggatcagatgaaggagaagtccatactccctttcagccttctgtagattctttttcaccttctgatgtttttgatggcatttctcatgaacatcatggaaggacttgctattccagattctcacgagaaagtgaaaataatattttagaatgtaaacaaaataaaggcaatagtgtatgtagaaatgaaagcactctcttggatcttagtagcattgactcttcaagaaaaaataaacagagtgtttcagccacaggaaaaaagaacacaatagatgtcctatccagtagaggcagacagcttcttccagaagataaaaaagtaaacaatggaagcagtgtagataatgacattcagcaacgcagcaaattcttggatagtgatgtaaaatctcaagaaagaccatgtcacttggagcttcatcaaagagaacccaattctgacataccaaagaacagctctacaaaatctctagactcctttcggagtcaagttctgcctcaggaaggtccagtgaaagagagccattctacagctactgaaaaagctaatattgctttatctgcaggtaatgtacagaaatagaaatgctaaatgcataagaaaataagtttataaaattttaaagttgtatgaagccctgaatgttatattttagtcaaatagaataattacttaagcaacagattaaaattttaaatgaaaaatttcttaatatgaaaattagctagttactcattctttattgttcacttaaaatcctaatgaagaagtaatatatagtaaacattttgattgttatatagagctaacctactaagagattttacatgaaagaataaatagaaaaccttagtttgctgctatttagttatttatgtataatttaacacaagaattcttgactattagaaattttattatacattggatatgatttatagacttgatagtatattaaaggcctgtgcaataactctagtaatatgtaactaaaagcactgaactattttgacaactagattgatttacaatttatatacattttacagagattaaaattttcaggatctctctattctaaaattttcaaataaaaagataaatttcctaaaaaaaaaaaaaaaaaaaa

SEQ ID NO: 1228 - DNA, 829 bp, Macaca Fascicularis
  misc_feature (1)...(829): n = A,T,C or G
agccctaccaaagcatatgagaannnnnncagctgcttcatgnaaaanntcctggccagtgtgtgggcttttnntataactactgcttatcagcatgtcaaaagtctcatcttcggactgcaagtcttgatcggccttagttatagtggccttactgcatgtggagctaaccccaggaagatggagtgacactctctggaggattaggtggtctcctccaatgtggcttgatgggcttctgaactctttcctttaaccatgcagagagtctacactgccagtgatcatgtgccacaactctatagatgtagaaactcaaaatattcaaaacattctgaaacagtttccattgaaaggaaatagaaaagcagtcaggtgccactctccggttaagagaactagtagatggctcacaagaacactctgtcgctactgtctgtgcctctgtcacagcaaatatcctgatccttcagttttaagggtgcagggccattttcctccctttcttactggtagttctcaagataactgtatgatatgctgggaaggcaatatcctgataatcaagtgacattggtcagaacagcccaggctctgttatagtccctgctcgaaacaaaatggcctttaacgcttgtgtccagcaaaccacatcctgggagaaaacccaatgtgggctgctttctggggtccctcagttgtagtgcaagtgaagcatttacagtcaaaactccatccatctgctctgggtagccttcctgatcttgtggtagcggttcatattgaatcctagacctctgttgtcttttgtttgctattgtaagtaata

SEQ ID NO: 1229 - DNA, 719 bp, Macaca Fascicularis
  misc_feature (1)...(719): n = A,T,C or G
tcaatataatttaaacatcagtactcannnnnnnnnnnnnnnnnnnnnnnnnncccccaccccaaatatctagatttgtccagtgtggttgttgagcacttgaattgtggctactttacaaagtgagatctgctgcaagtaaaagatatacatcagattttgaagacatggcattaaaaacaaagtaaaatacagcaagtccttgaataatattgttttgttcagtgttgtttccttataactttgaggagaaaaaaaaaaaaatcaattcccagctggggccactgtctgtgtggagcttcctcttacatcccgaagatgtgcccgttatgggacctggcatggctgtgtggtcccattgtgagtgattgtgggtgtgagtggccctgcaatggagtggcattctggccagagtgggtcccgcccatgtgcaccccaaactttacaaagtggaatacttggttaaataatgatattacttatttttactaatctttcttaaatgtgtgtatagctcacatttgtttcgatgtttaatattgtaagtattttgagtcttatttcttatatcaattggcctatagaaaaattggtttcctcatagggcatgttacttaaagtcatggtttccaaggaacctatggatgtttttaagtgaagacttactgtatttcattaattttgtattgcttaaaggttgaaatgataaaatttggggt

SEQ ID NO: 1230 - DNA, 2626 bp, Macaca Fascicularis
cacaagagagggagagtcagagaaaatgggcaacaagtgcggcggcttccgccatggcaggtgattcgaggactcagcacgaggcgagagtagggaccgggaagagccggaaaacccgcctgtgattggccgtccaggggtatcggtcgcttgtgattggtgaggcccaaacagacagctgcgttttgaaccgcgtagggttctgggtagcaaaggccttgcaagggtcttaaccgaaagggggagggggaaggtcgccaacaaacggctgagctcacaatccaggccggggcgtccccctcccccatggagagagccagaccggagcctcagcctcaacagcgcccgttgcgtcccgctccgcccctgctgccggtcgagggcaccaccttttgggcagcggccgtggagccccctccgtcgcctcccacactaagcgcggccgccagtgcgaccttggcctcgtcgtgcggggaggccgtggcgtccggcttaccgcccgcggtgcggcggctgctgcaggtgaagccagagcaggtgttgctgctaccacagcctcaggcccgggacgaggaagccgctgcctcgcccgcgcaggcgcggctgttgcagttcaggcccgaccttcggctcctgccgccgccgtcagcgtccgagggcgccccctccaggccggagttgcacccggtgcagccccgggcgctgcacttcaaggccaagaagcaggagctggggcccggcctggacccgtcagtgggtcctcgtgggggcgtcgagaccggtcctagagcctccagggtggtcaagttggaaggtccgggaccggccctcgcctacttccgagggaacgagaagggcaagctggaggccgaggaggtcatgagagacgcgatgaaaggcggggatggcaaaagcccggcggccatccgagaaggtgtgatcaaaacggaggaacccgagagactcctcgaggactgcaggctcgacgcggagcccgcgtccaatggcctagttcatggcagcgcggaggtcatcttggccccaacgtccggtgcctttgggccgcaccagcaagacctcaggatccctttgactctccacacggtcccccctggggcccggatccagtttcagggagctccgccttcagagctgataagattgaccaaagtcccccttacaccagtgcctattaaaatgcagtccctactggagccttctgtaaaaatcgaaacgaaagatgtcccgctcaccgtgttaccctcagatgcaggcataccagacactcccttcagtaaggacagaaatggtcatgtgaagcgacccatgaacgcatttatggtttgggcaaggatccaccgaccagcactagccaaagctaacccagcagccaacaatgcagaaatcagtgtccagcttgggttagagtggaacaaacttagtgaagaacaaaagaaaccctattacgatgaagcacaaaagattaaagaaaagcacagagaggaatttcctggttgggtttatcagcctcgtccagggaagcgaaaacgattccctctaagtgtttccaatgtattttctggtaccacacagaatatcatctctacaaatcctacaacagtttatccttatcgctcacctacatactctgtggtaattcccagcctacagaatcccatcactcatccagttggtgaaacctcacctgccatccagctgcccacacctgcagtccagcgcccaagccctgtcacacttttccagcccagcgtctccagtgctgctcaggtggctgtccaggatccaagtctgccgctctatccagcactcccgccccaacgctttgctgggccttcccagacagacactcatcagctgcattctgaaggcactcacactgtgaagcaacccacccctgtctctctagagagcaccaacaggatttcaaatagtgcaagtactgcccatgccagatttgcaacttcgaccatccagcctcctaaggagtattccagcgtttccccttgtcccagaagtgctccaatcccccaggcttctcccattccacacccacatgtctaccagccccctccccttggccatccagccacactcttcgggacaccaccaagattctcttttcatcacccttacttcctacccggacctcactacttcccatcaagtacatgcccttacagtcggcctccctttggctatggaaattttccgagttcaatgccagaatgccttggttattatgaagacaggtaccaaaaacatgaggctatattttcagctttaaatagagactattcttttagagactactcaagtgaacgcacacacagcgaaaattctcggagttgtgagaacatgaatggaacttctttctataacagtcatagccacagtggggaagaatacttaaaccctgtgcctcaactggacattggagccttggagaatgtcttcacagccccgacatcaactccttctagcatccagcaagtcaatgtcactgacagtgatgaggaggaagaagaaaaagtgctcagggatttataattttaaaacaaatatgcacagaaaataaacatttcttaaaataaaaaaaaaaaaaaaa

SEQ ID NO: 1231 - DNA, 1547 bp, Macaca Fascicularis
actaacgaattagggacatttcaaggggccggctggaggggaaggcagtgagcggcagaccctggatccccacctggccccctcgcaggaagcagccacagccgggcctggcggggggaccatgggcgcctgggcctctaggggccgggccgcccgggtccccgcgccggagccggagtcggaacccgaagaggcgctggacctgagccaactgcccccggagctgctgctggtggtgctgagccacgtccccccgcgcacgcttctcgggcgctgccgccaagtgtgccggggctggcgagccctggtggacggccaggccctgtggctgctgatcctggcccgcgatcacagcgccaccggccgcgcgctactgcacctcgcccgcagctgccagtctcccgcccgtaacgccaggccttgcccccttggccgcttctgcgcgcgcagacccatcggacgcaacccctgcggccaaggcctccgaaagtggatggtgcagcacggtggggacggctgggtggtggaggaaaacaggacaaccgtgcctggggccccttctcagacgtgcttcgtgacctcattcagctggtgtcgcaagaagcaggtcttggacctagaggaggagggtctgtggccagaactgctggatagtggcaggattgagatttgtgtctctgactggtggggagcccgacacgacagtggctgtatgtatagactacttgtccaacttctagacgccaaccagactgttctagataaattctctgctgtgcctgatcccatcccacagtggaacaacaatgcctgccttcacgtcacccacgtgttctccaacatcaagatgggcgtccgctttgtgtctttcgaacactggggccaggacacacagttctgggctggccactatggagcccgtgtgaccaactccagtgtgatcgtgcgagtccatctgtcctagtccaggactatccttcttgcaagacagcctgagtgtgccttccagggcccgggaccattggctgggactcaccattaaccaattgaccacttgtacctccctggcatactgagaattcctgggtccaatcaaaggccctgacgggccccgtcttcaggttctagaaactaccagaagaagcttcttccatcttatctacctactgtagctgctgctttgggggggcctactctactgaggggaacccacaggtgagcctgggggaacgcccatcttggagaagaattctcgccctcccctctcttctcttcccacccaaaaccctccgatccagccccagacccctctgtcccatcccctcccctccccggccattgacctcttgtctcctattgtttctgccatagggacttctttggtcccttcagagaagccctctactcgtctctgaacttagagcctcatccttagggctcagaaagtcctagccctaagggtgcgaacctcacctcctggggcttccgagctgcagggctgggaccaggtcatgcagctgaaaatccacgttaaaaaaaaaaaaaaa

SEQ ID NO: 1232 - DNA, 751 bp, Macaca Fascicularis
  misc_feature (1)...(751): n = A,T,C or G
gcccgcacagcagtnnnngtnnnnnngaatagctcccccgctacttaaacccggggctgggggcagcacccctgccctcaggtgagtccagcgcctcacaagnnntnnnnntgaagccctgcccccgtcaggcctccgaccccacagcaccggcttccaggtgtgctcagaaccatagggaattttctgttctaacaagcaccaggcctgcttgctnnnnnnnnnnnnnnnnnnnnnnnnnnnnnnnnnnnnnnnnnnnngcttcctgcagccttctcctcccctaggtaatgcccctccaccttttgttgtcacttgggaagaaaacagacaccttcaaggaaagggcttccctggtagcccccaacctaagacagagctggatgcctgttgcttccctagggagagcacttctcctgcaggatggcattgctctctccccttccatggcacgtagttatgtgctcactaaatatgtgttggatgagnnnnnnnnnnnnnnnnnnnnnnnnnnnnnnnnnnnnnnnnnnncactatccatgctatggtgagcaccatctctctgatgacagttctgtgtccacagcccagacccctccacacaaactcagatggggctgtgcggctgttttccagatgtattcattcaacaaatatttgtagagtacctactatgtgtcnnnnnnnnnnnnnnnnnnnnnnnatccaatggaaatagcgtgtgagccatgtatgtagtttcaacttttca

SEQ ID NO: 1233 - DNA, 727 bp, Macaca Fascicularis
  misc_feature (1)...(727): n = A,T,C or G
aggaggttcannnnnnnnnnnnnnnnnnnnnnnctgcnnnngaaattttgtactatttctgtatttctttcttctcagaacaaccagtgtcaccaggtatgagggcagagttttnnnnnnnnnnnnnnnnnnnnnnnnnnaagcttatttatttattcatctatctatccatccatcaatccaacaaatatactgaatgctgctatgtgnnnnnnnnnnnnnnngttctaggtactggggcaatgggagttaaggtaatacccaatgaccctgctctgtacccttaagagcagactcagttggggatgagttatccaaaaatagggtgtacatgtagtcaggagagagcctcatacagctttgnnnnnnnnnnnnnnnttcaaacctctttgtcttcctacttcttgatattacaaatcatgagcctttcacatgcgttcactctaaagaggtgggttcctggatagcagaagtagatagaaaggcatcattgacatttattgagatggagtgaatcagagggtgtaaattctgctccgtcaatgtcgaaaaagactannnnnnnnnnnnnnnncatcactnnnnnnnnnnnnnnnnnnnnnnnnnnnnnnnnnnnnnnnnnnctgcctttgtttannnnnnnnnnnnnnnnatcagaggggttgaggatataaaagacccttgnnnnnnnnnnnnnnnnnnnnntgtcagatgctgctaccaagat

SEQ ID NO: 1234 - DNA, 717 bp, Macaca Fascicularis
  misc_feature (1)...(717): n = A,T,C or G
tcagnnnnnnccgggtcacgngntcaaaatgacccacgcgctgcagtgacaagaagggcagagggcagtcagtgggcccaggaccatgctgctggccctgctcccccagccgcagcctcacctnnnnnnnnnnnncgatgtccttgcggtcgtaggtgatgccactgnnnnnnnnnnnnnnnnnnnnnnnnnnnnnnnnnnnnnnnnnnnnnnnnnnnnnnnnnnnnnngtcannnnnnnnnnnnnnnnnnnnacacgannnnnnnnnnnnnnnnnncactgctccagcacctgccacccaccgcagcaagtgacagacactcaccttcctcttctcgnnnnnnnnnnnnnnnnnnnnnnnnntgtctgccatgtacttgtcctgtgaagagttgnnnnnnnnnnnngtgcgggacaccccacctccctcctccatggggcaccgacccaacacaaggcggggatgctcccacgccaggtgcacacacacagacccacatgtgggaggggggcaccnnnnnnnnnnnnnnnnnnnnnnnnnnnnnctgggcccggacgtggctgtcgtcctcatcaccctcgtggttccnnnnnnnnnnnnnnnnctccctgggggttgaccaggagccagtaagagatggacctggccagatgtctgaccacaccccaacnnnnnnnnnnnnnnnnnnnnnnnttccnnnnnnngttttctgctcg

SEQ ID NO: 1235 - DNA, 725 bp, Macaca Fascicularis
tttacagatttttttttttaattccccaagaagggaaaaagagagggaagaactacagtaatgttagagataaggtatgtttcggctcaaaatgtgtcatgaatctaaaggtaacttgatgggtagaaaggtctcagccatgtgaaccaggaagtgggagcacagtgcaaggctgtgggtggcagcactagatacagtggtggcaggagtgtgacacgtaggcactccatgggggacagccagacagtgtctgtcagaagtgcaaatgcatcagctttttgaactaagaattgtacctgtgtacaagggtttttgttgaaacactgtaatagcaaaaagttggagagtgccaccagtataggggaatgcttaaatacattatgaccagcttaaacaatggaatagtttgcagaaacttaaaacagtggatcctgtgtgtgtgtactaccatagaatggtccccaagatgcatgattaagtgggggaaaaaagaagcccatggtatcttaatgtttggaatggagaaaaatgtgtagatgtatgtgtgtgcgtatgttttcacacagacatatacacatgtatatcatatgtctgcctgcatacgcctaggatttctctgggaggatacccagcaatccagcagcctgattgcctctgggaagaggggtgggaatgacttttcaatgtacaccttttgtaccttttgaattttgtaccatgtacat

SEQ ID NO: 1236 - DNA, 709 bp, Macaca Fascicularis
  misc_feature (1)...(709): n = A,T,C or G
agttggaaatatttacaaaatttcccgtagggtgaaatccagagttaatccaaaagcagaatcttttaaaattaagtacattcaaatgtgcagatttcttaaacctcatttagttgagctttgatacgtaaaacgcacgttttgaataacgctggtaacaaagaaaaacattgaattgattataggtatgttatatttaaagaccagttgtgaaattagctatattgtgctcaaagtatgttactgacatttnngtgttgttaaagggaactgctcattctagttttttataatagtctatattatgtatatagcctgatagtgctgaatttctgaattgatcttcatcttatttactcaacaacattcattcagcaaatacttattaagtgaatatatatgtcaggaactgtactagatgctcgggttgtagcagtaagcacaacagaccaagcaaacagcttagtaaagggtgagataaagtattcaaaagaaattaatttttatcttaatttttaaaattataaatttttttaaaatcacaaattggtatccatgtataattcatttccattcattttcttgtgtaaagaaagctcagtaaaagtatttcttaggtttctgtaattctagttctctactcaattttcctctgcaattttctgagccagaacccttcttagaaggcatattagagacttaaaagtaa

SEQ ID NO: 1237 - DNA, 311 bp, Macaca Fascicularis
gattgaggggtagggaatgtgaaagtggtgatttttgtttccacttttaataagatccctgcaggacagttaaaatgttccgtctaagagactgtcaaagatttgcaagaaagtgtttggggctacaactgtagacttaggacagttgaatagaatgagatccatgaggaactgactgactaaataaaagcagaaaagatgaggaaaaaaatctggagttagagagctacaggtaaaagagcaactgtgaaggatttcttgaacttcattgaaggattagttgtatgtgtaggagaataagaaaatatggt

SEQ ID NO: 1238 - DNA, 715 bp, Macaca Fascicularis
tcaatcagaggggtattgacccctctgacttaaaatgccaactctatagaaattagctagtattaacattttatttcccttgtgtggttgtatatgtatgtaaattatatttttaagcagaatactttttttgtgtgtaaacaaaattttataaatacagttgtgttgcaaatgttctttgtcctgcttctcacttgacattgcattatgagtattcttccaggtcagtaaatttcaaaaaccgacattaatagctacagagaatttcataatctcattgtatctttttcattagcaatagctccactttgggtggggtagatgataatgtgccttgttaaaagtacctccctaactcctgctaagggtggccatgagactcagctctggcaagttaagaaatacaggtggaaatctgataaagctgctgggttttttgatacaaaaggacagacttggcaagcatgagcctttgcttttatctcttcatcctacttggaatgcagagataaaacctgagtagcagagccatttttaggcataaggaaggcagccatgtgttttgggtcatgttagtaaaaagactcagaacttggctccttgctgacatgcctcgaggagctgctacaccagcttgaattgctgacctctgacttcttggtagtgagaagagtaaacactgtgcttaattaggcctcggtcaggtttctcttat

SEQ ID NO: 1239 - DNA, 604 bp, Macaca Fascicularis
  misc_feature (1)...(604): n = A,T,C or G
gttgcaggcaagggagtgaggtgaatnnccacagttgccgggagagctggagaggnnnnnnnnnnngtttcctttcagctacgagagtacaaggtggtgggtcgctgcctgcccacccccaaatgccacacaccacccctctaccgcatgcgaatctttgcgccnnnnnnnnnnnnnnnnnnnnnnnnnnnnnnnnnnnnnnnatctcagttaaagaagatgaagaaatcttcaggggagattgtctactgtgggcaggtgtttgagaagtcgccactgcgggtgaagaacttcggaatctggctgcgctatgactcccggagcggcacccacaacatgtaccgggaataccgggacctgaccactgcgggcgctgtcacccagtgctaccgagacatgggtgcccggcaccgcgcccgggcccactccattcagatcatgaaggtnnnnnnnnnnnnnnnnnnnnnnnnnnnnnnnnnnnnnnnnnagcagttccatgactccaagatcaagttcccgctgccccaccgggtcctgcgccgtcagcacaagccacgcttcaccaccaagaggcccaacaccttcttttaggtgcagggctttc

SEQ ID NO: 1240 - DNA, 448 bp, Macaca Fascicularis
tttatcttcttcctcctccctgcatcccactctcccctcctccccatcgcaaaccccgttctctgaggttagacattttacaaacgcatatatagttggttttctgaattgtgattttttttttaaacccctttctcatggctactcttctagacgtttatttctgcccttcccccgcttaggggggcgggggtaggggaaaggaaaaataatacaatttcaggggaagtcgccttcaggtctgctgctttttttttttttttttttaattaaaaaaaaaaaaggacatagaaaacatttgtctggaacttctcttcaagaacccggtctgcaaaggaaaactcctttgtttttgttatttaaatgctggctagttttgaagtggtgatctttaaacggtgactgaatatggatcatttgaacgaggcaactcaggggaaagaacatt

SEQ ID NO: 1241 - DNA, 687 bp, Macaca Fascicularis
  misc_feature (1)...(687): n = A,T,C or G
gcaaatggtccatgttaaatgtaaatctttttagtgctaatgtctgttctcataagcaggtatattatgatgaaacatgtaccagttctgtcatcactgtgatctttaaaaacctgcatttaacaatctaatttgaggcnnnnnnnnnnnnnnnnnnnnnnnnnnnnnnnnnnnnnnnnnnnnnnnnnnnnnnnnnnnnnnnnnnnnnnnnnnnnnnnnnnnnnnnnnnnnnnnnnnnnnnnnnnnnnnnnnnnnnnnnnnnnnnnnnnnnnnnnnnnnnnnnnnnnnnnnnnnnnnnnnnnnnnnnnnnnnnnnnnnnnnnncacggaaatcacctgaacttgggaggtggaggttgcagtgagctgagatggcaccgctgcactccagcttgggtgacagagtgagactctgtctcaaaaaaaaaaaaaaaatctaactgaagaactaagttgattttttatttgccataaaccaagcaaaagtaaatgcaataatttcaatagatttatggtaaacgaatttgaggtatggataaatctttcacatattttttattgctctttagtaaagaaaggcacacgaaagaaaatatccagctctcttgtgttatctcagtgtggcgactgcagaaaattgacaatccccgcctgtgtaaatgtatggctcactctcaaagcttcattc

SEQ ID NO: 1242 - DNA, 686 bp, Macaca Fascicularis
  misc_feature (1)...(686): n = A,T,C or G
tcnnnnnnttcctgtccnttgtctgcccagttgacacctnnnnnnnnctttnagggcactgaggagtgaaagcgcctagggctggagaatagcgctgagttgggtttgtgactcttccctctcccnnnnnnnnnnnnnngtgactccccagcccctgccnnnnnnnnnnnnnnnnnnnnnnnnnnnnnnnnnnnnnnntgatcttggccccttggaactgagatggtttttgcatctttccaggagggcctcacattcttcttccaggttgtattacccccnnnnnnnnnnnnnnnnnnnnnnnnnnnnnnnnnnagcnnnnnnnnnnnnnnnnnnnnnnnnnnnnnnnnnnnnnnnnnnnnnnnnnnnnnnnnnccacagaactgannnnnnnnnnnnntccccaccccctcctcaggctcctgcgagcacacccccaccctcaaatccctgcctgttctatactgnnnnnnnnnnnnnnnnnnnnnnnnnnnnnnnnnnnnnncannnnnnnnnnnnnnnnnnnnnnnnnnnnnnnnnnnnnnnnnnnnnnnnnnnnnnnnnnnnnnnnnnnnnnnnnnnnnnnnnnnnnnnnnnnntactnnnnnnnnnnnnnnnnnnnnnnntgtttttattaactgaattatgttttnnnnnnnnnnnnnnnnnnnnnnnnnnnnnntccc

SEQ ID NO: 1243 - DNA, 749 bp, Macaca Fascicularis
  misc_feature (1)...(749): n = A,T,C or G
gcgaaaacctccaagatatttttcacaaaatagannnnnnnnnnnnacaaaataagaaaccctagccannnnnnnnnnnnnnnagtcttcaagttcatgtcactgacaagcttatgcaaagcagccaccttggaccgtaattaagtcaaggacattttctttgagacattccttatagttggagactcaagatatttttgttgcttcaggtgtattcccttgcatgggcagtggcttttataggagcattagtcctcatttgccgaaccctgttgtttaggtctaatttaaattttacacagagacccatgtatgactgcagcccattggctgcaagaccagggaggaaagtggcaagctgtagaaaatgtttacatgcatggaggggnnnnnnnnnnnnnnnnnnnnnnnnaggatacatgggtgggtggttcattcagtacccatgagttaggtatgttctgagtgaacccacagcagtcacagannnnnnnnnnnnnnnngtgggtttcctagggataatttattgttttaaaaaataggcctaataaagcaataatgttctagacatctgtctaagtaatcagactcaggttccacacagaagcaacaactcgtgggcctcgttttctatttcggtgtgctactaagaacccttggatgtaacatactagtttgttaatgaattctgtgaattctgtgaagagtaatgtgattaaaaataagtctaaacagctgtaaaagtgacc

SEQ ID NO: 1244 - DNA, 756 bp, Macaca Fascicularis
  misc_feature (1)...(756): n = A,T,C or G
ttggttnnnnnnnnnnnnnnnnnnnnnnnnnnnctgtttatcagtgttnnnnnnnnnnnnnnnnnnnnnnnnnnnnnnnnnnnnnnnnnnnnnnnnnnnnnnnccttaccatcnnnnnnnnnnnnnnnnnnnnnnnnnnnnnnnnnnnnnnnnnnnnnnnntttccccccaatttgagtacatactattgttaactgcaaaattctaaagaaatcagttgccannnnnnnnnnnnnnnnnnnnnnnnnnnnnnnnnnnngatatttttctttcagagctggccactgaacaatgaagtaatctgagagatgaaacagaatctttccggacagggataacgtnnnnnnnnnnnnnnnnnnnnnnnnnnnnnnnnnnnnnnnnnnnnntattcctagtatcccaaggagaagggcagatacacagataggaacacatgttcctggtccgnnnnnnnnnnnnnnnnnnnnnnnnnnnnnnngaatgaggggaaaggagagccacatggagtgcaaggtggtgaaaacggtggagggccaggactgccgaacctcccggnnnnnnnnnnnnnnnnnnnnnnnnnnnnnnnnnnnnnnnnnnnnnnnnnnnnnnnnagctcgatctagttcaaaagaatttattttattggcactcatttcatcagtgtcagcaatnnnnnnnnnnnnnnnnnagtaggcattggacaagctcccaagcagcctcaggnnnnnnnnnntatgcccaccggacncagctacc

SEQ ID NO: 1245 - DNA, 423 bp, Macaca Fascicularis
  misc_feature (1)...(423): n = A,T,C or G
ttccaagnnttgtactnaatctgtcccccggcaaatcgacctgcggtaaagcacccaggaagcaactggattcaaaagccgctctcaagagtgcgccctttactggaggggtgaagaaacnnnnnnnnnnnnnnnnnnnnnnnnnnnnnnnnnnnnnnnnnngacgttatcagaagtccactgaacttttgattcgcaaacttccctnnnnnnnnnnnnnnnnnnnnnnnnnnnnnnnnnntaaaacagatnnnnnnnnnnnnnnngcagctattggtgnnnnnnnnnnnnnnnnnnnggcctatctggttggcctttttgaagacaccaacctgtgtgctatccatgccaaannnnnnnnnnnnnnnnnnnaaagacatccagctagcacgccgcatacgtggagaacgtgcttaagaatcc

SEQ ID NO: 1246 - DNA, 694 bp, Macaca Fascicularis
acgcagggatgggcagttgcacgaaggcatgaatgtattgtaaataagtaactctgacttctgacaaaaatcaaaaagtgctgcatggctcgcatggaatccacgcgctccagggactctgcccgcccccgcgactggagacggcatctccttcacagcacccaccctcttacctgataagttccatcgtatcaaactttctataaacaaaatacagtataatcagaaagtgccatttcgccattatttgtgatcggtaggcagttcagagcatacgttaactgaaaaaaaaaaaatgtaaaggttttatttaagacatttgcatggctagtcatcgtccattttatgagttaacaatgtattttgttgagggaagtttttaggggttgttttgggttcttttattttgatggtgatgttttattttattttatttttttcagggggatttttttaatacatatccaataatgccttccatctgaatgtaaaataagtacccatgatttctattatagtatcagtgtaattatttaaaaaatgattttgaggcagttaagcatgaccaattaatgtcactctagtgcttaggctgcgatcctatggtagcaattctgtgctggtataaatcttacttataaagtaggaaaaaagaaccgaggaagcacgtgaaacttactaattctattcgagg

SEQ ID NO: 1247 - DNA, 452 bp, Macaca Fascicularis
  misc_feature (1)...(452): n = A,T,C or G
aacacaaggagccannnnntagcggccccatagatgacaggcccaggtgcttaagnnnnnnnnnnnnnnnnngtcagtgaggaactagccatgagaagagagaaaagttaggagaggagatgctgatggcatctggaaacaattcttagagatggnnnnnnnnnnnnnnnnnnaaggggagacacccccaactgcagtgtgtcctggagcagnnnnnnnnnnnnnnntcatcgagtttcctcaaggtgggggacagatgtcaaggatgaggccaagctacatggaagggtgnnnnnnnnnnnnnnnnnnnnnnaggttgtggattcntcacactagcggctgccggcaccnnnnnatnntacgggccacaccagggcgtgtggcctccagggacctagagaatgggagggagaacggggccccaggagacccggccgccaccccacccgctg

SEQ ID NO: 1248 - DNA, 743 bp, Macaca Fascicularis
  misc_feature (1)...(743): n = A,T,C or G
aaaatggtgcttgcccnncttagtcccatcagggatggcccagaggtgtgnnnnnnnnnnnnnnnnnnnnnnnnnnnnnnnnnnnnnnnnnnnnnnnnnnnnnnnnnnnnnnnntgtnnnnnnnnnnnnnagaacagtgtccaaactgagctctgtccacggctcctactctcccccactcacacacccgctacctctccctagggctctgatcttgggnnnnnnnnnnnnnnnntttagctccgcaccttgcacatgtaataccccaagatgtgtctcagctttttnnnnnnnnnnnnnnnnnnnnngacagcggggtgctccattctcagtgcttgcagcacccccttgcttttaggatcacacttcactgccttgtagccnnnnnnnnnnnnnnnnnnnnnnnnnnnnnntgtctcctagttcttgcaagcagaaacaaagcaggcataacagtgtgcnnnnnnnnnnnnnnnnnnnnnnnnnnnnnnnnnnnnnggaggatggagggatgagaggagaggtgagtttgctnnnnnnnnnnnnnggtggtctctgctcctatggtcactgaaatgannnnnnnnnnntcccaaccctgtgctcacagcatcactcaagccacctagggnnnnnnnnnnnnnnnctgctgtcacttggcactgccttgataattactgaggtgcggtgataggtacaggacggttcagtgtttttaattttgtatctatttggaaatctct

SEQ ID NO: 1249 - DNA, 427 bp, Macaca Fascicularis
tattttcagctttacagaccagaacaatttaaatctaaagaatttagtagactccttcagtgccacaaagctgttccatgaaagaatcaagattataacctggatattctgactcctggcccagtgctttttcttactttgtagctacactttgaagattcaaactgttacccactcaactgccttattcctgaggaggtagtgaaggaagaaaaagttttctgggattccataaactataagcttatttctttaaaattattttcatacatcacagatatgtcattggaatgatataatttgcatatgatgattatcagtgttagtaatgtggtatatgtgttgtatttttttctgaatgatagcatgaaaagtgtcaaaatgggttgtgggttagggtcggtatgcagacacttcagaaggactg

SEQ ID NO: 1250 - DNA, 2797 bp, Macaca Fascicularis
aacaacttctgtgaccctcctcactttgcctttaagcttccctgaatcccagcctctctggatagccctgtcatttcttatagcacctacgtgccagcttgcaatcgcctacagagtcccagataaactttgggagagcctgtctctgtcattgtatgaggctgacactccctcacccaacgtatcagactgttcgttccacactgtttccagcctgggcaacagagattctgtctcgaaaaaaataaaataaacccaaaaccctgaagcatgagtgatatggtcattatggctctttttctccaaaagtcccttcaaaagttcagtaattactatttggaaacacatacatacattaaattacaatatgcgctaagtttgcaagaaccttgtgtttcttctagaaagctacttggtttttttcctctaacagggataagttaaaatgaataaaagattttaagttcagtctcacgctttgggtatgactggtgaatccagcttgagttaaagtttaacacaagggctaggcaggccctgggttccactcacgaccagagtgagggatgctggtttccaagtgtaatgaccctttatgaaactacctaaagactatgaagctgtggcaggagagtattcctcaacatcttgaacattttgctcatcacaacttgaaatgatcaaaataattagtgttgtagctgtcagtgttaagattccttcacatgcaaaggaaggaacttaattcaaattggaatgaaggaaaggcgaagtcttcggttgcagtcagtaggaggttgggggcagctcccagcgtgttggtacccagtgtcgcccaggctggagtgcggtggtacaatctcggctcgctggccctccacttggcgatagtggtgttagaacaagcttctgatattcacttctcatagctggtcacaccaaagtaggcatcttggcctccctctccctgtcgtctataccaagctgcccctggcctctgcctggtccccctgggtcctatacctgtcgcaagagaggagcggtttctaaaagaaaggcatgcagagaggaccagcaagaggccgaggggacttcatgctgtcagggaagttcgaagtcatttttgagatgtcacgtcattgagttataaagaaaagcagttcagaaaagctgagatggatattactggggagggagggctttacccggtgatgtgtgacctccacccctgcctggggccccattctccacccgctcattctgccatggaatgaaaatgaccgagatcctgccttttgagagcttaagggagcacctctgtgggactgacgaaccttagtttgtgttgctgttcttgaaaatgatttctctttctttctggtgtcatctaggcagtttagaatatgctagaattttggtgagatttagcaaataggatgtcaatcaattagcagtcaccttaaaaggaattttgttcttcatcttattgaattttgttatgtgaacaaagaagagagacaacattagaagaatgcacttagaccttcttttctaccgatggaatggggtggcgggacggcgagattcatattttaccatcaaaaacaggaagatgattttttccccagtaactgaataacttctaaaaacagtttctttaacttctgtgtcagctttggggttcagcgtggacctttctgttgatttgacacgaggactttatgtggggcagtttgtggagagaagaggaagcttttctgggtcatttttgcttttacatgacatttggtgtgtttaacgtgcagaggtgaggatccagcagtttgttttagtttttttattgggtatggggcggggaaacgggcataaccgtctctctgggaaactctccctggggcacccttgcctgctctcccgaagccatggggacagggtgggtgaacaaggcccctcctcgctccccgccatgctgtgcccaccgcctattccgcaccacacagcaggcgctgttcctcccaagcgcggccttggcatgaagcccacacgcacccatacggaaggcacgcaggcctgggacacaatggctagttccgccaactcacacagcacaggggtctgccgcgacgggatccacatcacaaaatcaccagaggcgctgggcaggtggggaagactgagtcctggcccggattaccaggtgtgacttaatcaagacccatcactgatcaatgaggatgcaaaataaaggaagtgagtattagctcccgttaggtgcaagagaacaagtaagttacaatctcagcgttgtaataaaaaataccgtatattcatgtttgtaaccaatttggatcatattactctgccttttactttaaaccatatgtatttcctgtgtattgttactctcttggagggactttcttggagttcacaaggtccaaactttgttaaatatttttgtaacgtgttcttccaacaattgtaataaacacttgatctgatgttctcctccaggaactcgagttccaggacctgacggctgtcctgcactgcgtccactccttcatggcagccaaggtggcctccgtggaccccggcttcatggacagtcagagtcttgccaccaaatacatgtgcagcagctaaaggttgtttctgttgagtgctgaaaaattaaattattttcgtaagaaatgattctttcctgcataatattgcaactttgtgttgttttataatgagcctatagttgtgataccaataaaacatgtcactagtttccaaaaaaaaaaaaaaa

SEQ ID NO: 1251 - DNA, 2337 bp, Macaca Fascicularis
atttgcctgctgggtagacataaacacctgctaaagaaatgtgaaaagagtggaaacgtgctgtttggagattattttcctagtcgacatccaggagatctccagagatctatttcagccccatctgttgattccatcatgaaaaagaggaagctcaaactgaagtgagttaaaaacttcatctcctagagaagattgtggctcagcctgagttgagttttttatgtttatatgcaagtgcaatgaagaagaacaccagcaagtctaccacgaggatcaatgagcaagatgctctctgcaccccacactcccatgatccaagagatcttcaaagtatgccccttcctctggagcatccttccagcatggcggaccaggagctccaccatcatcttcagcttatgcactgcctcctggaacaacaggtacactgcctgctgccagtgagctgcctgcgtcccaaagaacaggtcctcagaatggttggaatgaccctccagctttgaacagagtccccaaaaagaagaagatgcctgaaaacttcatgcctcctgttcccatcacatcaccaatcatgaacccgttgggtgacccccagtcacagatgctgcagcaacagccttcagctccaataccactgtcaagccagtcttcattcccacagccacatctttcaggtggccagccattccatggcatacagcaacctcttggtcaaacaggcatgccaccatctttctcaaagcccaatattgaaggtgccccaggggctcctatcggaaataccttccagcatgtgcagtctttgccaacaaaaaaaattaccaagaaacctattccagatgaacacctcattctaaagaccacatttgaggatcttattcagcgctgcctttcttcagcaacagaccctcaaaccaagaggaagctagatgatgccagcaaacgtttggagtttctgtatgataaacttagggaacagacactttcaccaacaatcaccagtggtttacacagcattgcacggagcattgaaactcgaaactactcagaaggattgaccatgcatacccacatagttagcaccagcaacttcagtgagacctctgctttcatgccagttccacccacaagatccctaatgtgatgctactggcacatctgacacctggttcccggaaagatacagaacccctatttaaaagtctcctgacatctcctcctgcagagaaactggtgctcaccaggtttctccctctgcagtttgtgactctttctgtgcatgacgcagagaacatgcgcctaaaagtaaagctggtgagtggtcgagcctactacttacagctctgcacttctgcatgtaaacaggacaccttgttttctcaatgggtggccctcatctccctcttgaatcaggagaaagcgaaagtttccaaagtgtcagaggtttcaagtctctcaggaattacgaatagcacagacgtcacaggctccacggacgtgatggatatcacagcgttcacagccatcctgaccccgtacatgtacgcaggtagaggccctgaacatgtcagggacagcatagatttctcagaattcacagacatcaccgacatcacagatgtcacagaccttccagaaaatgaggtcccagaggtcccggatataagaattgttacagaagtcatagaagtcagagaagccacagaagtcacagaccactctgatattacaaactgctcgggagtcacagtggtgtttgaaaacaatgacttaatcagggccaagcaagaggagaaggaaaaattgaaaaacattctgaagcctgggtgtctacaagatacaaaaagtaagagtgagttgaaagaatcctcaaaacatgtcaccatctcaaacataacactgacttttgaaggtaaaagatattttcaaactaccttgactccagtagaaagtgaggcaaatacatccaaggagatggagaataagacctctgaagaaaagacacctgattttcagagcacggctctcgaggctgaagaatccaggagcttgagaactgaatcaaacacttcagggaatgaatgtgaggaaagaaaagtaaaacagaaaaagacaaagttggtggaaaaacatgtaagacaaccgaaagacttttgaattaaatggactgacttctccaccttttctaaaaatcagatacaaactactaaactaaaaagcaaacacagctcaggaaaagacattcagcgcaagaggaaaaccaagcagtgtcttctatgtggcagaaataaagcctattactaattattaagaattcaaaaaaaaaaaaaaaaa

SEQ ID NO: 1252 - DNA, 723 bp, Macaca Fascicularis
tgcatgggattcaggaaacagttgtggttggtcaggacggaagtcggggtaagtttggttggtcagagagagttgtgctggagattgtgaaaaatggattctcgaatgatctactataaggcagggaaggttcatttgtaagtagtaatgtgaactgaattgcattaagagtgtgtggcctttgttgtgatatactatgtattttcttatatgcatgagccaaactgttgcatcataatttagcactgatgtctgcttttattttgatcatctttgtccacccttattagttcttggctgttaactatagatagatcttgtaaatccagcaacctttggttgctgcattcaccttggttcgattccacaccaggagccacaagtgagaactccactgtccttagaagaaagggcatttttacttttgaaccaaaaagagaaaaaaaaaatcagaagtgttacatcttgaggcgaattaactgtaagacatttttaattatgactactgcaatttgacaccatttgaaataattcagagacactaaagatttcacaatattcattggtattgtaaaaaaaaaacctactattgtatggatttttgtattgctgttaagtattgttttgtgtgtatgtgtgtgtgttggaacctcctggggacatgttatattttgaagtgattaaactatttaattgtgtgtctatattttggagtggaattat

SEQ ID NO: 1253 - DNA, 3433 bp, Macaca Fascicularis
tttgcagttggaaggggtgccgccgcccgaccgtaagttttgctcgcaagactcccctccaactgcaaaccggcgggtgccacttgccatccgaactgaggatgcgaaaaaaaagaagagattttatcgacatcgaaagtaaatttgccctaaggacccctgaagacacagctgaggacacttgccacctcattcctggagtagcagagtctgtggcgacctgtcacttcaatcacagcagcaaaaccttcatggtgatccacggctggacggtaacaggaatgtatgagagttgggtgccaaaacttgtggctgccctgtacaagagagaaccagactccaacgtcattgtggtggactggctgtcacgggctcagcagcattacccagtgtccgcaggctacaccaaactggtgggacaggacgtggcccggtttatcaactggatggaggaggagtttaactaccctctggacaatgtccatctcttgggatacagcctcggagcccatgctgctggcattgcaggaagtctgaccaataagaaagtcaacagaattactggccttgatccagctggacctaactttgagtatgcagaggccccgagtcgcctttctcctgatgacgcggattttgtagacgtcttacacacattcaccagagggtcccctggccgaagcattggaatccagaaaccagttgggcatgttgacatttacccgaatggaggtacttttcagccaggatgtaacattggagaagctattcgcgtgattgcagagagaggccttggagatgtggaccagctagtgaagtgctcccacgagcgctccattcatctcttcatcgactccttgttgaatgaagaaaatccaagtaaggcctacaggtgcagttccaaggaagcctttgagaaagggctctgcttgagttgtagaaagaaccgctgcaacaatctgggctatgagatcaataaagtcagagccaaaagaagcagcaagatgtacctgaagactcgttctcagatgccctacaaagtcttccattaccaagtaaagattcatttttctgggactgagagtgaaacccataccaaccaggcctttgagatttctctgtatggcaccgtggctgagagtgagaacatcccattcaccctgcctgaagtttccacaaataagacatactccttcctaatttacacagaagtagacattggagaactactcatgttgaagctcaaatggaagagcgattcatacttcagctggtcagactggtggagcagtcccggctttgccattcagaagatcagagtaaaagccggagagactcagaaaaaggtgatcttctgttctagggagaaagtgtctcacttgcaaaaaggaaaggcacctgcggtatttgtgaaatgccatgacaagtctctgaataagaagtcaggctgaaactgggcggctctacagaataaagaacagcacatgaattctgtgaagaatgaagtgaaggaagtaacttttacaaagcatacccagtgtttggcgtgtttcaaaagtggattttcctgaatattaatcccagctctattcttgttagttattttaggagacagtctcaagcactaaaaggtggctaattcaatttgtggggtatagtggccaaatagcacatcctccaacgttaaaagacagtgggtcatgaaaagcactgttttgtcctttgagaaagaaataattgtttgggctcatagtaaaataaggctccttcatgtggcgtattgggccatcgcctataattggttagaacctcctattttaattgaaattctagatctttcaggctaagactttctcaaagtttactccaagtctccaagaatacagaaaatgcttttccgtggcatgaatcagactcagctacctagcagtatgcatgatgttttagaatgattccctcttgctgttggaatgtagtccagaagtccaccagcaatgtgtgacttggagagggacaaagaaaggggctgataaacacagagcttttaaacagtccctaccattggcttgcatcatgacaaagttacaaattcaagcagatgtaaaatccagatcaattaattcttaataggctttatcatgtatagattaatccctctctaccccttcttttttctttgtctcaagattatattataataatgttctctagataggggttgaaaatgagcctgtaatcctcagctgacacataatttgaacggtgcagaaaaaaaaataccataattttattattagattctccaaatgattttcatcaatttaaaatcattcaatatctgacagttactattcagttttaggcttacctcagtcatgcttcagttgtacttccagtacgtctcttttgttcctagctttgacatgaaaagatacgtttgagttcaaattttgcattgtgtgagcttctacagattttagagaaggactgtttttactaagtaaaagggtggagaagttcctggggtagattcctaagcagtgctactaaaccatcgcgtgcaaggagccacatggagcaccatgagggttgttatttgctgtttttaacaactaatcaagagtgagtgaacaattatttataaactagatctcctatttttcagaatgctcttctatgtaaaaatatgaaatgataaagatgtcaaatatctcagaggctatcgctgggaaccagactgtgaaaatgtgtgatatgtgaacacatactagaaagctctgcatgtgtgctgtccttcagcataatttggaagggaaaacagtcgatcaagggatgtattggaacatgctggagtagaaattgttcctgatgtgccagaactttgaccctttctctgagagagatgaccgtgcctataaatagtaggaccaatgttgtgattaacatcatcaggcttggaatgaattctctctaaaaataaaatgatgtacgatttgttgttggcatcccctttattactaattgattaaatgtctggatttgggttgtgacccagggtgcattaacttaaaagattcactaaagcagcacatagcaccgggaactctggctctgaaaaactttgctatttatatcaaggatgctttggctttacattttatttattagctgtaaatacatgtgtggatgtgtaaacggagcttgtacatattggaaaggtccttgtggcgatctgcatttataaacgtgtggtgctgactttgtacgtgtctttaccagtgatgctctcacagagccaacttactcttatgaaatgggctttaacaaaacaaggaagaaacgtacttaactgtgtgaagaaatggaatcagcttttaataaaattgacaacattttattaccccaaaaaaaaaaaaaaaaaaaaaaaaaaaaa

SEQ ID NO: 1254 - DNA, 743 bp, Macaca Fascicularis
  misc_feature (1)...(743): n = A,T,C or G
tgatannnnnnnnttccttcacacagagcaganccnnnnnnnnnnnnnnnnnnnnnnnnnnnnnnnnnnnnnnnnnnnnnnnnnnnnnncctgnnnnatctgtatcctccaactatttggccgtaattcttccttgagctaagcaaaggcagaagctctgcctgctgccaggagtggaaggtgaagaatttgttcccaactccagttgaggcttttgattccctcaaagcacttcaccaaatcaaagccagtcacagagaatggaggagacacctgcccaaaatacccaccgtccagagagattaatgtgctttgttcttcctgaccaagactcgcaaccacattctgaggacgctccagtgcccctgtctcatacattccaaaggaagctgaagctatagagacaacannnnnnnnnnnnnnnnnggtggtgcttttgggggtctaggagagcccaaggccctgatattttaaaatgtcctcctcctcggcatctccagcaagttgccactgctggtgagcttcactgtctgccccgttgacacgatgggtttctaacaggggacgccattgatggaaggtcnnnnnnnnnnnngctcggcaaacccnnnnnnnnnnncgtctcatttgnnnnnnnnnnnnnnngtggggtgggggaaattcacagaatagaaattcatttatttcacaaatacatgttgaatttttactatgtgccaggcatagtacctgccgagtcaagc

SEQ ID NO: 1255 - DNA, 759 bp, Macaca Fascicularis
  misc_feature (1)...(759): n = A,T,C or G
atgnnnnnnnnnngcctcccgggtgccccgagatgctgcccgctaccacttcttcctctacaagcacacccacgagggcgacccccttgagtctgtagtgttcatctactccatgccggggtacaagtgcagcatcaaggagcgcatgctctactccagctgcaagagccgcctcctcgactccgtggagcaggacttccatctggagatcgccaagaaaattgagatnnnnnnnnnnnnnnnnntgacagcggagttcctctacgacgaggtgcaccccaagcaacacgccttcaagcaggccttcgccaagcccaagggcccagggggcaagcggggccataagcgcctcatccgtggcccgggcgaaaatggggatgacagctaggaggctggaatagggccggccacatgtggactgtggggctgcctgccttccgctccctgccaccgtcctccttcctgggctccaggaaagtgtttccaggagggcaggagggctggcggctgaacgcacttgcagcgtccgagggccaccgggctggcattttgtgacccttccctgttgctgtccctgcatctcatgtgtgttcccagggtgtccgggaaccctgcctggctggcttaagggggctgggtcaggnnnnnnnnnnnnnnnnnnnnntcctggggagctgagactagggtcccagcacagcccaaaaacctttggccacaagaggtggggtcagtcagggctggggcaggggtcactgcagt

SEQ ID NO: 1256 - DNA, 725 bp, Macaca Fascicularis
  misc_feature (1)...(725): n = A,T,C or G
gcgagaggagaaggggaaagtatgttttggggggctgcttcctgtctgagtaagccctcaggagcctctgctcccctgtgaacccactgaaccttctgagcccccagcgcttctgtggggctctctcttctgccttctcaggaaagctggtgtctgattttggccatcaggactctgacgtctctttggtcttgttgatttcctctgggcatatccctttgtctgctcctcccctttcacaggtgggatcggcactcggggggtctggaaagaaggtcataagggagcatgataggatttggggcagagggacaggctcctctggggaaagccccagagctctttaccgaggatgaaagaggagccaggccttgggctcctgatcaagagaaaggggccccactgggatctaatggtgagagtccaaaccactccactggcctcctggcagaagccgagtgtgctggggtctccgaagagggtccctcctttgtttgtgggggaaggtcagcctggcccctccaaaggtctgatgtctccacttccacccacaggccttaccgctctgtttacagtgactcccccagactctccccaagagggactggggtttctggggtctactctctgagtcaatggttatttgaaaatttgattttgattttattttttctctgtaaacttctaacctggcttttcccatttcaattcctnngtgatttatg

SEQ ID NO: 1257 - DNA, 1915 bp, Macaca Fascicularis
  misc_feature (1)...(1915): n = A,T,C or G
ggttgcgaaggaaggaagggaccccaacaccgggcgttcctgcggacgctcctcagccgggggttgttctccggcctctggacccggcccttcctgacctaggacgtctggctgcgcactgtccccctctctggggcgccttttccccacctccaagtagtgatcaagctcagaatccagctcgcgtccactgtgcaccttgcacttcccacctgtaagtcttttgacctcaccgccccctcgagaaggctgctgccatcgcttaaatgcggaaaccgaggtgcagagaggtttcagacctgttccggtggagctggaattggagaaccaactgctcggtgctgagacgcgcgtgcggaacgggcggcgggcgggggtaaagcggagtgaggggagagggcaggtgcgacctgggcaggtgaggagcacgggccccgagggaggacttagagaatggaaaggaaagcatcctgtcttcagcgggacagtgggagcactgaggtgtcagagaatgagcagttgtgggaagagccatagggtatgtatgttatttttttgagacggggttttgctctgtcgcccaggnnnnnnnnnnnnnnnnnnnnnnnnnnnnnnnnnnnnnnnnnnnnnnnnnnnnnnnnnnnnnnnnnnnnnnaacgtgccaccacactaaatcttttttaatttttttgggggaaggtctctctctgtctcccaggccagagtgcggtgacgcaattactgcccgactcctgggctcaagcggtcctcccacctcagcctccggagtaactgggaccacaggcgcccgtaatttttgtatttttttgtagaggtggtgttttgccatgtttcccaggctnnnnnnnnnnnnnnnnnnnnnnnnnnnnnnnnnnnnnnnnnnnnnnnnnnnnnnnnnnnnnnnnnnnnnnnnnnncacgcctggccctaaatattttttttaaagttggatttttcatggtgcccaagggaagagacactcctttcccttcaccaagagcatttcttttagaaaactttctaatagaaaaatctttctttgccctcttgagatatatgcaaaatttttaaaaagctacataagcctcttgccagttttataaaccaggaatgtctttcttaaggaccttagagtgatttctttgaaatataaaggccaaggaagatatttcccctccttgtctctgggaatttagcaggtggctggctccaagttgtaattgcctgcttgtcatagagataggaggtttgttttaactttggataaaggcagttagctaacacggatggccgccccaattaccacgtacctgccttctcctttagaaacactgtagccattaggggcaactcatgcagaagacccaggaatcttccaggtatactccatgagatgcctgttccactctggcccattgacacaagccggcctaaaaaaggacagtagggtcggttcctcacttctcctgttgactgctatttcttttcttccagctttcctactcccttgatcccaaacttactaggggtatttagtgagcacttactgttgcagtaaagctttagccaaggaggccgggcgcggtggctcaagcttgtaatcccagcactttggggaggctgagacggggggatcatgaggtcagnnnnnnnnnnnnnnnnnnnnnnnnnnnnnnnnnnnnnnnnnnnnnnnnnnnnnnnnnnnnaacnnnnnnnnnnnnnnnnnnnnnnnnnnnnnnnnnnnnnnnnnnnnnnnnnnnnnnnnnnnnnnnnnnnnnnnnnnnnnnnnnnnnnnnnnnnnnnnnnnatctgnnnnnnnnnnnnnnnnnnnnnnnnnnnnnnnnnnnnnnnnnncaaaaaaaaaaaaaaaaaaaaaaaaaaaaaaaaaaaaaaa

SEQ ID NO: 1258 - DNA, 722 bp, Macaca Fascicularis
gcagcagtgtgagaaccaaagatcatggagtggtcaaaacattcagatgagacatttggcatgtcttcctttattcgctgatatattctacccatggtcttatatcactgtatgaaatggaaacttatatgactcaaatatcagtgaaatattttgagatctttgaataattcctttagaggaattatacaaaattaatacatatgagttctttgttttttgttgttgttgttgtttttttttgagacaggatctcactctgtcacccaggctggagtgcagtgtcatgatcacagctcactgcaggttcaaccttctgagctcaaacaatccttctgcctcagtccccccagtagctggggctttaggtgggcactgccacaccagactaatttttgtattttttatagagacgaggtctcaccatgttggtcaggctggtgtcagactccctgggctcaagtcagtccacccaccttacccttcccaagtgctgggattacaggcatgagctactgtgcccagccttacggacgtccttttgaagtatctttttcactcatagaatatgaatacatttatttagactttttctaataacttccctgttttcatgtctttgcttcatctggaattggcttcttgacacccttttataaagtctatgtttgtaaaatttccattgcgacatcaatacgaaatatattttgtaatataggagt

SEQ ID NO: 1259 - DNA, 775 bp, Macaca Fascicularis
  misc_feature (1)...(775): n = A,T,C or G
agcctcgtgtgaggtttccagacttagaaacaaacctctctgtacagggggattgtgagtgagaatcaaggccacagtgtgtattttctcactctcgaatgcaagtgggagagagaaagtgactcaggacgccattgtaactgttcctggaagctgggccctctcactnncatacacannnnnccttgccgcagggcaccatcccaccaggatccagttgcaaagtttgtctccacagttgaaggcctcgcttagatgtactggattctcagggagccctctgtggcctttttgctttgagtgctgtgttccccttgtaccagagggcggcactgtggaaattgttttccccgtagcatattctgttggattgcattactggcagagaaaggacaagttgccattcaagtctagggtgggcttccagctgccttaatagaagcactcaagtcttttgggtagtgagctggaaagtctacaggaaaagaggggtacctgttttcatttgaaaactttnnnnnnnnnnnnnnnnnnnnnnnnnnnnnnnnnnnnnnnnnnnnnncatgcggctgtagttgttcactgctttcctggatggatgggactctcatgttgtaacttctgtactcctttggcccatagctaaggtcatccttccccacaggggtggctttgggattggatgatacagcttttgcttctgtgtagtatacctgtatatacctgcttcaggcagcctttaatgttttcagttggtttgtattctgtagctcag

SEQ ID NO: 1260 - DNA, 766 bp, Macaca Fascicularis
  misc_feature (1)...(766): n = A,T,C or G
accacaggcagatctgaaaaagaaacaaatagaattcctagaaatgagaaatatttattgaaataagaaaaaagcnnncagacatggtgaatattttattagactcagctgaagagacaagtgaactataagctggatctaaaattacccagtgagcagtgaggagaaagaaggagctagaaaacattagaaagttaagagagttggagggaagaattataaagactaggagtactagaaggagagaatttagagaatgaaggaaaggcgtacttgaaaagataaaacaattttccaaatttgttggaaaaacatgaattcannnnnnnnnnnnnnnnnnnnnataccaaacatatatttaaataaaatnnnnnnnnnnnnnnnnnnnattgtaaatgataagataccaaagagaaaattttaaaagcaaccatggggagaaaaagatcatcatcagtgaaggcaagacagtcaaatacttagtaggcttcctaacagcaacgatatacccaaaagagggtagacttctgagaaaaactgttagcttagaatttnnnnnnnnnnnnnnnnnnnnnnnnnnnnnnnnnnnnnnnnnnnagatgttatcctcagcagaacttcaggaaagagactacaaaaggatgatcttcaagaaggaaaatgattctaaaaggatgatctgaaattgaaaaactagcataagtaaatttaaactgtttggataaaactaattataatgaaaagtgtttataagaaattgtaaaca

SEQ ID NO: 1261 - DNA, 732 bp, Macaca Fascicularis
  misc_feature (1)...(732): n = A,T,C or G
cagaagaaaatgagagttaccataatgggaagctgtggtggtnnnnnnnnnnnnnnnnnngtcacatacagcgatgagagtggcnttcatgctttttttttaagttaacaccctcctttaccccnnnnnnnnnnnnnnnnnatagaatcagagatgcagcagcgacaaatggcattttaacttgtaaaatcgtnnnnnnnnnnnnnnnnnnnnnaaatagaagaataaaaacctgnnnnnnnnnnnnnnnncatgaatttcaagtggagtcgtcgttctctgagagtgagtgtcttgacatttccacccaggccctcctgtcaccacgtcaccggctgtcactnnnnnnnnnnnnnnnnnnnnnnnnnttgctgtattaggatctctgcagttcaggcttaacgaccagttcagtgtatccgggcgacgggtagcggtggtgcatgcctgtctgcgtgccccgctggcgagctgtagttgtgacttgcgtgcctcgcggcccactaccgggctgcagacaatcgaggcgagggcactggctgccggcagttcacagtgtgggggccgcgtggaacgctccttgagggtttcgtttttgttctgcttctttnnnnnnnnnnnnnnntcaagcttacatgtaaactattggtaatttaagtttcctttggtgtcattcagtgtaaaactgtctaatttgaaaaaaaaaaaatgtaggttatgaaaataaagatt

SEQ ID NO: 1262 - DNA, 711 bp, Macaca Fascicularis
  misc_feature (1)...(711): n = A,T,C or G
tgtgtgaggagtccccggaagcctcgnggaggcggagctgctctttccattccatcaggataggatctgaaaacatgtagagaagatgagttgaggacagcttttctaaggcaatgtgatgtctttgctttcttgtttctatttctgtatgttgttagtttggaagagtggaggagctaggggcttcagaaagaatcttacacatgtgttgaagacatcgatgtcttagggagcgtggagctgcattcccttctgggctattactgctaaatctgagtgtgaacagaccgggcggaaagcatggtggccaagtggtctgtgtgcttccccgctgatggagaacgttgcgttgttcacaatagggcctcacgggtgtggacacacagcagacccatggttggtgcagctgcctgttgccatctgtcttcagtaactgctgctctgttgactgttctattctgatactatgcgtgttattttttataacaggtgtgtttttgtttcagaaatatgtattgcttttctcatattctttgcaaattgtattgtcaacattggtcatttaaagtcctgtatgaaccataacctgctgtggtacctttgtacatgtttgattctgtattctttattccagcgtggcatatgtgcccccccagtatcttctgagaagtgcagaataggttgcttctactgccccttcttaatgtaaca

SEQ ID NO: 1263 - DNA, 751 bp, Macaca Fascicularis
  misc_feature (1)...(751): n = A,T,C or G
ggatgtagagaggggtgtgntnnncatggtnnncgggctnnccgcactacaaatgnnnngacggatttgtgcttgtnnncntagcttcatgccctcactgctggacttaaggctttcacctcctggactgcaaacactggcatcgaagcatgtcggatnnnnnnnnnnnnnnnnnnnnnnnnnnnnnnnnnnnnncttccaannnnnnnnnnnnnnnnnnncccaagctgtacctttgagggagaaaacactgtcatgatgctccagacggctaggtgagagtaaaatccgcagttcctcccatctgttcataagaatgttctagtcctcttcctaggttcttgttcccatggtttttcgtcaccatatatatatatnnnnnnnnnnnnnnnnnnnacttttaccttccattctgactcactgtttttatttcgtggtgaggctagagagtatgacgcacctgttaaatagcttgaagttgtatcaagggtagagttactgggctgggcacannnnnnnnnnnnnnnnnnnnnnnnnnnnnnnnnnnnnnnnnnnnnnnnnnnnnnnnnnnnnnnnnnnnnnnnnnnnnnnnnnnnnnnnnnnnnnnnnnnnnnnnnnnnnnnnnnnnnnnnnnnnnnnnnnnnnnnnnnnnnnnnnnnataattgcggctacttgggagactgaggcagaagaatcacttgaacctgggaggcagaggttgcagtgagccaagattgcgccattgcactc

SEQ ID NO: 1264 - DNA, 137 bp, Macaca Fascicularis
ttgtgtcaaaccattctgtatcagaattttcctgggtttactctagataattggcttcaagttgtttttgttttttaatgtacaatgttttgataaatttgtctgttaaattgttatagctggcaatcattttacat

SEQ ID NO: 1265 - DNA, 749 bp, Macaca Fascicularis
gacgcggggcacgcgcaggagcccatcattttgtgtttgggagctcagagtgcgcccaaccttggattctttaagggatgagccagacccagacccgcggccttctagagagggtcccgcggggagggtcggcgccctggcccgggctgggccggagccctgtgatgctgcatcgcccccaggaggagccggctgtgccccggagttggcgcggccgagagaggacaagaccgcgccgcaggcgtagctggagggcgggactcgactttgttgtcgctgcctggaggagccggaggagctgtcttaccaggagaccacgccctggaagtgtccgggactcgcgggacctgtggctgcaaaccccactgggacgcaggcccagagctggcgcactcctcacgatgagactctggggccctagccggggtccacgggagggctgtccttggggactctaggatggcttcgttctggcccggagcctttctggagctgtggcacccaagacaaaaggggctgagggatgtgtcattgacaagagttagtgcgggaaaaccacctgagccctaggggtttgtcatcttagactcaaaaggcttaataccagaaaccactttggcaagatatttacccaccggccatctctgtttactcatgaatgttaaatgtcaaaacgcagcgctgtaaccctgcatagtctttacttgcaaatgtctgtaatctgtaattgtgatacctctgatggaata

SEQ ID NO: 1266 - DNA, 699 bp, Macaca Fascicularis
ggaaggtggtgaggcaggccagcgtggacgacagcggagaggaggtcagacccttctctgctggccggggaaggtggccgccgcttcctcccagcagtctcctcacaattcccaggtggctggtgacagatctatttgggggagtgccgtgtttgggcgtggcgcaggaggaagattggagacggggttttaccatgttgcccaggctgttctcgaactcctgggctcaagcgatccacacatctcgacctctcaaagtgtgggattacaggcatgagccactgcgcctggcccatctttgtcacttctatccctcttcccaagattatgtatgctctctgctctataatacacaacactggtttggggaaggggccagattcaactccttccctcaaagcagtcctcagagatgggagctggcaccaagcattctcagtgactgagacttcacacccagttttaagaatgaatctctcacccgggccctggtgggactcccagcactgctctaaccctgaagtgctcagtggcaggagactcagatttagccccagcttcaccacttatgaattactttgctttgagtctctgtttctttctgtaaaacaacgggattagacctggaaatccctaagtacccctctacattttgatgcattttattttatttattatttaattttatttttgagaccg

SEQ ID NO: 1267 - DNA, 755 bp, Macaca Fascicularis
  misc_feature (1)...(755): n = A,T,C or G
tcttgcacagcagtgtgtagctaaggccactactgttnngaaaccaagtnnnntctgtgcctttttctttctgtgaagtaatttaaggacatccaaaaaaattagactttaaaaagttatcttggtacaacaccgtgtgtatatatacacttggaagcttaaaaaggtgtcttgtctggaacttagaagcagctctaaatctagtagagcagactttctaacatacctggttttgtgtgttggctttgctggagtatgatagcaaaatgaagactcttacactcagctctggtattgctcataacttaccaagaggctaatactaaacttggaaaattgtttaagtatgttttatcaagcagtccctttttttttttttactatagtttttaatggatatgtgaaaactgaaggaaatgttaaaggtttttttaatggtgcaagtgaaggtgccagttgctatttggtatcacactctacaaaagcttcattactttatttgatggtggttgctaagcagccattgcacagagcataagtctactgggtgcctttacaagccagaggctgatgctgcactgttgtgatgtcatgtgaggaaataatgcacatgctctaattgctcaacaggaaatgaacctagaaacagaaaatgaaaaggttgattgaaataaaacttgatcaacacgactgtattttgaaacattccaggaaggttacttcttgttaaacttgcctggcagtgttgtcaaaac

SEQ ID NO: 1268 - DNA, 2271 bp, Macaca Fascicularis
attttgtggcagatcctgggctccagggaggcaaagcttctctgcctctgccatggtaagatgtggtcccaggacgggacagccccaggacaagcgcagtgggagcaggccccggctgtggccaccgctcccaccccccagatgtgtaggtaagcgacacaatgggtcggggggcccaacagactgggatcccttgcaagtcaggtccccccagagtgactctgcacacctccagcctcccagagcccagcactgctgagtcacaggggcctagctctcccatctgtcttggccagaatcaagggtgcgggggacagggaatgggcattggtggaagggccccttgtttccaaactgcctacctcagtggccctgcgacagcctgtctgtccagactccccaggttggagagaagatgctcccagcccttcctttctgcctgccccagggacttggagacacaaggcactgaggaggactccttgtacctggatcactctggtcccctgggtccgtcaaagccatcgccacccctgcctcagcccagcatgagcagggtgcatcgtccagagtggtgctaggccctccaaagaaacctgatgaggacctctacttggaatgtgagcccgatgcaggaaggaaatcgtcttttccctctgtagccccagttgggagcgcctccactgctgaggtgaggaggggctgggagcaggctgtagggaggggttccgggagcagagcctgagagtcctcccccaggaaccctcttgggctgaaggatgcaccaccgtgagaatacatattgaacacacatgtgcggcacaccgccgtgccccagacagggacacctcttttttctgcctgcgggggactcagttgaacaaaggcgatgggaatgcaaataactgcaccctgtgtcctcggctccccatgccggatcgagtgccctggcacgtctctgagtggctgtgtgtatgcacaggacagtgacctgctggctcagccttggtactcagggaattgtgaccgccatgctgttgagagtgccctgcttcgcttacaaaaggtgggcagccatggaccctgggtctcctccgaaaccccttccgctcacaagctgtagctggcagagcagtggggagcaggagagccggagggttctggcctcatgatggctcagggcagtgggaggcccattggaagatgaggttgatggctggggtctcctccacaggatggggcctacaccgtgcgccccagctcagggcctcatggctcccagcccttcaccctggcagtactgctctgcggccgggtcttcaacattcccatccggcggctggatggtggacgccactatgccctgggccgggagggcaggaaccatgaggaggtgggagctggaggaggcaggggcctaaggagggacagcagagcagtatcccgggcccagccaagagcatttgtctcgggaaaaaccctcattttgtatctttctggggtaggcagaaatgacagagcccagagccctgaactccttcccagacgcctggccctctggtgggggaggtgcccctcctgccatgactcagtctgcatagggtcgaggtaggggcctttgtgcctttaatgaacccagctaggaggagggtggagtccaggatcttcagactctcgtctacttcccctgaggactcaacattgcacccagcatttgccaggatgcaaactagacacacggcctttggccccagtttgcttcttgccccgcccaatcttgggctatcttcctctctcctttcccacccctcctcaccctagcctttcccagtgcctgcaagcagctttaatggggaaaggctgcctggaaacccagggacgggtcctggagtccccaccccgtgctcacctagagcttcacactgccttctctgttgcctctccaagactgacaccctcttcccagcctccaagaatgcaggtgtctgcccagttcactaagtcctggatgaaggaaccgtggtgacctctcacatctacttgggggcctagggcaccctgagagggactggcctgccttgtacaagtttgctttcaataaataagaaaaaattgttgaataaaaaaaaaaaaaaaaaaaaaaaaaaaaaaaaaaaaaaaaaaaaaaaaaaaaaaaaaaaaaaaaaaaaaaaaaaaaaaaaccaaaaaaaaaaaaaaaaaaaaaaaaaaaaaaaaaaaaaaaaaaaaaaaaaaaaaaaaaaaaaaaaaaaa

SEQ ID NO: 1269 - DNA, 705 bp, Macaca Fascicularis
  misc_feature (1)...(705): n = A,T,C or G
tnnatgctatggtgatagctgtgctgannnnnnnnnnnnnnnnnnnagtacttgagatgttgccaagtnnnnnnnnnnnnnnnnnnnnnnnggctgtagttcacatctggacaccatgttgattacattcctttatttctagtctccgaaaaaggttnnnnnnnnnnnnnnnnaggcaacgggtgactggaagggcctgaggattacagtgaaactgaccattcagnnnnnnnnnnnnnnnnnngaggtggtgccttctgcctctgccctgatcatcaaagccctcaaggaaccaccaagagacagaaagaaacagaaaaacattaaacacagtgggaatatcacttttgannnnnnnnnnnnnnnnnnnngacagatgcggcaccgannnnnnnnnnnnnnnnnnnntggaaccannnnnnnnnnnnnnnnnnnnnnnnnnnntgtgggctgtaatgttgatggccgccacccnnnnnnnnnnnnnnnnnnnnnnnnnnnnnnnnnnnnnnnnnnnccagccgtaagtgacttttttgcttcgttttccattgttacaataggggcaaaaggggggccacccaatgtattcacagagataagctgnnnnnnnnnnnnnnnnnnnnnnnnnnnnnnnnnnnnnnnnnntttaaactttcccttttactgatagactttttttcctttcccnnnngagttaagcac

SEQ ID NO: 1270 - DNA, 672 bp, Macaca Fascicularis
  misc_feature (1)...(672): n = A,T,C or G
aggannncgtcnnnnattgtgtgcccagcctggcacagggacgggcaatgnnncaggcataactccccagagggtcctgctgcacaggttggtaactgcagttgaataaaaatgacagaaaccagcctcccagtcactgtccccaattaaccagaaggctcaaagttggggtcactggcctgacttctgccccctggcctggtgttcagagccaaaagctaccgagaagatagaaggcagccccatctgggcccagggaaggagtgcccagtggttcaaggagcacttgggagatgccacagctgccacacctgtcctgctccctctctcatgtgaccatcacagtccacaggtcaggttgagtaaggcacgtggtgccattatcccagttttacaggtgaagaaatgagtttagagagacgaaggggccaggcatgnnnnnnnnnnnnnnnnnnnnnnnnnnnnnnnnnnnnnnnnnnnnnnnnnnnnnnnnnnnnnnnnnnnnnnnnnnnnnnnnnnnnnnnnnnnnnnnnnnnnnnnnnnnnnnnnnnnnnnnnnnnnnnnnnnnnnnnnnnnnnnnnnnnnnnnnnnnnnnnnnnnnnnnnnnnnggagcacctgagtccaggagttagaggctgcaattagccatgattgcaccactgtactccagc

SEQ ID NO: 1271 - DNA, 681 bp, Macaca Fascicularis
  misc_feature (1)...(681): n = A,T,C or G
ggaaagcacatgccttcacgggcagggtatgttccttnnnttctcggggtnnnnnnnnnnnnnnntgtgtgaactgttccctctgccatgtttttcatgtgatgttctacagttgaaaatgttagttgtctgctagcacagaatttatctccttttctttctcttctctcctccaaatcagtctcttcccttctnnnnnnnnnnnnnntaaaactttttcccgagggacatacattcgttaactcttgggcagtggtgagcacgagatgactttctgcagtgtttatcagtgtcgggtagagtcacgtcccttccctccaaagaagtcatcaaccagacagggaagggaaagatgaggcccagaaaaaagatgaggcccagaaaaaagatgagttcaaattctaggtcacgtgcacgtatgtaagtaaatatcgataacccaagcctatgtcgtagcagtcacttggttgacttaggatctgggtctgtttaattttgtgcttgggaatggagctggagggagtggggcctgcgtacagcagctgcctctcccgggtcctctcactcacctgccctgtgtcctggttgcatggccgtacctgtctatatgcagaggtctgtgtcccgtcctctgcacctcctctctaggggcctgggagccccnncatgtgccacgatctg

SEQ ID NO: 1272 - DNA, 722 bp, Macaca Fascicularis
cagtggtgagcagtgggggcccaaacccagtttccttctcatttctgttagtttgccctttcggtctccctattgtcttagggaaagggagtggggtccaagtgacagctggatgggagaagccatagcttgtcccagtcagctaggatgtagccattggaggatctttgtggcttcagcaaaattctcttgttaaaccggagtgaaaactttaggggaagggtggggagtcagccaagtgcctcagtgtgccccgttgaaacttggatttttccatgcaatcgatggattgtgtcctaggaagacttttcttctgggatttttgttcctcctgtacaagaggtgtctttgcttggtttggtggggctgcggccacttaaaacctcccgatctcttttatttgagtcttttattataagtagttgtagctgggggagggggagggggagtgggcgggcagtggacagtaagacatactgcagtcgatttgggatttgctaagtagttttacagagctagatctgtgtgcatgtgtgtgtatgtgtatatatacatatctagggttagtacttagtttcacgcccgggagctgggagaaaaaacctgtacagttgtccttctcttatttttaataaaatagaaaaatcgcgtacttgcgcgtccccctccccccccgccttttttaaacaagtgttacttgtgccgggaaaattttgctgtct

SEQ ID NO: 1273 - DNA, 753 bp, Macaca Fascicularis
  misc_feature (1)...(753): n = A,T,C or G
gcaagagaagaagccaagganncagcaggggtcagcaaggcnnnnnnnnnnnnngtggacgtgcagtnnnnnnnnnnnnnnnnnnnnnnnnnnnnnnnnnnnnnnnnnnnnnnnnnnnncaagatcaacccagataactacgggatggatctgnnnnnnnnnnnnnnnnnnnnnnatgaggcgcatccccggaagcccatccccaactgggcccgaggcaccccgctcagccaggccatcattcaccagtactaccaccnnnnnnnnnnnnnnnnnnnnnnnnnnnnnnnnnnnnnnnnnnacttggnnnnnnnnnnnnnnnnnnncnnnnnnnnnnnnnnnnnnnnnnnnnnnnnnnnnnnnnngaactcaccgcctctgcagggcgccagggtccccagcagcctggcctacagcctgaagaagcactgaggctggcctnnnnnnnnnnnnnnnnnnnnnnnnnttatctatgtctatctatctgtctgtcggtctctgtcttggtctgttgacctcnnnnnnnnnnnnnnnnnnnnnnnnnnnnnnnnnnnnnnnnnnnnnngtcctctgtgctgggtgtttctgctgcaggtggcaggtggccccaggcctgtttggaggatgggctgggtgggtgggtggggaagaaccgggcccagccctacatgacctgcagacagtgctctgtaaatagttgttttaatttagctgaatgttagcgttttagtctttggcattttagtgttggga

SEQ ID NO: 1274 - DNA, 640 bp, Macaca Fascicularis
  misc_feature (1)...(640): n = A,T,C or G
gccccctggctctcctggaccaagaggccccncaggtcatctgggggttcctggaccacaaggtccttctggccagcctggatattgtgacccctcatcatgttctgcctatggtgtgagagatctgatcccctacaatgattaccagcactgaagtggaaatcctctactctggttacattggccccgggcatttggctatggaaacagaactgtcctgtcgaccaccaccaccaccaagcccctgcccctaacaatggccaccctgcttccctgcctcttcttcatccctgccttcacgctttcaaatctcttgctcactctgctccaaacatgatggagtgataacattggaacttaaccaaatcatatatgtctattttaatagacactgactgctccatgtcagcctggatagaggtatatgatcgtgtgccaagaatttatcccagactcccctgtgtgacagctccgtaataaagttacttaactgtgcttcctcctccttcctctccccacacaggatggatgggcatctttctgcttgaccaccctactctcccttcctcccctgatcacctcccctccctgctctcctctggtgatggacttctaacatgagatcgtttttttaaatttc

SEQ ID NO: 1275 - DNA, 624 bp, Macaca Fascicularis
aaatctggcgctgtccccttcagcaccacgcggagtccgcgccgcccctccccgcgctcagctgggcccagcctctcctctgtctctcctcggtcccagctctgggcgagcagcggcctgtctgaagagcatgcagcccccttactccccgcctggcctcgccatccctgcccccccagcctgggcctcaggagcctaggctaggggcacgtccgagagcccctttttgtgataatgttttgcactttttcgtacagggtgggcgggggtgggaggggctagcgcccctgaacttttgatgctttttttttgtgtgggagaggcctgatgccatttctgctttctgctgagaccaccccaccctgacaccagcagtcccccctctgtcctggggcctggcttggacagagaccaggatttggggctgagctggtttcccctccttcctccccaagggctcaccctctctcttgctggaggtggaggaagggcgtccatgccaaggccccatacctgggccgggggcagcacgacctggctttccccgcttcagtgggccttgccctttgtacagcctccacccccattaaaattgctctggacttgcaaaaaaaaaaaaaaaaa

SEQ ID NO: 1276 - DNA, 681 bp, Macaca Fascicularis
  misc_feature (1)...(681): n = A,T,C or G
ggtgctgggaattgacagatgaatagaacatgtcccctgcccttgtggaattcggaaatctactggttaagttgctgaacttactctgcttgttggattttgaccaccgtgaatcacatttggagtgggggtcaaaatattgattatatgaaaggacttggaaatatctgttgcactgtgtgatttttacttttatctgagataggtctacgctaaagtaattgcttaaatggccctcaattgcattcttagaaggaagggaatccatttgaattcttgggacttctgtagcaactgctaacactaaatgttcactgtattttgttacccgaaatttcccctaaccaggaaaaacaatggaaattcctcaagagtttttaggcccaaatggggaatttcttgtttctcaggactgttgaattttcaacactgctgaattctttttttgtgtttgtttttgnnnnnnnnnnnnnnnnnnnnnnnnnnnnnnnnnnnnnnnnnnnnnnnnnnnnnnnnnnnnnnnnnnnnnnnnnnnnnnnnnnnnnnnnnnnnnnnnnnnnnnnnnnnnnnnnnnnnnnnnnnnnnnnnnnnnnnnnnnnnnnnnnnnatattttttttttttttttattagagatggggtttgtttcgccatgttggccaggctggtctgcaactcctgac

SEQ ID NO: 1277 - DNA, 708 bp, Macaca Fascicularis
  misc_feature (1)...(708): n = A,T,C or G
ctttgtcgtgaccagctacctaaacccacgcagaggtgacttggtatatgccccggttcccatnncttaagtctcttaacagttgaaacacattaataatgctnnnnnnnnnnnnnnnnnnnagggagagcgcttgtgacgctacgaacctcttgaacacctgaggactgggcgccagggcctgatggagggtggagagccagtgcggcgcagctgcctcctctcacggggacacctagcaggaatatgcagagtggagctaaagggagcagatagaaaccgagagaggggaagagcgcgcgaaggcttggccggaaggagaggttaaaaaggaaaggcctaaaatgaggaagagagttaaccgcaacaggcagtacctagttccagttcttggtcccaggagtttgtggttgctgctgctttcatcttcagccaaaacaaaaggaaagtgccaaggggcgattcctaggactttcagtgcagtctccacctcgcggacttggctcatttgtgtccactcctttctcccacgttttacacttgatgctcttggatgaatannnnnnnnnnnnnnnnngggaaaacacaagcttgggagtcaagggatttgggttctattctcgttgtcccttggtgacgacatcattaccttgggttattcaagctttcagtgccagagttcctatatcaataaaagattattacatt

SEQ ID NO: 1278 - DNA, 2093 bp, Macaca Fascicularis
ataagtgacagcatcaggaacaacccccttccccagaagccaaagcattgctctgtatttaaagatgcatccaagtttgcaaaaaaatcatggttaaatctggccatgtgaccaaagaggcagtcaaaatcaattgcttccaaagtcagagctgtttgaaggtgatcagttcttaattgaactagtcatgatgaatcaatctaactgattgcatccagtctgacttcggtggtttccataaagggttgttgatgccttgagctggacagggtgggcaggaggttgaagaaaaccagttggtgagtttagaaaagaaattgcatgtagaagttgtttgttctcaaagaaatctgtaggcgttagagctgggtttgttatgttattgtcagggacattataatgttggtaaggaagagagtcagaatgatttggtaggggtatttgggaaatttgagtacaaaatatacattatcagagatgagtaggctatggacagctgattatatatatgtgtgtatgtgtgcatatgtgtgtacatatacacacaccccaaagccatatacataactataatacagaagtaagaataaagtcaaaagtcccaacatattttaaatccttagaagcactggttgggatgttacatgttttttcattgttgttgtttactgttagctctcaaagtgcttggcacatagtaggagtttggtaaacatttggaaattgaagacccagcttgtcactacttcacagaaactcagtggtatgactataccccaaattgaatgagccacggagaaatgcatcagccacactccctcttagctgaggagagcctctgtgaatccacagattccatgcaagattcagccagctgcaggcacaaggtctggctccctagtagtgagagtgaagcatactgcacacagtgggtttgcatgtatctagactgcatctgctgaacacccaacagctgtttctacaagctaaagttgtagcttctctctaccactgtctaaagctgtagcttgtctctactattgtctctccactgttgcccaaacacttggtataatgctattgaatttgtcacctccaggcatgattttgtaaccaaatgtaaaggttctaggttcagccagtttaaaaagtctattaatttattctctcagtccttcccttctcccttgtctggagctgccatcgccatttagaagggtctgacgctgtttattcccagcttctcaacctcagtgtgtgtgggaaaggcctgagagagaggggtatgttttctctcctctggagtctctggtgttgacacagcagagagaggagggggagcagcctcgtcttgcagaatcaccttcaatcactgctactgtctgggccattactgcccgtctggctcgtgtctcccacagtggatggctttgcctccagcggtggaccagagtgtacctgacatgtatcagacttctgagctcttcaagctgcctcaaagaatgaatctttttagtctagaaataagtttatttgataaatatactattgtgtatgactgtgaaacaattcaaactttggagtatctcattagaaggactgtatgaatttacagaaaattgaatctaatttcagaagagcgcattgtcttctcagtcagcaaggttgcccagccacagagggtcagagaaaatgcccttttccctccccattccttttctcagaatcctctcaggcctaattgagctgtcatatccaattcagactgacacagagtgaggggctctgagagtctctatgtatataaagatataggaagaaaataagaaccatcacgggaatctgttgggcttctccccatgactgtgatcttacccatgtttgaaacacaaactttaaatttataacaattatgattcttgcagttttcaagtaatttgttaaatgcctattcaacacagacagatttttattttcagccgtggcttgtaaatgcctacaaactgattcatgttggtggtcgttacgacactttctgtgaattggtgaataaatatgattttagaatttcacagtaaaaaaaaaaaaaaaaa

SEQ ID NO: 1279 - DNA, 743 bp, Macaca Fascicularis
  misc_feature (1)...(743): n = A,T,C or G
gattaggaggaatggagtcacatcacatnntngctctttaggctcaggagatatggacagtanntccaagaattctcccaataatnnnnnnnnnnntaatcaaccgggcactccaagggannnnnnnnnnnnggggggaaatttcttaaatccttttcagagnnnnnnnnnnnnnnntagcatgacaatgagcgtgtgatccattaccaagtctcctcatgaaaaccannnnnnnnnnnnnnnnnnnnnnnctactacggaagaaaattattcatcacagtgtacagttaaacaaaggaatctcagtcacaccaaaccaacctttttatttcctgctctctcccctcttttgtgaagaaagcgggtccaaacgtgattcaaacaactgtacggagtggcatattagaattgccctaaactgaactgcaaataattatgtgtgtatgtatatgtgtgggaaagagaatgtactgtatatgtgtatgttatacagacatatacacatacatacattgacccacaggacattgtaaaatattatcacatgacatcttaagtagaaataagtagggacttttattccatcctttttttcacgtttacattttaattattacaagttgctcctgccccctccctgaactattttgtnnnnnnnnnnnnnnnnctttatataagttattttttaaggtgaactcagatgttatggttttgtaaatgtctgcaatcatggataggaataa

SEQ ID NO: 1280 - DNA, 1570 bp, Macaca Fascicularis
gctaccttgattccaaaagcatggaattaaaatccagtttgaaagtgtagagatgacaatcatttactcagaaattttgctctagaacatttgaaccaacacagtcaacagtcaataagctaagaaattgattattctttctatgtaatttatagatctgattttcacatttgccttacaacctcccttgtatggtagaagaacttcctgaataaaaatgtgatttactgcatcaaattcttgacaagacagaagttttgattaattgctataggtcagttgtacctgattacaccctgactgccctcttttcaaatagtctgatgaagttatttgcagacattagaagcagttgctgcaaagtgtccttgaattagctttcatcagcacatagcagtaactactaagcgaacatttctttaagtcctcacaactagaattttaaactagctgtttgcttcaggaacttgcctctgagttgtgctttatcctggttagagtttttataaagacatcatttcgttgttcatttgacagatatttttgaacacctacaatggacagtaagatgggaatatctgtctttaacataaactagctaaaatcctttgggggagacagcgtggagaatgtgaaatgcaagacagatgtttgccggaactctcccgctgttgagcagggcatcgtgtagtggccctgtctgatcagaaacaccctcgttgtcatcagcggccccacatgtgtgcatgtttggctgacgttatgtggcatgagggctgccagtcatggcagaggcatggtgaccttgtggggcctgtgaccctggctgtccaaggaggcccggccttcacagccccagctcttcttcccactctgggcctggggcgcttgtccttagattcgtcatctcaccactctgcttcatcctgctttcttcctcagccttttgcagctttttttctgcacatcaatgtgagtattgcctcatattgtgttaggctataaggttacaaagacctttttcataccttttcccctcagcagcctggtaaggctagaggaatcactgtcatttgacacatcaggaaacaagcaaaaagggggtcattaactcatgagaacccacacccggcaggtggcaggggtgttagtggaaccccggccccctggccttgagtgtccactcatctgcaaagaccataccaatcaaatacctattgaaacctgcatgtgccaggcagactttaaactccagataaacagcacacgcaaaagcagcaaaagccacttctcctggtgcttacatgctggtgagactgagaaacggaagacatgcagagatttgggtgaaaccttttcacatgcagaggctagagtttttagttcagcttactactctactcagcagtgcagtcgttactctggaacactcagaagtctttaagacttttttaccattgtgaaaataaagggagggttaaagtgaaacatgatcctccttggtctgcgaccagcaggatatggtcctttccctcctttttaaaaaaaaaaaaaaaaaaaaaaaaaaaaa

SEQ ID NO: 1281 - DNA, 747 bp, Macaca Fascicularis
  misc_feature (1)...(747): n = A,T,C or G
cttgattcctgtgatcactcttgcatcnnnnnnnnnnnnnnnnnnnnnnggtgcaattctgattagcctgcatctgtgcagtgatcaataatccagtgtgcctagaagggacactgtgtgctgtnnnnnnnnnnnnnnnnnnaaacaagccatttcttgttagcagtgtgagaaccttatagcaaaagagttgaccttctggttgaatataagtacaaccatattaaatgagtcaatacaagaaaattatttctgatactatgtacgtacatatttcttctctaaactttgtcattcttttctaatgtatatgatctaacaaaaatgaaacatgaaatgcagcagcaaccactaaaannnnnnnnnnnnnnnnnnntttttctgtcacttttgccctttgtttatccttccctgtgattagataaacaaaataaaaaaacaaaatgctgtatttctcttcttacaccaatcagaaccaatcccaaaagaatgtttgttgactcaggtttagaggtgttccagaaagacagatattgacattttaattgataaatatttttattattcaggcatgccagaannnnnnnnnnnnnnnnnnnnnnagtttgtatttgctactgactttctatgtgatataaatgcatttnnnnnnnnnnnnnnnnnnnnnnnnnnnntttttaaatttcaaaatgattaatatgtttctgctgttgtggattttgatgatatttacaataaaacaaccta

SEQ ID NO: 1282 - DNA, 779 bp, Macaca Fascicularis
  misc_feature (1)...(779): n = A,T,C or G
ctagagtgcttttnnnnnnnnnggcgctaaagggattnnnnnnnnnnnnnnnnnnntgactattgaaagagggaaaagtctcaaagtttccatagtatcttttacaaaatggattttagaaaaatgcctatgcaactccaaatagtctgatgcctgcttccccaggacgagtggctcttccatgctgtgctgctttcctccgagcctggggaaaggcagagccctctggcagatacgaaagcaagcttttgccaatgatctttaatggagttaaaatgtttatggtaattgtaacctttcnnnnnnnnnnnnnnnnnnnnnnnnnnnnnnnnnnnnnnnnnnnnnnnnnnnnnnnnnnnnnnnnngnnnnnnnnnnnnnnntaattttcataatttattctttcctttcaattatagtgacatagagtagttggccttataagtagatcccatttagcccctgaacgtaataccatctgcagtattataaaagtcatttagannnnnnnnnnnnnnnnnnagaggcaggattttggacattgtgaaggaaatgtgctctttctcagctcacttcaataactattttctgagactgaagttttttagacaggaataagaaaactttgctttattcagttatcacatgtaaaagcttttgctttttgttaggaaaaggtgtggatgactctactgcgtggatggttacatttgctttccgtgaaatgctcagaaaatgtcaggacattccttttccaattgtgtgtcagtgcgtattgtaa

SEQ ID NO: 1283 - DNA, 739 bp, Macaca Fascicularis
  misc_feature (1)...(739): n = A,T,C or G
aaggtaatccagtagaactaaaatgaaaatgttcttaatagggattgggaatggaaggagagcaaagagaagaggtagtgaaatgagccacatttttcatctccatgtgatgtcagtatgtctttctaaagttgataaagcagaaagcagaggtataaacgtattatcaatcactgcactgtccattatggtagccactagccaaatggggctactgacttattgaaatatggcaagtgcagctgagaaactacatattttattgtattacatttttattaattaaaatttaaatttatagcaacatgtagctcatgcctatcatattagacagcacagatttagatgtttctatcatcatagaaagttctattgtacagcactggtccagagtttgggagacaattatcagaagaatcaaaatcagaaatgattacacatgataagttcttagcactgaagcttggggagatgaggggaggactttacccttcatattatacctccttcatgctttgaatatttattacctatcttatattttgttatatgttcagaatgctcaccttgacctgtcatctcaatggctgcaatggtccatttccaaaggactttttacaatggtttttggtttagagtgttgtgtgagactttaaaaatatttttagagggagacacttgtttctatacanttgaatacatctaacataagttgtaactgtgatcctacttctactac

SEQ ID NO: 1284 - DNA, 722 bp, Macaca Fascicularis
  misc_feature (1)...(722): n = A,T,C or G
tacatgagatnnnnncagcacacnnnnnnnnnnnctatannnnnnngagtcgagtnnnnnnnnnnnatgcggtgtggatggagaattcaaaactgaagagtttggaaatttgccaccctcaggagcggaacattttcaatcggatctttggtggtttccttatgaggaaagcatatgaacttgggtgggctactgcctgtagcttcggtggttctcgaccgtttnnnnnnnnnnnnnnnnnnnnnnnnnnnnagaaacctgttgaggttggctcattgctctttctttcttcgcaggtatgctttactcagaataattacattcaagtcagagtacacagtgaagtggcgtccctgcaggagaaggagcatacaaccaccaatgtctttcatttcacgttcatgtcagaaaaagaagtgccattggttttccccaaaacatatggagagtccannnnnnnnnnnnnnnnnnnnnnnnnnnnnnnnnnnnnnnnnnnnnnnnnnnnnnngagaaaggactacctttggaaccctaggaacaccacatttgttgaaaactagcactccactcacagtnnnnnnnnnnnnnnnnnnnnnnnnnnnnnnnnnnnnnnnnnnnnnnnnnnnnnnnnnnnnnnnnncaggaggagnnnnnnnnnnnnnnnnnnnnnnnnnnnnnnngcagaaagagagagtggccagatggggctgaggggagaaaga

SEQ ID NO: 1285 - DNA, 736 bp, Macaca Fascicularis
  misc_feature (1)...(736): n = A,T,C or G
gaagcagccctcctgacacctgacnnttgacttctagcctccagactgtgagaaaatacannnctgtcatnnnnnnngcccggtctgtggtactttattnnnnnnnnnnnnnnnnnnnnnnnnnnnnnnnnnnnnnnnnnnnnnnaagggatccttgtcatttgaagatgtgactgtgggcttcacccaggaggagtggcagcatctagacnnnnnncagaggaccctgtacagggatgtgatgatagagaactacagccacctcgtctcagtgggatattgcgtccctaaacaagaagtgatcttcaaattggaacaaggagagcagccatggatattagaggaagagctcccaggccagnnnnnnnnnnnnnnnnnnnnnnnnnnnnngaaaaagaacaacacaaagtttatctcatgacaatagagaatatctgaaaccccaaatcaatacaagtggaaatgctaccagaatcactgaaaaattaaggagggccatatgtaccagcagatgaaaagaaacaaaaacatttctggtgcttgaaggaactggtaaaatactnnnnnnnnnnnnnnnnnnnnnnnnnnnnnnnnnnnnnaagttgatgaccaactggagcgctgtcaggaaatccaggacagacatatctggcaagctccatatatcaacaaccaaatactgactatagagagaggtaacatattaggaaaagtgtttgatttcagcatagaccca

SEQ ID NO: 1286 - DNA, 728 bp, Macaca Fascicularis
  misc_feature (1)...(728): n = A,T,C or G
ctcactgccaaactgcctgtcctgggatctagttatcttggccctgcacgctacatgagtagcaaacacttattgggttttcaacagtcccagctttcactgccaggnnnnnnnnnnnnnnnnnnnaatttacaccctagcnnnnnnnnnnnnnnnnnnnnnnnnnnnntcctactaaaatatttaatcctaaatcttagtccttgactgtgagatataaggtcttacaggagacctcagggctcccagcccttctcctcctgctaaccctcctcacgccctgaagaggagttagaaaagaggnnnnnnnnnnnnnnnnnnnnnnnnnnnnnnnnnnnnnnnnnnnnnnnnnnnnnnnnntcccacccttctcctgtgatttaggatttctgacaaagatggctgagattggtcacttagagccaactatctcctccgccttttgtttttcnnnnnnnnngacagatccaatatagtcccagggacctgagtctctaggataggaaggaagagggaaggagcaaagagattggggtatannnnnnnnnnnnnnnnnnnnnnnnnnnnnnnnnnnnnnnnnatttctctgccagcccagatnnnnnnnnntcttggccctctctaccccttactgggatttggttttcatnnnnnnnnnnnnnnnnnnnnnnnnnnnnnnnnnnnnnnncaaatccgtnncaccgctgannnntcatttatgccacaga

SEQ ID NO: 1287 - DNA, 632 bp, Macaca Fascicularis
  misc_feature (1)...(632): n = A,T,C or G
tacttcagttggttcaacatnannnnactgaataataaatgaatgtagcaccctggtagactcaaggacttcacagtctgttgggcaagtcaggcatgtaaacagtgtgttatatgggctgttttggacatgaatatataaggtgtagaagaagaatggaaacagtttttaacttcattttatcatctgcgtgtgcttatgtgtaggataatatcttacttggcccatatctctgcaaaatcagtattctacttaggcaaattttacaggttactgaagcttaattctttactgtgtattatgtgtatatactgtggataaatacatgtatgcatattgatcttcacctttcatcctggaagaattacatttcacagccagttacatcaggttgagatcactctagcagccctctctacaaatgctgtttcaaatcactaaatctttgttcttttttagtcttgaaaatgtgttttagtcaggtcgggtgcagtggcccacacctgtaatcccagcactctgggaggccgaggcgggcggatcatgaggtcaggagattgagaccatcctggctaacacggtgaaaccccatctctactaaaaatataaaaaattagctgggtgtggttgca

SEQ ID NO: 1288 - DNA, 4697 bp, Macaca Fascicularis
ctgggatggctaagtaggcagtccaggctgacggctcaccaaggccacctccctgtctacacagtcccacagacatctggggccccttcagtcctgggaaagacccatatctcagcaactgcaagttaaggtcaagcagagaaatgtggggttgctgccttcacgcctgctgcagaagctgaggtctcaggtctgatacagcaagtgtactgggaataagggaatataataccagaaactgggattctagaaaacacaatagttactgtttactaagtgcgaggtacctttctaacagttttgcatatatgttcaaatttcatgcttaaaacgatacaaatttattaccttacagttagggaggacagaagtccaaaatgggtcacactgggctaaaatcatggtgccagcagagctgtgctccttctggaggctacaggggaaaatcctttgccttctccagcttctagggaagggctggccatgcccctcagctcatggcccccttcccagcagtcacatgagtctgacctccgctgccatcctcacatctccttctctgactctgaggccccgcctccctcttgtataactaaggacccctgtgatgacaatgggcccacctggagaatccaggccaaccaccccatctccaggtccttaatcacactggcaaaatctttttttgccatggaaggtagcaaagccacaggttccagggatgagtatgtggacatctttggggagcgttattctgcttgccacacagtaacccctgctgtaactctgggcgatggcatgttctatcattatcttcaatcagaaactgatgtgtggggaggtgacgcatcgtaactcatccagggtcacacagctagtaagtggcagagctgggattcaaatctaaggttttctggctccagaatcttctctgaagtgaaaggcatgaggccgaccactccctgatctggtaaacagagatgtcaggctggtttgtggtgttagggagtttcctggggtgatggtacagggcacatgtctgccctgcatcctaagtccagagactgggttctaggtccagccttgcgtctaactccctgagagatgagagcctttgggcaaagtccctccgtgctcttcagtctgttcatctgtgagatggtggcgtgggaaggggctggagtgatctcacagttcttctcagccttcatcacgggctctaggactcaggtcctgtcagtaacctgctgggggaggtctgggccttccaggagaaacctgacaagatgatgctgcaaacacgaacggacacactgcactttacgttcacaggctgtctcaggggactccaaaaaccctgaccattcttgccccattttgcagataaaaaactgaggctcagagagattacataacttgcccacaatcttcctccagcaagatggaggccaagtgaaatgagaaaggtggtctcctgccacttccttacccgagggtcttctccccacaccagggcttcccgagggctgagatccagtctcacctgtgcgtgatcaaatgtaagtgtgaacaatgcgaagggagacgtcttcaatctaaggggcttcaattctgtaatgtaattctgagattatgccctttttttgttcaagtctttcctttttgaagtgatggtctttacaatatctttacaagacagaattaaaagttggcagctctgaatcagtctcaagagtgttttgatgcaagaggtctccgaaacctcagtctgggagccacggagcgctctcccctctccccaggtttaccagtttgggaggcttggagagaggcctggaggacctgctggggactaaagaagcgcactggtgggaggacaggacgggggaaggggaaggggagtgaattagtctccctggaatgcaggatggtgggggaggaggtctcctgggtggaggagtcccagcgtccctccaccccctcctctgccaacacaatggacaatggcaaccgcccacacactcccatggaggggaagggatgagtgcagggaaccccgaccccaccccagggacctgcaagcctgcagacactcccctcccgcccccactgaacccttgacccctgccctgcagcccccgcagcttgctgtttgcccactctatttgcccagccccaaggacagagctgatccttgaactcttaagttccacattgccaggacccgtgagcagcaacagggctggggctgggcttatctgccttccagcccagcccctggctggagacataaataggccccgcaaggggctggctgcttagagactgcgagaaggaggtgagtcctgctccctgctccgggtgactctggctccccagctcgagggtcaggccctgctccaggccgggcctccgggtacctgaggtcttctcccactctgcgcccttctcctcaccttgctgcaatgaatgggggagcacggggcttctgcatgctagaggccccccactcaaccagccccttcttctcctccaggtcccccacggcccttcaggatgaaagctacggtgctgaccttggccgtgctcttcctgacgggtaggtgtcccccagcctagggagccaaccatcggggggctttctccccaaacccctgtggcccaccctcctgggcagaggcagcgccctctcccccacctccaagcttggcctttcggctcagatctcagcccacagctggcctgatctgggtctcccctcccaccctcagggagccaggctcggcatttctggcagcaagatgaacccccacagaccccctgggatcgagtgaaggacctggtcactgtgtacgtggaagcactcaaagacagcggcaaagactatgtgtcccagtttgaaggctccgccttgggaaaacagctaaagtaaggacccagcctggggttgagggcaggggcaggggccagaggcctgtgggaagatgttgaagccagactggccgagtcctcacctactatctgatgagctgggtcccacagatggtctggatggagaaaccggaatgggatccctatgcagggtcacagcccatgcccccttgcaaaggacagaccagggctgcccgatctgtgatcacagtgccacattgtgcctgcaagtgtagcagacccctttcccttcttcaccacctcctctacccctgcccagcaagagtgtgggctgtcttcggagaggcgaatgtgctggaggcatagaagcgaggtccttcaagggcccactttggagaccaacgtaactgggcaccagtcccagctctgtctccttcttagctcctctctgtgcctcggtccagctgcacaaaggggcatggcctggcggggcaggggttttggttgagcgtgtactggaaacgcaaggccactgcacctccgcgaacaggtgttgcccagggctcaccccggtaggctggggcgctgggaggccagccctcaacccttctgtctcacgccccagcctaaagctcctggacaactgggacagcgtgacctccaccgtcagcaagctgcgagaacagctcggcccggtgacccaggagttctgggataacctggaaaaggagacagagggcctgaggcaggagatgagcaaggatctggaggaggtgaaggccaaggtgcagccctacctggacgacttccagaagaagtggcaggaggagatggagctctaccgccagaaggtggagccgctgcgcgcggagctccacgagggcacgcgccagaagctgcacgagctgcacgagaaactgagcccgctgggcgaggaggtgcgcgaccgcgcgcgcgcccacgtggacgcgctgcgcacgcatttggccccctacagcgatgagctgcgccagcgcctggccgcgcgccttgaggcgctcaaggagaacggcggcgcccgcctggccgagtaccacgccaaggccagcgagcatctgagcacgctcagcgagaaggccaagcccgcgctcgaggacctccgccagggcctgctgcccgtgctggagagcttcaaggtcagcttcctgagcgctctcgaggagtacactaagaagctcagcacccagtgaggcgcccgccgccgccccccttcccggtgctcagaataaacgtttccgaagtgggaagccgcttctttcttttgggagaatagaggggggtgcggggacatcgggggagcccggatggggcctttggccctggagcagggacttccagccggagttcaacaactccgtgcccagactgggcgtcttagggccaagatcgacgttggaggacctgctggacgcctggctgcttacgagtgagggagtagagtctgccttaccaaggctcaagtagaaaggaagtcacagtggaccaggcaaagccacagataatccaaggccagctgccctgaaagggactcagacaaggcctgcagccctgtctggggcaggacaggaaacagggttgctttagttgggagcagtgggttccccgtccccagaggtgttccgtacagagccttctccagcccagtcgctgtcagcggggcggggcgggacggagcggggcggcctcagggagtcactgggattggggtgtggccccgggtgcaagtgaagtgcttggagtttgagtgcctcctcctttatgaattc

SEQ ID NO: 1289 - DNA, 756 bp, Macaca Fascicularis
  misc_feature (1)...(756): n = A,T,C or G
tacatatatgatatgtaattgcattagtggccattttgaatcacagtggtgatcatgtgaatatatttaacactgtgttaaattaatttacattgctattttattttaatcataaacagctaccatgtttcttaatgttttgtgtaaatttaaggtaattatactatccttttaaactgcaagaaaacaaagttgtagcgtatttacctgaaggcgcattatattnnnnnnnnnnnnnnnnnnnnnnnaaactgaaccttttactaattgtgagctaaagatacatatataaatannnnnnnnnnnnnnnnnnnnnnnnnnnnnnnnnnnnnnnnnnnnnnnnnnnnnnagtagctaaatttttggtgcaattatagcaaatgataatgttccctttcgaacttttacattttggcatgacatttcagaatattgtgagaccatgagacaaaattaagaacgatcacattctttatttcttatttttaaagaaatgatgttggtttaccttttcctagttgaagatagtaattaggtttctaagctgtatactgtgtttattggtggcagtgacaccaaagatagaggcaatggatagaaatttttaaactggaaagaaaacctgaattacactacatttttgaagtctcttgtaattatttgggatatcaacaaaatttgattcatctgtctaatgccattgctagtcttttaaatatgtcttttaacactattgtatcctctaatcttcataaa

SEQ ID NO: 1290 - DNA, 724 bp, Macaca Fascicularis
  misc_feature (1)...(724): n = A,T,C or G
aatgacatttggtgnnncntagatactcaaggaattcatattctggctagttctttcagggtatttgtagacattttcttttcctttgtggcagtcctccctcatcctgaaatgttggtgttccaacctatttctaatgctaatctcaactggaagcacttttgcaagcccagctatcaaannnnnnnnnnnnnnnnnnnnnnnnnnnnnnncgtgaagtgtgctattatgctaagcacccctcacacatnnnnnnnnnnnnnnnntgaaagcttgaactattctgcttnnnnnnnnnnnnnnaaaaaaaaaaaagtacttaaactatacagaaaagatgaaatcgctggatagtatgtattgtaaaacannnnnnnnnnnngtgatactggtttaagttgaaataaaatggtgaaagcattgatatcaatcattgtgactttatctcaaaaggctattgaaacacatagatgtttttctccctttatggtgagattacagcctttattgtcttaaatctcttatactcttcaatattttcaaagaaaacattctagtctcannnnnnnnnnnnnnnnnnnnnnnnnnnnnnnnnnnnnnnnnnnnnnnnnnnnnaaaatcaaaacactttcaaaaatttaaaaaataaaaataannnnnnnnnnnnnnnnttaggaattttgaagtgtcaattcttttcactactgagtgtgaatatagaaga

SEQ ID NO: 1291 - DNA, 885 bp, Macaca Fascicularis
ccagctgctgctttaaaggagatgacccaagcacagataggaatctgaatttgcaaacctacggtgcagctgtggcacagaccgtttccttgtctgtcactcactagccacgtgactgcagataagtcccataattattctgagtctcccgtttccatttgtgaaaagcggatggggtctctgtgccgccccctaccctgtgaggcagacgctggggcagcagcgtcactgtacagagtggcctccaggagcagcggcgctccaccacactacccgatgcccgtccaccctctgcccatccgccacgctacccgtccaccacactgcccgtccaccacgctacctgtctacccgcccaccacgctgcccgcccgccacactgcccggacaacggtgtcagccagcgcttccagcaggggcggctctgccgtcagatcagcggagcctgggcaatgcctgagacctttcgggtcacgccgggtgtccactgcagaggtgagggacaccatccaggacaggctcgggacagaccgagtagcccacactgcagccacggggagggtgaggccctgctgggaccgacagagcctgcagcgacaggtgagggcagtccccctgcacctgcccactctggtaaaggacccatgttctacactttctcctccgatgaaagggttttaatttctgaaaatcactatgtttatatcttctcattctaaaactcaaaaaaagttcaacatgctaaatcctgaaagcaattaaaatacagcttttcaggaacaaatacttaaataaacctcatggcagataaaggcagtctattgaaaaaaaaaaaaaaaaaaaaaaaaaaaaaaaaaaaaaaaaaaaaaaaaaaaaaaaaaaaaa

SEQ ID NO: 1292 - DNA, 749 bp, Macaca Fascicularis
  misc_feature (1)...(749): n = A,T,C or G
gccaagtacnnnnntgntttaaagctgaaagtcccacattcctggtgtccttccaggcctggataaatggaggttagtcaccctatccctacttgtgttgttgggagaccttatcaggatttcttgaaaccagagcatacaattgatttgagtccagctttacaagttaaagaataataannnnnnnnnnnnnnnnnnnnnnnnnnnnnnnnnnnnagtaaaagtatactaaggaagaataagtaaaagtatactaaggaaaaaaccctcaagactcagccttgcagagttctttgaagtactgctctttggaaccagcctgggattcagacatttgtgccttgctgcttttcaatccaaggaatgcagggtcaagttatcagaagcatttgaagttgtttagagaattgtgaagaatttcactgggctaaacaaattatnnnnnnnnnnnnnnnnnnnngaggggcataggatgatagtgtctgcatcaaagatagcagcgatgcctttgatagaatgaatcactgctactaaatcgtcttaaatgagaaccagcttttccctccaaaccaatcggattgatctgtgcattgaaaaatgtttctgtcactccttttgctgcgttggagacaagaannnnnnnnnnnnnnnnnnnngtcgtgcttgctgggattgagaatatcgtatttatggtctgagcgcattatcatttgaccactcctctatcgtgcatgctaattcctgaaaat

SEQ ID NO: 1293 - DNA, 747 bp, Macaca Fascicularis
  misc_feature (1)...(747): n = A,T,C or G
tacatcactgnnnnnnnagcagaaagtctaattccnnnnnggacactagaattccatcccagttccaaagccagacagaccccctaggacactgaggtaagagcagtctctaaaaactacccagagcagcattggtgcaggggaactaggccattaggttactatttgagagtaaagtcctcacatcaatagcacatacaaaagtgacctccaaggggattggtgaatactcataagggtcttgaggctgaatagactannnnnnnnnnnnnnnnnnnnnnnnnnccattaaataataacaagttgtgttcatcaagagtcagagcagtgagctcagaggcccttctcacnnnnnnnnnnnnnnnnnnaccaaaccagaggaagtatttgtggaactcactgcctcagtttgggtaaaggatgagcagacaagtcaactaaagaaaaaagaaaagcaaggaggagggttgggcaatctagagcatgaggattgttaagtgctctctggatttgagttgaagnnnnnnnnnnnnnnnnnnnnnnnnnnnnnnnnnntgagctctccctcctaccaccagaaagtcccctggtcaggtctcaggcagtgcgatgtggctcagctgggtttttaataagcacattctccatccaacacttaattgtttgaaagcctccatatagttagattgtgctttgtaattttgttgttgctctatcttattgtatatgcattgagtgttaacctga

SEQ ID NO: 1294 - DNA, 2012 bp, Macaca Fascicularis
  misc_feature (1)...(2012): n = A,T,C or G
acagcagctgaattngnaaaanngnaatcatgccctnnncntggagaaataccaaatggtcagattgatacatcaaatggcnnnnnnnnnnnnnnnnccatctccttctcatgtaacacagggtacaaattatttggcccgacttctagtttatgtcttgtttcaggcagtggagnnnnnnnnnnnnnnnnnnnnnnnnnnnnnnnnnnnnnnnnnnnnnnnnnnnnnnnnnnnnnngacaatggaataattcaaggggaacgnnnnnnnnnnnnnnnnnnnnagtctataacgtatttatgtaatnnnnnnnnnnnnnnnattggagagcactctatttattgtactgtgaatgacgatgaaggagagtggagtggcccaccacctacatgtagagcaaactctctggtttccaaggccccaccaacagttcagaaacctaccacagtaaatgtnnnnnnnacagaagtctcaccaacttctcagaaaaccaccacaccaaatgctcaagcaacacggannnnnnnnnnnnnnnnnacaaccaagcattttcataaaacaaccccagataaaggaagtggaaccagttcaggtgctacccatcttctatctgggtacacgtgtttcacgttgacaggtttgcttgggacgctagtaaccatgggctggctgacttagccaaagaagagttaagaagaaaatacacacaactatacagactgtttctagtctcttagacttatctgcatattggatacaataaatgcaattgtgcttttcatttaggatgctttcattgtctttagggtgtgttaggaatgtcaacaaaggagaaaaaaggcagtcccagaatcacattctcagcacacctctacctcttgaaaatagaacaacttgcagaattgagagtgattcctttcctaaaagtgtaagaaagcatagagatttgttcatatttagaatgggaacacgaggaaaagagaggaaaagtgatttttttccccacaagatctgtnnnnntatttctacttatgaaggaaataaaaaatgaaaaacatttggatatcaaaagcaaatgaaaacccaacagtctcttttaagcaaaattgctaaagagagatgaaccacattataaagtaatgtttgactgtaagacattttcannnnnnnnnnnnnnnnnnnnnnnnnnnnnnnnnnnnnnnnnnnnngtgagccaggggtgttgatggtgacaagggaggaatatagaatgaaagactgagtcttcctttgttgcacaaatacagtttggaaaaagcctgtgaaagatgtcttctttgacttaatgtctttaaaagtatccagagatactacagtattcacataagaaaagattatatgttatttctgaagtgagatgtccatagtcaaatttgtaaatcttattcttttgtaatatttatttatatttatttatgacagtgaacatactgattttacatgtaaaacaagaaaagctgaagatatgtgaagaaaaatttattttccctaaatagaaataaatgagtgatcccattttttggtctcatgtagtatttgaaatttattcttaaacatgactactttatttctgaataagaaattccctacctgcctcctacaagcagttcagaatgctgtctcttggttgtcctagtgcgaataattttcagttactttaaaattacattgtactttctcaagcatgtcatatcctttcctgttagagtacctatattacttgttcctgatttacctgaagacaatctgattaatttataggtttttaccatattcttgtcatcttgccaattacattataggtattagactagaataagatgtactagttatataagaaatataactagatttattatggcaatgtttattttgatcattttgcttcatctgttttgttgttgaagtactttaaatttcctacgttcatggaatttnnactgtgaagactctaatgtgtatttctcaaaata

SEQ ID NO: 1295 - DNA, 815 bp, Macaca Fascicularis
  misc_feature (1)...(815): n = A,T,C or G
ttttaaaaactatccaataagtctgggagtgtctgtttcccattactttaatactcacctcctcctcccagactttctacacnnnnnncacctcaggctgaggnnnnnnnnnnnnnnnnnnnnnnnnccctgctagagacctctcagatctgtgggcccagtcattgggttttatcagtgcttaatgtgaactaagttttttacttccatagaatacaagccactatcctctgatctccccacccgccaccaacccctgtcttttaacatgctgtggggcatagaacagggacnnngnnnnnnnnnagcatgatatattttcagggtcttgtccctagggtaatagcacctctttttgaacagataattgattcaagattggacatggtctcctnnnnnnnnnnnnnnnnnnnnnnnnnggcattaaaaatagtaaacctccctcctcgtcccctgcctcaagaaaatgcctccttatttatcaatatccttttcctccctttccctgagagctcacagtacaatgtttgttttagaagccccatttgcacaggttttcagcaactcagaatgctctacttcctcttctttgagaaaggattgagatacactcctgctgtgcccccatctttcctccaaactcctgcctgtgtttgtgtggatacccagtcccagaaccacactgttgagttggacacactgtaaacccctgggtaaatgtcaagtcatgatgcaaacttcaggttgttctgtataaaatgcaaaataaatgtttttattaaaaaaaaaaaaaaaaaaaaaaaaaaaaaaaaagg

SEQ ID NO: 1296 - DNA, 759 bp, Macaca Fascicularis
  misc_feature (1)...(759): n = A,T,C or G
tccttaccatagnctgccatgtattatnnnnnatgttgtgcccnnnnnnnnnnnnnnnnnnnnnnnnnntccttgactgactcctcactgtgtcctttttaccttgaatcacagtggcttatctaaaagtataagctttttttctatcgtattnnnnnnnnnnnnnnnnnnnnnnnnatgtctgattcctctctttgtcctctgcacccagcatagggcctgaaacagagtagccagcagtaaagatacactgaatgaatgaatgagtcaacgatccttggccnnnnnnnnnnnnnnnnnaggccaggggcagttccgctttagggagaaggatgttgcatccctttgtagattgtgtagcattcaaaacctgctgaacactcaccctcaatgtgtattctctgttctggcctgcttccaggtcagttatacacttcctgggatgggcctttctctgnnnnnnnnnnnnnnnnnnnnnnnnnnnnnnnggatcnnnnnnnnnnnnnnnnnnnnnnnnnnnnttatggcctattcgagaagagtggnnnnnnnnnnnnnnnnnnnncttgatttggggttctcacttaactggtattttccctttgtccccaattgaattttctgtagttacaannnnnnnnnnnnnnnnnnnnnnnnnnnnnnnnnnnnnntgttctgactatgtcttggctttgtgatactgagcgccagaaatannnnnnnnnnnnnnnactaccatcattcttgaaacaacaaaga

SEQ ID NO: 1297 - DNA, 1148 bp, Macaca Fascicularis
catctcttcacaacaaacaattcctccgtcggctaagtatggcgggcggcacacagtgaccatgatcccaggggatggcattgggccggagctcatgctgcatgtcaagtccgtcttcaggcacgcatgtgtaccagtggactttgaagaggtgcacgtgagttccaacgctgatgaagaggacattcgcaatgccatcatggccatccgccggaaccgtgtggccctgaagggcaacattgaaaccaaccataacctgccaccgtcacacaaatctcgaaacaacatccttcgcaccagcctggacctctatgccaatgtcattcactgtaagagcctgccaggtgtggtgacccggcacaaggacatagacatcctcattgtccgggagaacacagagggcgagtatagcagcctggagcatgagagcgtggcgggagtggtggagagcctgaagatcatcaccaaggccaagtccctgcgcattgccgagtatgccttcaagctggcgcaggagagcgggcgcaagaaagtgacggctgtacacaaggccaacatcatgaaactgggcgatgggcttttcctccagtgctgcagggaggtggcagcccgctacccccagatcaccttcgagaacatgattgtggacaacaccaccatgcagctggtgtcccgaccccagcagtttgatgtcatggtaatgcccaatctctatggcaacattgtcaacaacgtctgcgcaggactggttgggggcccaggccttgtggctggggccaactatggccatgtgtatgcagtgtttgaaacggctacgaggaacaccggcaagagtatcgccaataagaacatcgccaaccccacggccaccttgctggccagctgcatgatgctggaccacctcaagctgcactcctatgccacttccatccgtaaggctgtcctggcgtccatggacaatgagaatatgcacactccagacatcgggggccagggcacaacatctgaagccatccaggacattatccgccacatccgcgtcatcaacggccgggccgtggaggcctaggctggccctgggacctccttggattccccttcccaccccagcaccccagccagcctggtaggcagagcccagaataaag

SEQ ID NO: 1298 - DNA, 719 bp, Macaca Fascicularis
gagactggggccgaggagtggtcaacagacgccactggattccgtgagcagatgagtggacaggagcagctgtggggaatcacaaagggctgttgtcttaagaagaagctacctagttcctaaattagaaatcctccaaatagtaccaaggtaaaactaatttcatacttaatgtttatcttttcaagcactgaaggagaagcagccgcatcaaagaagaagagcccagtgatactaaaggccatgaggacatggagggatgcaatccatggcctgtgcattttcatttaaaagtcatcgcatttaataataggtgatggaaatattataaaaaattgaaatagtaaacattttaaatattattaaataacagagatgggcaaggtgtaatagctaactcaggtctttatgtgaccttctgcttccaaggtgaaggggccacttaattgagtgcctccagcttcgttttcaggaaaccttcactcccaaaagtatcttctcatgagttagcatctgtgtcttaactagagccttgtactccaaggcttggcaaaagaaaatgagataaaagctccagccaattttaactaacctttccttgctgtggacacaataaaagaggcagcatttctgttcttaatgtaacatcttttaatatctaaaatattcttttatgccatcagttgttttaataaaaactgtttattcttattatcctc

SEQ ID NO: 1299 - DNA, 3687 bp, Macaca Fascicularis
gcagtgtattcacagtagctttggagcatcagtgttaggaatcgagcagtttggaaatggaattattaaaaaaagaacaaaaaaaataagacagcaatcagccagctagcttgctttggatgttcacatccactctgcttaatggtaatatttatgctttcccttgtatattcattaagaaataacttacgcagtgtcagggctcctaataggctggtgacttcctctctctttctctgtctctgtctttctctctctctagctccagctatctctttctctccacccacccctgagactgtctttgctcagaccattttaggaccaaccatttttgctttagtagggtctcatattcagatctttgttgtatctaataccaaaggtatttctcccctcaataaacatacccctctgcaaggatcaagaaatgctgagagccctaaaggaatccttaaataaattttggttgaaaaagcagtaaaagtgttgaggaaataaagtcagtgtaatttttgtgcttgcattttttgttttttgttgtttttggaaagacttatttttaaccccaaaagtaaaatgcaaaactagcgtatgtgatttttttaatgaaaaaaatatatatgtcatgggtctctcctgaaaataacttcccttggactcttcatttgaaaaataacatgcaaactttagcttaatttttgaatcactcattttgaactataaaatatagttcataaatattttttctataggaagtgtagttctttgttcaggatatggggaagcagagaaacgacccagcgaagacggtgaattctgaaaaaacacagcatggagttttcctctgtctgcacttcgtgccattgagtcttctgcttctatgagttatcctttattcttgtctactctctcataacaactagaccttgaagttgttttgccaacagtgttcatagtagaggctggctgtcattccttgttggatgaagatgtatttgttgaggacttactgtgtgtatttctttggaacgtggaatccaaggtcaccgtttctttctcttttgacaatggtcaaaagacataactaattagaggataagtccctgtgattggagataaagttggggtgtgggatttttaaggtggcacattgcacaatgaggtttgtgtcaaataatgagaaaaggtctgctgaaacattcaagtacataaatgtctttccttctgtatttataagtgtctaggtgtgactccgaaagatagaaataagagatcttttggacattttagtctataaggtttcatgtgtccacatcttcagcctcaggaagaaatatagaagtttggacagttgaaaggaacttgtctttcagtcagctacccatgaagcttggctggaaccggttaattttacagaaacacgaatgtcttgcctccttgcttctgacataaatggctttttgaattccttttcctctgttacctcccaggagcatctgaacagatagtgacccttttggcatgccaaagtggaagtttgctagtggagcagaaatcgcgtttactttgtcatacacatctaaatactgtggtatgtgtgtgtggcgtgtgttgtagacagctgtgagccccggtgtgccgtgggatgtaccaataatggcttctcaagtactctgtgttttcctaagctgcgagtctaaaccctttaaaggtttgctttctaatttgtacatgaaaaataacagactgagtcgaatttttttttcaagtgccctctttgaagatgcagcactagtaaatactgctctaatgataaactttagttctaagtgctacttaaaagtctgtggtagaaaggctgagaagttgccatctttactaatgaaactttcattaggaaaatgctcacttaaaatggagtaaacaaccaactccctgaaatttgtgattttgaccagatttgactcatcttttcttaagttactttttgtaatgcagtcaaccacacatccaaaattcttagtattatacatgtcttcaacattaattatctctgttgatgcactgggtacagatagtacaattcccacaagtccagattcttactgtaacaccaaaacaaaagtgatatttatgaataatattgggaaagttgtcctcatagtaaccgttccccaaaggaagctttacataaatgtgcacttattattcaggatattaaaagggaatccttagctttcactttttaatttgggctaaaatatgtaaattggttttattttggagctgctctgttttaggtggctttgggggaggataacttcctagcttgattatattttaaccacctctgcagtggaaaagtttctaatcttaaaagcaacctgattattgtgattaggacccagagggcctgtgttcagatggggctaaaaacatattatatagacctgtacacatgtagaaaaatcagatttgtttctactagacaccactattaccatgcctttgttggcaagactatctcagagaccagagagccgtgagtctgcctctggcctctgaggaatgtcatggtgtgctcgtacaggcaagcctctaaaaagattgctctttgtcttgagaaactggcaagtgcaaaggacttcagagtcaggtgaacttaagttggaatcctaactcttccaattactaactgggcaatcacagatgagctacttcaacacgagccacaattcctcatctttttgattgtgatgataatatctaactcacagggtttctgcaagaatcagatgagaaacagtattagaaggcaccagtcatacataggacttgaaagtcgaaggtgttttgaggatgttaagtctctttcagtctgtcagtctttctgtcccttggcaaaagcccttccccagaaagaggcccatctgcccatgccagatgtcctggacagtgacattgcatgctaccctcacagtctccatactgtccccagcatgcaaggagggtggcacacagtgttgttgttttttttttctatatagacaagccctcagttcttcctcggaattgtatggctttattacgttttctgcatcctcctaggatttcgtaagctatatccatgatctcctttggaattagaattcacttgggatttagttgtcaaaagaaaaaaaggatgaagataaaattacttttacccagtgctgttttttaatttcatgaaagagcctgttaggaaagttagaagtcagccagaaagaaaataaaaataggctgagcttaattgatatggtcccatctttgctgtctatatattgtaacttgcaaattatttgactttttcccagaaaccagcttacttcagatctatttttttcctcttcactatatcaggtttttttctcctttccccttgttttcccaataggctgaactttgaagttctgtttctcacagaatggtgaagaggttgaggcaaaaagtggcttaaagagatttttctaacttgtcatcagttttccttctgcttggcaaggcaggatgatggatggctttggcagtgtgaacacctctagaagtgatcagattgactgaagagatgtgcaggatgtgagcagaatgctgaccctcaattcattaccctcccatttgaagaaaaaaaaaaaaaaaaaaaaa

SEQ ID NO: 1300 - DNA, 719 bp, Macaca Fascicularis
  misc_feature (1)...(719): n = A,T,C or G
catacacatggagcattctccaggatggaccacatgttatgtcataaatttaaaaggatttaaattactgaaagtcaaaatcaataacaggaggaaatttgggaacttcacatatgtgtagatattaaacaacacattgataaacaaccaatgggtccaaaaaaaatcacgagggacactaaaaaatactttggaatgggatggggcgtggtggctcatgcctgtaatcccaacattttggcaggctgaggtgggcagatcacctgaggtgaggagttggagaccagcctgatcaacatggtgaaacgccatctctactaaaaatacaaaaattagccaagtgtggtggcgtgagcctgtagtcccagctacttgggaggnnnnnnnnnnnnnnnnnnnnnnnnnnnnnnnnnnnnnnnnnnnnnnnnnnnnnnnnnnnnnnnnnnnnnnnnnnnnnnacctcaaaaaacaaacaaacaaactttggaatgaatgaaaacaaaacacagcatgccaaatgttataggatgcagtgaaagcagtgctacagtgaaatttatgactggaaacatcaatagtaaaaaagatctcagatcaataatcgaaccttccaccttaagaaactagaaaaagaagtaaatccaaaataatgagaaggaaactgactaaaccagaagtaaatgaaacagaaaatagaaaaaataatacagactctcaac

SEQ ID NO: 1301 - DNA, 752 bp, Macaca Fascicularis
  misc_feature (1)...(752): n = A,T,C or G
atgcttaagaagttggggagtaggtatggaggcaccttaacaccagtttttgagcaannnnnnnnnnnnnnnnnnnnnnnnnnnnnnnnnnnnnnnnnnnnnnnnnnnnnnnnnnnnnnnnnnnnncagtcccagaaatatgaccagnnnnnnnnnnnnccttcggggcatccgaaggaatttgaaacttataccccattcagatgaactgtaaaagnnnnnnnnnnnnnnnnnnntttggtctgcctggcatttgnnnnnnnnnnnnnnnctgtgtttttaacaaagatgactttatggccattctaaggattgaacagattcctgcacagggtgccaggttgcaagttaggtcctcttagtataagctgtctttttttctgaatgtaaacctatttgcattgtcatttctaataatccattaggtttctggatattgtaaagatactaagtacagatatattgtgtaaatttcatagtgttttattttgaggtgagagttttgttatagtttataaaagatattttcctattcagacctcagggctatttgggaacctacaaataaatgtgattcccagcagcttcaatttttgatattcaaaaagttaataatctttaagctaaatataatgtgatattagtcagaaaaaaatgtttttcccttttaacttctaacaaattatgtactaatgtttaaaaaaatatggaaaaaatgggataatgtaaaaatgtgggagaattgtagctaa

SEQ ID NO: 1302 - DNA, 2720 bp, Macaca Fascicularis
attgacgtagctcctaagtgatgtttacagagaaggaaatactaagcaagcccacgcggaacacgctcacagtgtgctagctttgccatgctttctgactcttctggtcctagtcacacctcggcgcagggggcagaagcggccgagctatgccgacaggtgctgctgagagcgagcagccgttcagctgagaaggcgtttctcggtgagggcacgtgagctggcgttccaggctgctgagtgctgcatctgcaggtgcactgcgttgctccacagagtgttcagaagagaccagcatcttgaatttcaggccctgggctcgttctttgcctctgccaagggaccattaaggggcttcaagccagctgctgaaattcccgcttttccggatttttccccatctatataaggatatggtagctgtgtgggcaagaaattggttgcatctcagaagggtgtttccctacaaatatcttcaggaatttaactgaaaacaatttttagaatttttttttttttggccagtatgaatgaagctgaagtcacatcctgaatgtgcatgctagacaaagggtaagcaagcagtctttacaaacaccaatccctctgcactccaaaaccggagcccgtaatgaaggcccagggtgcagtcatcacggaatcccctaagccagcacggggtctgatgcctctctaggcattagcacatcccagcactggaattcacatcctcggcgtccccgcctcctgcgtccagggcttcggttgagcgtttccggagtgtcgagtacatttaaacataaaccaaatactccagggttttgacctgtcacaatggcttttgaaaacaacagacgtacaacttgagagaaggacttgatggacttcttaggccgaggactaaggacacgttgctgttcctcttggtccaggacattcaataccatttacagcattcgtcaccaactggcacagtatcgatcacggcattcaactgtttgaaattactgctattttggtcaaaaactaagaaatcagaaattgcacctacacagtgtgtctcctcattggagtcccatctctgagcacagggatgggttcctgagctcatggccccgccctgcgccccagcagggacctccgtgaatagtgactgcacgaaggggacacttactagaggcctgagtaatggaatgtcaattcgcttctgcttcccttttctaaaaaggaaccacctttcttaagaagaattaggccaaaataaacttgagtactttgcacagtcaatactttgaagtttcagagttagcagtgaaatagcaaagctgttctctgggaaaggacatccaggttcccacccagggcttcctcagctcctgcagcctcatcctagtttaatatgaaggttgtgaatgggttaaaaagcagttcttaagcacctacttagatcctttttcagtatctggaaagaccacccagggctgtgttagtaaagcttttcactgggtaagagtcatacaatttttacatttgattttttgttttttaaacaaggcagtcttgttgtacatgttggaatgactagatatttttgacatttctggcacctctggttctgttgaattttaagggaggtgagtggtatgtccacaaagttaagattgctgcataataattcctttgcatttccaaaataaagtatacaaatgtcacttttccttttctattccatagtactagttttagccagatctttgccaaacattctaggaaattcagaagagtcatccatggaatttcggaatgccattctctctgtatctttgcagatgatgaggaaggaaagttgatgaactagtacaggatggctcagacttgtaaagtgtctaagtcacaacgctgcagagccagcttctgggtaacaatggcatggcttgggctgagccaaggctacaactggagcttccttactcgcatctgaggcaaatgccagcaaggctggcccaggctgcccacagtcaacagatgttcacgggagacggagcagccgctcttttgcttgttctgtcaaggaaagagatctaaccatgggcaagggtggaacacacatggttcagctcagggaacgagttgctctaagtgaacaatgaattcttacctctcagcctgtatcagttgtccccagggttcatgattattgtgagccactaagggatgatctttgaggaaacagacctggagggaggcaatttaaggagggagagtgagcggcttttacagactgctttgcagccacattcaggaacagatcattaaatggatgacttttaggtacataaaagcaagcagcaatggctaggagagagtaaagatgccctaagaatgacatcagactgaccaaatgtgccttttcaaataagttatgagaacgaatgaattggaattacagcaaggtattggacagaaccatgctagtctttgagagaatgtgtggattccgtggatgtttggattgaatgaatggtaactttttaatgtgaaacagagaactgataatatgggctgtcatgtcaacctagggtactgtcgctctgtcatgtgtagcaatctttccaaatttttgctggtgggttgaacaaagataaaactaataaagtatgtgtggataccactagaaaaaaaaaaaaaaaaaaaaaaaaaaaaaaaaaaaaaaaaaaaaa

SEQ ID NO: 1303 - DNA, 718 bp, Macaca Fascicularis
  misc_feature (1)...(718): n = A,T,C or G
gtagatttctgtctgtaaaatatnncctagttaatggaatttnnnnncgtcccctcccttccccctcctcttccttttttaaactaagggcattttatcaacaatcatgttgaattcagttaatatctcaagctaaaaaactatgtaattgnnnnnnnnnnnnnnnnnnnnnnnnnnnnnnnnnnnnnnnnnnnnnnnnnnnnnnnnnnnnnnnnnnnnnnnnnnnnnnnnnnnnnnnnnnnnnnnnnnnnnnnnnnnnnnnnnnnnnnnnnnnnnnnnnnnnnnnnnnnnnnnnnnnnnnnnnnnnnnnnnnnnnnnnnnnnnnnnnngtcgtgatgcccaccctgtagagaaatcaacagaaccagagaagctaagggacttgatcaggtttcccttagaacctgtgttgtatcattgnnnnnnnnnnnnnnnntccatgtgtttcttattcaacttccagaagtagagaaggttgggacttgagtgtagaagaaacatcagaataatttcaaaaaacaggaagttggaactgtaatttgtaaattattgttttacagatttttacatgtataaatattaaaattcatctcttgcagttcaataaaagctatagtatagattttatttttaagaagtttatataattcttttgtgaaccgaatatgtaaaactagaatatttattaaactaatatgtattagtatcgataaaatat

SEQ ID NO: 1304 - DNA, 2516 bp, Macaca Fascicularis
attcctaataccttaagtgtacttgtacgtgaagagcaaagttggaggctgttgagctgtttacttctaattatttcctgattcacaaattaatttttgcaattcacaacttccaagaatacttgtactgttggattcaatccgcagtaatctgcagaagaagagaagcagaattatacctaggagtcaactaatggacagttagtcacccacctacatgttgagattcctgacatacaaacaactgacttgtaactgacttacaactgacttgtaatagactgctactatatcaaaccgacaatgaattggaatgaaaaaccaaagagtgctacattaccaccactgtatcctaaaagccagccaccttttttgcatcagtctttgataaaccaaattaccacaacacctcaaagttctttcagctatcctggaagtaatcaagaagcatgcatgtatcccagtaattcaaatccagtttcacagccactgctgaatatccaaaattatcctcaacaaatccctgtttctgatatgcataacgggacagttgtggcctcacacacttcagtagaaagaataacatatgcaaatgttaacggacccaaacaactaactcacaatttgcagatgtcgtcaggagttacacaaaatgtatggttgaactcaccaatgaggaatcctgtgcattctcatataggggcaactgtatctcatcaaactgattttggaactaatgcacccaatatgcctgcactacagagtcacctggtaacatcagatacctattctatgcaaatgcaaatgatcccttctaatcctacacgacttcctgcagtttaccaaggaaatcagggactaaaccagtctttttcagagcaacaggttgattggacacaacagtgtatatctaagggactgacttatccagattacagaccacctccaaagctgtaccgttactcaccacaaagctttttacaagattctaccattcaaaaacaaaactttatgccacgtacatcattacaagttaaaaacagtcagcttccaaattctgtgctaactttaccatcaaagcagactgcagctgtaccatcacagcagtatgccacgcaaactgacaaaagacctcctcctcctccttacaactgtaggtacataagccagcctttgcaaagtactcagcatgttactaaacacttgtctatggaagttcctcagagtcgagaaatgctctcatctgaaataaggaccagctttcaacagcagtggcaaaaccctaatgaaaatgtcagcacaattggaaatttcactaacttgaaagtaaataccagcagcaaacaacctgttaatgatcccattagatcttctgtggatggtattcagactcttgctcaaactaatgaagagaaaataatggattcttgtaatccaacttcaaatcaagtactggacacaaatgtcacaaaagaaaagctagtaagggatattaaaacattagtagaaataaaacagaagttttcagaacttgcaaggaaaattaaaatcaataaagatcttttgatggcagcaggttgtattaaaatgactaatacttcttacagtaaaccagctcagaattctcagttgtctctaaaacaaactaccaaaatccagtctggaccccaggtaactccagtaatgccagagaatgcagagagacaaccaccaacagtagtggaatctacagaaacaaataagactcaatgtatgatgaattctgacattcaggaagtcaattgcagaaggtttaaccaagttgattctgttttaccaaatcctgtctatactgaaaagcggccaatgccagacccatctcatgatgtgaaagttatcacttcgaagacatcaactgttgagatgacccaggcagtattgaatactcggctttcatcagaaaatgttaccaaagttgagcagaattcaccagcagtttgtgaaacaatttctgttcctaagtccatatccactgaggaatataaatcaaaaattcaaaatgaaaatatgctacttctcgctttgctttcacaggcacataagactcagaagacagtattaaaagatgctaatcaaactattcaggattctaaactagacagttgtgaaatgaatccaaatacccaaatgaccggtaaccaactgaatttgaagaccatggaaactccaagtacttctaatgtaagtggcaaggttttggacaactctttttgcagtggacaagaatcctcaacaaaaggaatgcctgctaaaagtgacagctgttccatggaactggaagaaacaattaaagtatggaagcagcggacacatgttatgcggttcttccatgaaacagaagcgccaaggccaaaggatttcctatccaagttctatgttggccatgacccatgaagtcactcagtggaaaggttcatgttgatattattttagagcacaaataaactcgctatacgatggtcaaaaaaaaaaaaaaa

SEQ ID NO: 1305 - DNA, 698 bp, Macaca Fascicularis
  misc_feature (1)...(698): n = A,T,C or G
ggaccaactgcagcctgacctcagcccgcatagctccagtaaaatctctattnnnnnnnnnnnnnnnnnnnnnnnnnnnnnaaatccaacattcacttctcagtctctagacttccctgttatatgtgatcttattgatcatgcctcttttgaaactctctctgctttgcctccttccatggtcattcattttcttagctttgttcacttaaaaggttcctcttcctggccgggcannnnnnnnnnnnnnnnnnnnnnnnnnnnnnnnnnnnnnnnnnnnnnnnnnnnnnnnnnnnnnnnnnnnnnnnnnnnnnnnntgggcaacacaggaagaccccatctctacaaaataataataataataataataaataaataaattagccgggcacggtggcgcacacctgtagtcccaagtactcaggaggctgaggtnnnnnnnnnnnnnnnnnnnnnnnnnnnnnnnnnnnnnnnnnnnnnnnnnnnnnnnnnnnnnnnnnnnnnnnnnnnnnnnnnnnnnnnnnnnnnnnnnnnnnnnnnnnnnnnnnnnnnnnnnnnnnnnnnnnnnnnnnnnnnnnatagctgcttctaccaccttcacactggtgacccacctccccactattttctcttccatggaaattgaaattatacaactgcnnnnnnnnnnnnnnnnnnnnnnntgatattatgattta

SEQ ID NO: 1306 - DNA, 2932 bp, Macaca Fascicularis
gctaatgatcagtctaacaactgaaagtcaaagtcagtagtagctagtaccatgtgcaacaggatttaggaagttttgatctcacaaatttactgtaaggctaagaatcaatgaatgtttgtactcaggtctccctacagttaaatttaatttgtaactggaattacgattcaaagagataatttcataaatggtccctgaaatttaattttggattacctaagtttacaatgggtttctcttctcctttcccccatcatttttcttatgctgaaaaaaacaaacaaacgaaaagaacaaaacctgtgtgaccttggagctggctgccctgagtcccaggctctgatttgattctgatgctccggagcctgctttctcatatgggtagtaatgcctaccccgctgggtcattgtgagggttaaaacaaggtaatacatgttaaatgcctggcacagcccttgcacataaaaggtccttaataatattaattccccttccagattagactttgcaaacaaatgcttgaaaaacagaacattcacgtagattggattctctagcgtgatgaggcgccaggccaagaaccatgcagtaaagatcttccaaaccaaagtatttcagcatctgagaatggctagggcttatcttcatggctaaaataagcattttaatataaagcaggcttttttcttcttcattttcttatggaaaggaaagattttcagaataatggttaaaatctgtcctttgtagatctgaaaatgtgagcaagtttcatactgaagtcaagatctactgaaagtgttagatgaatatataaggaccagacgctgctgtcaaaaataaaacagatgctggtgtcttgaatgcctccatgtgccaaagctgagttctttgacttatttttgtcattgaattaattgatgtatctggtttaattggccaaattgtttttgcttaaatgtccttattttcagtgttatactgatacagtcaatgtttttgagggtacagaaaataccaatattggcaaatacatgtgttcagaagaagaaaaattgttcatttccacatcccagatttatggcaatttaaaaatatatagtaaagtgttggtttctccttatggttacatctgaatgtgtataaattatcagagtctgtgtgcatttatttccatagaaaataataccagcagagacacagccaagccaagctgaaccttgctgagtggatttgaagaaacacaggccaactcagagcaagacaaacccaagagataggaagtctaaaatagtaataatcagcctttgaaacattttcccttggaaaaggcatctcagtcccatcctatattaacagaccagaagagacacacatgtgttctacatacgacacagaacgtaaaaccaaaaggctcattctgaatacccagtccagctttgaattgaaaccttcatgaaaaagtagtgcttttgattcaaaggagctcaggtttgaaagggagatgtgaagcctaacatcccgtctatctgatggctggtcttcctttacacagctctggcaaagatgtcaaccaattgatacttgaacatctatagaaatgagcaactcatgccccacagcagaccactctgcctttgaataatattaaatggaaaatgtgctcttattttggaccaaggcctatttctctgtaaccgccacttacgggttctatttctatcactaagggttccagccaggcagaattccatttccagtggcaattagtcttacaaacattaaggcaaagctcacaaattagcccacatagtattttagataattgtaaattagctactgacatttgaaaattagaaaactacccatagaaatttgtattttcaactaattgttgattctgtgaaagcaatgggccactttcccaaatagtaaaactagtacccccttacccacagtttcactttctgcagtttgagccacctgtgggtcaaccatagtctgaaaatattaagtggaaaatgccagaaataaaccacgtatacgttttaattgcacgctgttctgggtagcgtaatgaaatctctgagtcccactctgtgttgcctgggatgtgaatcacccctttgctcagcataggtgctacctgcccattggtcacttagtagctgtttcagttattaatggaaaaaaagccatagtatatatagagttatgtattatccatggtttcaggcatccactgggaggggagtgtctcagaacatatctctctagataaagggatactactgtacttggctgagctgagtagcaactgccacttttagacagggtatgtactggcctttttgccacactccctgttaccttgcactgagcctgctttcctcattttctgatacttagctggcctctgagacatttgcctttctagttcttattgagtcctctctaaggcttctttgcttcaggagatttaccctcacttcctcactcttcccctctgcaagacaaatcgcatgcatgcctgaagcctagacctgctgaatgacacgacacctagaaaactgacaactgattcatccagtctcgcaatcagtcctcagaaatgtgctggggtaaatatatagctatagaccttagaatcattttagatagcataagggtgggatgtggaggttataaaaagcctgtgcacatggaacagagtagcttctcatgcctgctaaaggcctaattccagatcgttgttattatttgctgtaaatcctcacgagcactcaaatcagtacctacaaccaagagcatgctatgaggttttctgctgtgtttagttgcctctgtgatgtttaatgccttcggtattaaagaaaatctcactcaaaaaaaaaaaaaaaaaaaaaaaaaaaaaaaaaaaaaaaaaaa

SEQ ID NO: 1307 - DNA, 2133 bp, Macaca Fascicularis
  misc_feature (1)...(2133): n = A,T,C or G
cataattccatcctggtttcctccagctacaaaatactctgcattatcagtttttccttaaatacagtaaaatcttgaatgacaaagataagggagtgggggcacaaacaaaaagtgaaaacgcagtgaaagccattctgaaacactaaggtggaagttctgtgaggaatgtcagtgaagctcagtcatctgaaatgtgtggtcacatcatcatgaggttcgtggacttcatggggagtctgcacagcaagccaacgaggaactcttgagacctctccctgctgtccagatctttcagcctttgatgctctttggagctgattggcttaaatattgatggggacaattctgtggctggctggaacttctgtgatggtggctaatttctggaatgatagccctggtttcatctctcaccttcctgcttcccgtgtcaggggcacctgccatttccccatctagcctggcctgccttgctgttatgtttgcgcctctactcccagagcagatgagcctggggctgggcataagaaagagttacttgccaatcacttcacatctgaatttattcacaggcatgataatttaagaattaatttagctttcacatcaaagccttttccaaaccatactggaatgatttgagattacctgttttgtattgtgtgtgctaccattttgctccgagggccaggctctagaaacagcccagaaggcccctcctgacctgagcatggaagtaccttgggaggtattggcattccctgcgagtgtggtgctgccactccatgcagggcctctttgccgactggaaaaaggacctcaaggcacagccatctgtaagaacaccattgaaacgtatgaattttgttagaattagattcttcagagccttttgccagaaaatcttgtaataagtgtaccaaatctataatattgccaaggtcagtacccctgaatctcccccatgaatagctctgcctgaaaagaacatgtgagtaaaataatggtgtttttgtctttcagcagtgatgtttttctttgttcttctttgtttttattttcagtaatttctgtaccagcactaattgcccctgttagcactcagtttaggaagcatggaaagctggagactgctggggaagaaccgttagaatatgcaggaatgaaagcttgcttcctgtgtgtgttttccggcttcagtcccaggatgactggaagcagaaacagtcgggagctctggctgtattccctcttcacatttgatcaaagccagtgctggctgggctggcataacaaatctcgtagtaaatttaggaccaagagtcactaccaacaggatctcagttgttgtgcgtatgcttttttcttcattctcttacttttggatcattggttgactgacttaagtgactcaagtatttttttttcttaaccttgtattagcccagaaggttcctccgtaatgatccacttaccatgtggattgcacatcaaagcaccgtctttcttttcacagtctagttatggcttctccgagcagcagatcatagtttattcctggtggttgatcttccatgtctctgtttacccagccttctctgtaaaacagaatgaactaacttgagtttagtgctgcatagtccttatatccctttacaaacttttcactccgctagtcatttaaaatgtacaccctcatacctttcttttcttgttctttttctttctttctttcttttttttgttttttctttttgnnnnnnnnnnnnnnnnnnnnnnnnnnnnnnnnnnnnnnnnnnnnnnnnnnnnnnnnnnnnnnnnnnnnnnnnnnnnnnnnnnnnnnnnnnnnnnnnnnnnnnnnnnnnnnnnnnnnnnnnnnnnnnnnnnnnnnnnnnnnnnnnnnnnnnnnnnnnnnnnnnnnnnnnnnnnnnnnnnnnnnnnnnnnnnnnngaccaggctggtttcaaactcctgatctcaagtgatccgccagcctcacgcctgtaatcccagctctcagggaggcagaggcgggaggatagcttgagcccaggagttcgagacctgcctgggtaatatagcgagaccccgttctccacaaaaaggaaaaaaaaaaaaaaaaaaaaaaaa

SEQ ID NO: 1308 - DNA, 736 bp, Macaca Fascicularis
  misc_feature (1)...(736): n = A,T,C or G
gtgtgacagtcagaatggaaggacaaccnnantactgcaaggggcnncnncatagatgaacatcattgctgggtcnnnnnngcagggggccacttcatagatgaaaatggctctcnnnnnnnnnnnnnntcccgcnnnnnnnnnnnnnnnnnnnnnnnnnnnnnnnnnnnnnnctctcctcttatctcctatgctggagaaggattagaaagttannnnnnnnnnnnnnnnnnnnnnnnnnnnnnnnnnnnnnnnnnnnnnnnnnnnnnnnnnnnnntgaaaaatggtatttgaaccagataccaagttttgtttgccacaataggaatagcttttatttttgatagaccaactgtgaacctacnnnnnnnnnnnnnnaaccgaagtttaaatatccacagggttttattttgctcgttgaactcttacagctattgcacacttcccaagatccagatgactcaactgcagatagcatttttatgattcnnnnnnnnnnnnnngtcttatttatataatttttttccaagccaaggagactattggccatccnnnnnnnnnnnnnnnnnnnnnnnnnnnnnnnnnnnnnnnnnatcagtttacttggagctggaagcatttgtttttgaagttgtacatagtaataatatgtcattgtacatgttgaaagatttatatggtactaaaagtttgttttattttatcaaacatcaagcttttttaagaaaataattgg

SEQ ID NO: 1309 - DNA, 2148 bp, Macaca Fascicularis
  misc_feature (1)...(2148): n = A,T,C or G
attatagcagagagagagaggaaagaaaaaaaatgtcactacaaatttcttcataattgatcatcaatctggtctgaaacattcagataaaattggcattgacatttgctcatcttggaatctatagattgatccatctgaagttttggaaccagtcagcctcagtgggatgtgctgacaaaaaggcagggtatgtcaaggcaggagttcctaggacaactcatagctttgctagtcgtgacctagtattgtacaggcttcatatacaaatttagggcttaaatactttatagtgtgatggagactattggttacttccagcagcccccctcactctcatacttaggttcaagcctttatattccaagatatttttaaaaacacagcagcttttattcatatatagcacagattttttattccttctaattgaaaaaaaaactttgcaatttgcaattggcatatgtgccacttctaggaatgctcttaaccacttcatcaaacttggcactgtctagatgttggttttgattgccaacctatgaaagagaaaggaaatcacaaaagagaaaattaacaagtgagcacggttccaacatttgttctacaaatgtgttttaaatcaaatgaatcatcctttggcacaagttattcactttatagtcattcatttgagcagcttagtctctgtctcctacagactgtggttaacattattcttgatgaatgagacagttaccttaaaacataaataaaacaaatagaataacttaacatctgactctcaaaggaaggtatgttatcttaccttgcactggtaatatattttaaatgaaagtattcagaaatcagctaaaaccacaaaagaaccaaggatatgtctacatagaactgccgcatggaaaaagtaatttgatcaaatacatgtatcttgattaagaaaatatgtgatctttccaagtattttatcagttttcttttctagtcttttcactccataaaagtggtttccattcttattgtttttacttactaatttgattaaaagtctccggcacaaaataggtttcacgccataaagtattgtatttattgctgaaattaacattttaaaattaatttcaagtctttgcaggggcaaagacttacaaaagtaaataattatgtaaatcttaacctgtaagataatttttttcttgttatttttttgtcatcccatttaatctttacttttaaagaaattatattgctaatgtaaaatttcttccagccactttttgaagtgaatccttaggcaagataacaaccttttaaatgtgtagaacaatttttttttttaatgtaggctttatataggtgagtttgcatatatttctgcatcgttttccaacatctgtcttaccttacaaaacaaaactctgggtgtaataattgtgaaattgcaatgttatttcagaacattcttttagcagcaaatgggaactcagagagtcagaaacagaaaagatttctgtgtaagcccactggtctcattcctatgtgacaggtgtctcttttggtgaagtctgctagtcagtggaaaaccaggatatcatcatcctgccgtgaatgagcctctcccagtggaactcgcttatctgcctctgtctctgactcctactagactccaattctcactcaccatgagaattgacaggaaagattaattcagagatatatttaacctcacttttaatcctagatcagccttctatttgtgggtttgttcaacgtattatattaacatagaactaaattgcattttataaggctttgggatgtagaggataagggcaatgtcattacatggttttattcattctaagtactagaatttaactctaagagtcaaatagagtacatttggtctgattactatgagataggcatcattcaatactatatataataaatatcangcttttattaagacaacaaaaggatttgttaaaaatgagttcctgaactaaaagctcaaatatgtacaattatatactcaacacacatacacacgtactcagaaatatagtcatatataaaatgttcagcaagatattttcttgtagcttgggaattggcaactagaatttaaaaaaaaaaaaaaaaaaa

SEQ ID NO: 1310 - DNA, 738 bp, Macaca Fascicularis
  misc_feature (1)...(738): n = A,T,C or G
actcgctagagattgtcatggccagaggtcataggtcacttcaggtagcaagacccctggcaaactaggcacttggcctatgtactgatttgtggggtggtggcaggggcatggggtcctccaccctgcctgaatcctctttggcttctatgctctgtacactgctgtccccaagagctcgctcttatcatggcagggggtggggattggtcctgctttctttctctggaaaggaaagcctccaagaccctannnnnnnnnnnnnnnnnnnnnnnnnnnnnnnnnnnnnnnnagcaggcaggccttaaagcttcacctttggtctatcctgcagaggtgttcagttactggcacaggggactaggggtatgtagagtatatgaggaggcagtatggctgcgcaggagccttcatttcagcttcaattaataaagaaaattttatgatagctctatagatgctgaaaagataatttggtaagatttaaaatccatcccttattaaaactcttagtaaattaagtctggaaagaaacaccctaatctagataaaggtctgtttcagaaaccaacagttactggcattctgaagannnnnnnnnnnnnnnnnnncccattaaagtcagaaactagccaagggcatgctattattcagcaatgtcccggcactactaacccctgcaacaagccaaatgaggaaaataaggaagaattataattgtcattatttgtagacaat

SEQ ID NO: 1311 - DNA, 538 bp, Macaca Fascicularis
accatgtactgtatttaaaaaaaaaaaaaaaagttacctagtgtcacacttgctgtgttaattaacaaaagacgttgtgtgcggtctcctgtatcggtgtggatccagcagctctccagggagtcacattgcatgggggttgagttgacggttcttgttgtgatatgtaaacccccgagaccaaacttgagggtttatttagggttttctgtttgtccttttgggtttttgtttcacttcgttttggtaccgtttctccatttacagccaaatcagtttcatgatgttcaaaacttttactgatgtcaaatggaggaaaggaacagaaaaaaagatttttacaaagtaataaaatttaaaactgagctgtttaatgttgctgtttttacctgtctgttcttgtccaaaagtggaacattcccagggagaagaggaaggttccactcggttccttaagtcgccaaaagccccagcccaggattcagtacctcccctgccccccgaattcttgcagcactatttcctagttggttgatgc

SEQ ID NO: 1312 - DNA, 776 bp, Macaca Fascicularis
  misc_feature (1)...(776): n = A,T,C or G
tcacagttagactacctcagaatgtagtcaagattcacccagtnnnnntcggatgtcccttccctagagggaaaggctggggaatgttgctgggagcatttccagctgtctctccaaagtggtcctaactctgccttggctatggtgcagacattccaaaaagtgttttgtacacagccctgtacatctagtgtttttggttctnnnnnnnnagtttgctaccctagcttaggttgacgttctgatgagtttctgcttnnnnnnnnnnnnnnnnnnnnnnnnngacctgcagagcttcaggctggagcaagtggacagaggaggaagccagctaagccaaatctgtcacnnnnnnnnnnnnnnnnnnnnnnnnnnnnnngcggatctgggcctgtttgcaggaggccattgcctaccctctctgcacagtgagccagcggccatnnnnnnnnnnnnnnnnnnnnnnnnnnnnnnnnnnnnnnnnggttactgcccacccttaccccacccctcagctcagcctggtgtggaaggccaggtgcacgttggtctttgattgttctgtcctcacagcagagccagctttccccccatgttgctgctttcgctgctcatgctgctcattgttttctcttccttgtctttccaaattgtttccttgaaatgcttgtttccaatttttcttagattatgtttctaatttttattccaggtatttnnnnnnnnnnnnnnnnnnnnnnnnagaaaaccccaataatatcttgctgtattatcac

SEQ ID NO: 1313 - DNA, 736 bp, Macaca Fascicularis
  misc_feature (1)...(736): n = A,T,C or G
catcagggacccgctcttcccggcggggccgcaacccagaggccgcctcccggccgccgtgggcattcatcagacagcgcggatctcgctgggagaagtgcggatttctggcctttcctctcatcccccgtcttctggttggaacatcattcattaccagcaaaaccagacagatcacggcattgctcggggaagtgagaagtactgattttctggctggtttgtctaaaaccttctccaaagtggtgcttcctggagggggctgcccatcgaaggggtgggcaggcggtgagtggcctggatgcccgggtcagcgtctgtatcgcactgcagtttgtctgtgaagtcctnnnnnnnnnnnnnnnnnnnnnnnnnnnnnggccccggagtggctgctggaagcgtgcatggtagcgggcgggctccaggcaggatggctgcgctcccccacacccctagctgcttgctggggctgggcactggtttctccagaggccgccacggtgaagacccctgtcccactgcaacgagcagcacctgtgccgcctcgcctgggaaccatccttcagcccctcagaccccgcgggctcgagatgaacgtcccttccagagagctgcgtgggtcccnnnnnnnnnnnnnnnnnnnnnntcaaacgagtgactccccacactccacttataaatctttgtaatggtatttacttctaggagaaaaagccgatcaatagcagagctt

SEQ ID NO: 1314 - DNA, 739 bp, Macaca Fascicularis
  misc_feature (1)...(739): n = A,T,C or G
aagccactgnnnttcctcgcgccccgnnnngatgnnnnnnnnnnnnnnnnnnnnggcggaacaaaagaaaacgaacctaaatctgcacctggagctcgagccaaagaccgctcaattcagttnnnnnnnnnnnnnnnnnnnntagttggaggcaaaaggggacccctacacatgtctttatcggtagagccccttgagccagctcagagatcaggaaccagaaggactcggctcatcactcactgagagccaagtctgcactctggtggcaaggaaactgaggctcagaaagagagcaagtgcttggctctgcctcacaccgtgctacagctaggctagaatggaacaccgctcagtttccttgtggcctggcctcaatacagcccaaggcagcggccaggctggcagaggtgaaaggtgttgagcagctgtgcagtggctgcttggagccctgcagtcctgcagcccgcttgggtcacagacactttcagttgggctctcctcctcttagaaagttaatctttaccttctctttttttctctgacatggagatcggggtgcctgtcttcttccctggtggtctagtggctaggattcggnnnnnnnnnnnnnnnnnnccgggttcaattcccggtcagggaacannnnnnnnnnnnnnnnnnnnnnnnntgggaagatttgatagaggaatcacacaggtgatgattaaaatgcagaaatatgntcctagcagcaata

SEQ ID NO: 1315 - DNA, 571 bp, Macaca Fascicularis
aataggagaccttggtttccagaatatctagagtgggtgggcatgattccagtcaatgggggaccgcccgtgtctaagcatgtgcaaaggagaggagggagatgaggtcattgtttgtcattgagtcttctctcagaatcagagagcccagctgtagggtggggggcaggctcccccatggcagggtccttggggtaccccttctcttcttagcccgtccctgtgtgcggcctctccacctctcacccactccctcctaataccctatttaagtagggcttgccccacttcagaggttttggggttcagggtgctgtgtctccccttgcctgtgcccaggtcatcccaaacccttctgttatttattagggctgtgggaagggttttttcttttttcttggaacctgcccctgtttttcacactgccccccatgcctcagcctcatacagatgtgccatcatggggggcatgggtggagcagaggggctccctcaccccgggcaggcaaaggcagtgggtagaggaggcactgcccccctttcctgccccctcctcatctttaataaagac

SEQ ID NO: 1316 - DNA, 726 bp, Macaca Fascicularis
  misc_feature (1)...(726): n = A,T,C or G
gcagtgcagatngnnntagcttnnntnaccttnnnnnnnnnnnnnnnnnacggtacagnnnnnnnnnnnnnnnnnnnnnnnnnnnnnnnncggatggtaaatttcagatnnnngnctatagagggaaagttcctgtggtggtgagttacagacctgccaagggagtcctgcagccagacaccctgtccattgctagccatgcatcactaccaaatatatggaccgcgtggcaagccataacccccttggtagaggaactgaatgtcctacttcaggaatggcctggactgcactacaccgtgcacattctctgttctaagtgccttaagagaggatcgcccaacccacatgcttttccaggggagttgctgagtcagcccagaccagaaggagtggcagagatcatttgccccaagaacggcagcgagcgagtgaatgttgccttggtttacccacccacgccgactgtgatcagcccctgttccaagaagannnnnnnnnnnnnnnnnnnnnnnnnntgatgtttgtggctgtggaatttccatggagaaaagagagcatctgaacacctggaccatttttnnnnnnnnnnnnnnnctctgcactccccccagcgtgttctgtgaacttgagtgacnnnnnnnnnnnnnnnnntgctttttggaagattggggaagaggtggggagggggtgggggggaagcatgggcgagaagatggagcaaat

SEQ ID NO: 1317 - DNA, 821 bp, Macaca Fascicularis
  misc_feature (1)...(821): n = A,T,C or G
cgaatatcagttcagcgtggaccaacttatggagctggccgggctgagctgtgccacannnnnnnnnnnnnnnnntccccccacgtccnnnnnnnnnnnnccccctactgtcctggtcatctgtggcccggggaataatggaggagatggtctggtctnnnnnnnnnnnnnnnnactctttggctatgagccaaccatctattaccccaaaaggcctaacaagcccctnnnnnnnnnnnnnnnnnnnnnnnnnnnnnnnnnnnnnnnncctttccttggggaaatgccctcagagcnnnnnnnnnnnnnnnnnnnnnnnnnnnnngtggtggatgccatctttggcttcagnnnnnnnnnnnnnnnnnnnnnnnnnnnnnnnnnnnnnnnnnnnnnnnnnnnnnnnnnnnnnnnnnnnnnnnnnnnnnnnnnnnnnnnntcaggatgggacgtggagaagggaaactctggagggnnncagccagacttgnncannnccctcacnnnnnnnnnnnnnnnnnnnnnnnnnnnnnnnnnnnnnnnnnnnnnnnnnnnnnnnnnnnnnnnnnnnnnnnnnnnnnnnnnnnnnnaccagctgannnnnnnnnnnnnnnnnnncaccgcgtgtgtctatcgtctgcagtgagggaaggtgggtgggtattcttcccaataaagacttagagcccctctcttccagaattgtggagtcctggannnnnnnnnnnnnnnnnnnnnnnnnnnntggtggaaatcagggagcaaccctggggattgggtnnnnnnnnnnnnggggtaacacaacgggcaagaggtgctta

SEQ ID NO: 1318 - DNA, 767 bp, Macaca Fascicularis
  misc_feature (1)...(767): n = A,T,C or G
agatagagagcagacaannntttngcatagggtgtagctgggggcgggtacacatctatgtttgtgcccnnncattaacaatatgtttgcaggcagtatgctcggtaaaatnnnnnnnnnnnnnnnnnnnnnnnnnnnnnncacaatgcactgtggaaagccacagggacctctgcccaagaaagcctgggtattgtccgaggtttcccccactgagacagcctgagatatggcttcgtgggaaaggaaagaccttaccatctgtggggaaaaggaagagagatcagcctgttactgtgtctatatagaaagaagtagacataagagactccattttgttctgtatttgtgatgctgttaatctgtgaccctacccccaaccttgtcctttgcaagagacatgtggtgcggtgactcaaggtttaatggattttgggctgtgcaggatgtgtctttnnnnnnnnnnnnnnngaaggtagcttgctggttaaaagttatcaccattctcttaatttcaactacccagagacacgtacacggccgaaggtcgcagggacctctgcctaggaaagctaggtattgtccaaggtttctccccatgtgatagactgaaactatgctgctaaaannnnnnnnnnnnnnnnnnnnnnnnnnnnnnnnnnnnnngcattttccttnnnnnnnnnnnnnnnnnnnnnnnnnnntgttcatatgtcttactgccgatttcctcttttttctttgatcctattgtcctgccactcccc

SEQ ID NO: 1319 - DNA, 709 bp, Macaca Fascicularis
  misc_feature (1)...(709): n = A,T,C or G
ttaangacagagnnnnnnnnnnctctgtagccaggggagggacgacactgttagatgtgaggaaaggaagtgccaaaaatgcctggacagatggctcgtcctgagcccaggacacacactttaaaatcccagcattcacctaagcaagtacttctcaaagatcttacagaaacacagagtcaatcagttttataaaggaaggctgcagggagagaggaggcctgggggcctgggtgaagaggcctaggacctgaagagactccagcgagtctcagaaagcccaggggacctgtcaccatctgagcacttcccaggctcaatgctcagccggagtttgctggtggacctcaggattcgaagtgtgtgacagacagggtgctcttgctgttcagggcggccccgtgcaggagcactagctcaccctcaggcatctcggactggagggccagcagaaggtcagcaacttactcttaaaatgattgtttcagatcatattgatctctttcctttttccttttgtcctttcactgtatgacttgaatcagttttgattctatttgtaagtgtttcttgtcatgaggcacctgccatgtctgttgcgttttcctnnnnnnnnnnnnnnnnnnnnnnttcctgggttttcacccctcctgcaggcactgtggggtcctgagggnnnnnnnnnnnnnnnnncctcttgctgcatgat

SEQ ID NO: 1320 - DNA, 1772 bp, Macaca Fascicularis
tttacatcaacagtaagagtttgttgattgaaaagtatttttatctcttccacttactgaacaatgcagaacaaatgacatcccctggtcttagttgctttatataacaaatgcattagaaaaaaattgagtcaaaagacctggttcagaaccatctcttccatttcttgggcaatcctaagcaaataatttaacatttccaggtcttgattgctttatctctatgataaacgcattagacaagatcctctccaactggaacattctgcagttctaagattcttattcagacataactgagcagctctcacaaatatggtttttgcagttgatgtatcacatataattatatcaaatttgtggggcctctcttcagagcctcatcgctaaaatggcttttcctgctgagctaacttcaatatatatgaatattaggacaatttctcttggatatttatgaaattattgaaatatagtatttactttggcagcaaatggttaatattgaatgtaggttatcatttcaataatgtacccttcagaattataaaacagaacttctgaagcaagggaaattaacttcaccttcctcttgttcccacttgaaggcagaaacattaacaatatcaccaaagtggcccagagtgtactcgtttaatgtgagtcttatataactgacctaattctaccctctacactctagagaaaagtctttttggggaagagtatgtcatttctggctgttatccctgataggtgctgtaaatttgtaccactgggctatgggtaaattggcacaaggtacccctggaaggggacaggcgtgggacctggaagggtagggtatgattggagaaggaaggaaatcaccacatactgtgtgcctgtggtatgctttatataagatatctcacttaatacatacaacaatacataattttatatcattacttcccatcttgtcatacatatagtttgtcctataggtattaaatcatagagacagttctctctaattttgagaattcattctactttcattctacagagtggacccaatctgcaaaatgctctaaggctgatatcagaccaaaaaaaaaaaattgttcttctctagttctaagagagacctgctggaatattttgttctgtgtctaaaaggacccaggatcataatttttctacagcacagaatagtagagaatactgtggattctacaaaaggtctttcttataaaatattcaaactgagtttctgtttcctgattcagattcccaaagtccttctttccttgtattttagatttcatatcccgtttttaatgttctatagctcttttctccaatctgtcacaaagtctatcaaaatgtgttcagaatattttccaaaacaatcttcttttatttgtcctcaaaggcaccagcttaatctctgtcctgctggaaacacatatttgaatacttgaattgttgtccttctaagtgatccacccccagtgttgttaaggcatagcatcttgagaatggaaaaaaaaaaaaaaggtgtctcagaataatggcttttccatagaagggaaccttgaatattagagctgagataatctctgcccaaaccttatctaatagaatctttattctttttccctaagatggtcttgttatgaataaactctgttaacttgttaatagcacaaccagatttcctaattccagttatgtttctcttaaatagtcacataaaaaaaaaaaaaaaaaaaaaaaaaaaaaaaaaa

SEQ ID NO: 1321 - DNA, 1860 bp, Macaca Fascicularis
tgacagtgcacatgctatcagccttagctgagaagactgtaacactgggtgtactcaaatggctggggttcggaatcacctggagacaggtctggtgcctaggccaggatcagcggcagctgtagaacagaacgtctgtatgtggccggggcttcctcacatcatggtagcctcagagcagtgtgacttcctacttgatgggtagaactgcagagaagagtgtcctggaggacaaaacagagctgtgtggccttttgtgaaatagccttggaaatacgtagtttcatttctgccatatttttgtggtcaaaggagtcacaagctcagatgtaagggatggggacatagacccccgactctcaatggcaggggtgtcacaaaacgtgtgaccctgttttaaaaccaccacaggccccctctccttagcattccactggccctttatcccggaaacctcgggaaattgttgttcctaattatcttctttagttctcctctcccatcccttcctcaatccagttcaaggatgagggcctagaactccacctgtgtcctgttccctcttgaatctacaggtcgggcaggaaagtgaagggtgaggctggcatgtgtacaagtgccagtggagggcgctgtggctgactggaaagcccctgtacgttctaaaggacagctgttccaaacggaggtgggaatgaagtccttgtgtttccagatttcccattttaatgtgaaattaaatattgaaatgttgcttcgcagtgttttaaaagcataccatgagatctgggtttatgctgttgtctgtgtcctggctctgagcccctctttgaaagacccagaactctaaaacaaggcagtatttaagattgcacattatgtttatccccagaaatttccacattggggtcgggaatgcccttccttctttaaatacttctttctttaaatcatatttgcaaagaattcttgtaactgagaatctaggctctcaataaatagacctcatccttccttcatccacacatgaatggcagcattttgtgcattaattatgtgtgtgatgtctctaagctgaattggctgaggagcagaactttcatgattagctgtataaaaaaaagagagcttcaattttgacgctaaggcttgcttatcttttctattctcagcctttctcaatgtttgttagaatttaaacttgtcctaagcatgacaacatctgttcagaagaaaaggggcatagtatatgtttatatatacacaccttaatttagtattggggaccctccagttaccaattataagtataaagactaaatcaaagttatagaaaaatagacaaaatgaacagtgaccaagagaagatttaagaaatctgaagctaaagatttatttttctgcctgccctccttgaagtaattattaactaagtttataaatagcctccttcctctgagaagaaatgtccaagtgacaccaaacaggctgcggcgtgctgaatgctctcccgtttcattttgaaactcgagcttttgtgaagactgtcgttgtgcatgcctctgtctcccctcattaccacttctgggtggagccggaagcaggacagatgcagatagtcctcatttcaaccacaggaattgattttaaaggtgacactgtcctctagtaacgtggctgataccctgtaggggtaaaattagctgtgttttctgtgcaggtgaaatgttagtgatttttttgatattctgtacagcactcactgcaaaatgcattgtaagatctaaacacctgcagctgattgtggaagactctttattttttctttaccctaacttaaaaaaaaaaaaaaaaaaaaaa

SEQ ID NO: 1322 - DNA, 747 bp, Macaca Fascicularis
  misc_feature (1)...(747): n = A,T,C or G
accaggcttgggcttccccagnnnnncccacgtgcaggtggagctctgggatgctatgtcggggcggcaagcggtgggccaagggctgagtaggctagcacgggaggcaagggtggtatgggatggggcaggggtggtctagggtgataggagagcagggaatgggggaacttgagggtggggggagggcacttggagccctgtcaccatcccaggactttgggcaagtcacccgcactccctgggcctcagtttccccatctgtaatatgatggtaataatacttcacctacctcacaggggaggttgtgaggccaccatcacctgacctgagggtcaagagagaaggtgctacccgtgagcaaagtgtaattagcgaatcctgacagcaaggcccacctgcccctccccctcagagcctccagagctagccgaggccaacccaggcccatctgtctcttcactgtgtcgcaggccccttcatgggcctcatctgccatctttgtgggtgccctagacttagtccttatcttgtcctggtttcctttcttgtggccatctccccacgaaagtgctgtataaattccacctgccccaggacccccacacctgccctccggcaccagatgccagggaagggacagaggaaaacagccacaaacaagccaggggcctcccctgagtcccccaggggtggggatcggtggccactgtttgtatgtccttgagtgcnnnntgttttataaa

SEQ ID NO: 1323 - DNA, 2078 bp, Macaca Fascicularis
agtgctacctcgcccacctgcgccgccgcctgcaagtcccaggtgcgtagcgtcccgtcctgtgaggccgacaccaccagggtcgtgttaggcagcacagccatagccgtcaccgggcctgtgggaggggtgcaggtcactcggctgactgaaggcgggggagccttcaacctatgttgcagtcagcgcagcaaggcctggccagagctgcagagatgctggacagcctagagcggctggaggcaaaaggccgaggctcggggtgcagagaattcagagcacctgtgtggcccacgaacaccatccggatctgccagttagcctcccacaccttcacggtgctgtcccgggaagctgtcaccattgcctctacttcctcgcagtaagccaggtccgagatggtgctacaagtggggaatgggagaagcccaacggacttaacatcgccttgtgaaggccctgtacccctacatgcctggccctccttagggggattccccctcacgttttgtgcagatcccagcgcacatctaccagagtccaggcatgcagatcgaaagtgagcacagccgagccataggccgcgaagcagcgcaggacgtggtggggaggaaccggccccacagccagacgcatgagcctgcccgttgggctcgggggcgggtgcagtggtgaccctcgcagcactaggcggcgaccacctgagcggaactgccagagcgccaggctgctgtccatctccgccacaagcagcagcctgaggtcaggcaccggcaggcagcaggtgggcgcccaacccggggccctgcccacccgcggctcgctcagccatagcaggctgaggttgggcctcagaatggccagccccgcggggccccagcctacaaaacggcccacggcacccagcgggcccaacacggtcaccagccccgtaagcccgacaggcgccagcagcgtctcctgtgcccagccgtcttccttgtgcaggtgcaggcggcccgcgccgtccagcaccacgaagcgtccgcccaccgggtcctgcgccactgagcgcagcccggctgccacctccaggcggcgcagtggctccagcccatgcgtcaggcgcgccacgcgcagctcgcctctcttctcctgtgggccggggtgagcggacccgccgtcaaaggttggggctgctccggcctagggaacccctaggggaaggaccggatcccgaaagaggcctggaggcacaggacgggcacagcgcaccttttccaccacctcgtggaggctggtgcgcagaagcagccacagccggcgggcgcgggcgcgcggggtcaggctttgccactgctggctgctggtcagaaagggcaggacctgcgacggctccgtgaaagtcaactctgcgggcgggaactggaagttctgccacctacagcctcaggtccccgaccctgacggttatggggagccctcctccaggggccctgccctgccaggcactgcccaggggagtttcgttccaggggatggaacccaagcccgagtgagacccacttcctggcggatgcccgtgggacgaggccaggacccctcaccattcttttcagtgagcagcccagggtctgggacatcatagacatctgcatcatacaggtccgagtccagaactaggttgtagccttctgcctcccacgcctctgcctccatttctgcaactgcggtcccagaacccaacagctcccaggacttagcggtcacggccggcagcggcagttgctaggataccagatgccgctggccactcccacaccgcaggccccgcccccacatcgcatccaggtccacactaagtcacagaaacttttattggaaagaaatgagctgcagcaaagtgacactcagtgcacgcggccaaatgggcgaggtgggggtacaggtgggcaccaggggctggcccaagaccagagctggtgaccgccggggcctgtttgcggggcctccggccacagaccctttgggctggagtgtgcaggcccagtagaaatacaaaaataaactctgtggtccagctaaaaaaaaaaaaaaaa

SEQ ID NO: 1324 - DNA, 758 bp, Macaca Fascicularis
tattgtcagttatgtgcctcagttttgtcttagggactgagggacagaaagagaataaaggaataccttggtgttttcctttgtaagcaatcacagcagaatgctagaaaacataaaatatactcttataaattgtatgtgtgttgaaaccaaagtgtaaagaaattgtcaggtatttggaggaagaaaataatttgtaaaataagctttttaagaatttggattttgtacttatttaaggtgctaaatatgtgttaaaatatcccctcttgaatcagctccaggcttaaaagggcagagtggtttggattcttgtccagggtctggaaagagctcatcttgccgagagggaaatgaatgtgagctttgaggcagtctaaccacccagcttttagtatttatgttccccaaaatgtaaaaactgtaagttattcttgaaaatgtagtccagacattacttcgatcatggattttactgcaatttcatcttgggtttgttgaatgtgcagtccatttattgccctgtcttgcttaaatattcttgttgagaacagctggaggctttgactgggttcctagttctgttttctgggaaggcaacatgggttctgttttgtagacattaatgagctttaaacgggaattgggggatgtatgttctttgggcatgctgagaagcagcctcctgtggttctgggcccaaggtgtgacatacatttcccactaattgcttctctcaagaagcaagagattggctg

SEQ ID NO: 1325 - DNA, 2402 bp, Macaca Fascicularis
ataaaaaagaggaggtgggcctgacagcctggtgtgtttttggagtacagagtgggaaggggtatgagggaagaagtcttttagaggttgttacatgccaactcattcttctaaactttgtttgcaatacacaaaggagaaaataagtacttggcatggcagaagcgtggagtctgtatggcgtggtgtgggaaggcagggaccagatcattgaagatctttgtatgtgatattgagagtctagacattatttttaggtgtttggctgttacttttactgaataattttagatagggaagttatatgatcctatttatatttcactgccataggattgatcagaggggggctgattagagactaaacaaagcaaaaggcagttgtactagtctaatctgagaaatgatgaaggcccaaattaaagtggtaagaaatagaagatacatttctcgagagatgagagtttagtattaacagaaggcagcaactaggactaactacctaccatgtttatgtgttctgccacctcgtacatctcatcctgtagtgaagttttcctgtacagactgtgaaccaatggttattgataaacttccttttgacaaatatgagttggaaccttcaccactgactcaatttatcctggaaaggaaatctcctcaaacttgttggcaggtgtacgtgagcaatagtgcaaaatatagtgaacttggtcatccttttggttacttgaaagccagtactgcactgaactgtgtcaacttatttgtgatgccttacaattatccagtccttcttcccctcttagatgacttgtttaaagtgcataaagcaaaaccaacattgaagtggagacagtcatttgaaagttatttgaagacaatgcctccctactatctcgggcccttgaagaaagctgttaggatgatgggagcacctaacctaatagcagacagtatggaatatggacttagttacagtgtcatttcatacctcaaaaaactgagtcaacaggccaaaatagaatctgatcgagtcattggatctgtaggcaaaaaagtagtacaggaaactggaataaaagtccggagccgatcacatggtttatcaatggcgtataggaaagattttcaacaactcctccagggaatttcagaggatgtccctcacagactgctagaccttaatatgaaggaatacactggattccaagttgctttgctgaataaggatttgaagccacagacatttagaaatgcttatgacataccaagacgaaatcttttggatcacttaacaagaatgagatctaatcttttgaagagcactcgcagatttcttaaaggacaggatgaagatcaagtgcacagtgttcctatagcacaaatggggaactaccaggaatacctcaagcaagtaccttctccactaagagaacttgatcctgatcagccgcgaaggttgcatacatttggcaacccctttaagctggataagaagggtatgatgatagatgaagcagatgaatttgtggctggacctcaaaataaacataaacgacctggagaaccaaatatgcaagggatccctaaaagacgtcggtgtatgtctccactactaagaggcagacagcagaatcctgttgtaaacaatcatatcgggggaaaaggaccacctgcacctacaactcaagcacagccagatcttattaaacctcttcctcttcataaaatttcagagaccactaatgattcaataatacatgatgtggttgaaaatcatgttgcagaccagctttcatcagacattacaccaaatgctatggatactgaattttcaacatcttctccagctggtttactggaacggccaaccaatcatatggaggctcttggtcatgaccatttaggaaccaatgacctcactgttggtggatttttagaaaatcatgaggagccaagagataaagaacaatgtgctgaagagaacataccagcatcttcactcaacaaaggaaagaaattgatgcattgcagaagccatgaagaggtcaataccgaattaaaagcacaaataatgaaagagatccgaaagccaggaagaaaatatgaaagaatcttcactttactgaagcatgtgcaaggcagcttacaaacgagactaatatttttacaaaatgtcattaaagaagcatcaaggtttaaaaaacgaatgctaatagaacaactggagaacttcttggatgaaattcatcgaagagccaatcagatcaaccatattaatagcaattaaaagaaaatagaatgtgaaaaaaaaaaaaaaaaaaaaaaaaaaaaaaaaaaaaaaaaaaaaaaaaaaaaaaaaaaaaaaaaaaaaaaaaaaaaaaaaaaaaaaaaaaaaa

SEQ ID NO: 1326 - DNA, 743 bp, Macaca Fascicularis
  misc_feature (1)...(743): n = A,T,C or G
gtttagtttaaaagactggcaactgggnnnaagcattagaaaactctaaagttctgacttcaatcaacggttagtgtgannnnnnnnnnnaactgtatactgtgtattgattatatttgtttttattcctttggaattagtttgtttggttcttgtaaaaaactgggaatttttttttnnnnnnnnnnnnnnnngtgttctcttaaaataaggtaatgaatggcttgcccacaaatttaccttgacaatgatatcatcaacatgacttatctcaaaaaaaaaaaaagaatgcttcatagttgtattttaattgtatatgtgaannnnnnnnnnnnnnnaaattatannnnnnnnnnnnnnnnatagatcataaatctgacaaggaaaaagttgcttacccgaaatctaagtgctcaatccccgagcctcggcaaaacagctcccctccaagggaaatcttatactttattgctcaactttaattaaaatgattgataataaccactttattaaaaacctaaggtttttttttccttagacatgaccactttattaactggtggtgggatgctgttgtttctaattatatctatttttcaaaccttctgttgtatttggagtatcatcatggttttgccttaactctttaaattgtatatatttatctgtttagctaatattaaattcaaatatcccatatctaaatttagtgcaatatcttattttgtcttttgtataggtca

SEQ ID NO: 1327 - DNA, 697 bp, Macaca Fascicularis
  misc_feature (1)...(697): n = A,T,C or G
aagcgaagcacacggatgannnnnnnnnnnnnnnnnnnnnnnnnnnnnngnnnnnnnnnnnnnnnnnnnnnnnnggaatcccacaggatcattaaacagcaagggctcgtggacgggctttttctcctccgtgacagccagagtaatccaaaggcatttgtactcacactgtgtcatcaccagaaaattaaaaattnnnnnnnnnnnnnnnntgannnnnnnnnnnnnnnnnnnnnnnnnnnnnnnnnnnnnaacaccaaattctctgacctgnnnnnnnnnnnnnnnnnnnnnnnnnnnnnnnnnnnnnnnctgccttgcaaactcaagcaccactgcatccgagtggccttatgaccgcagatgtcctctcggctgaagactggaggaagtgaacactggactgaagaagcggtctgtgcattggttaagaacacacattgattctgcacctggggacccaaagcgannnnnnnnnnnnnnnnnnnnnnnnnnnnnnnnnnnnnnnnnnnnnnnnnnnnnnnnnnnnnnnnnnnnnnnnnnnnnnncagggtcgcctccctctgcgtcggccaaattggggaggnnnnnnnnnnnnnnnnnnnnnnnnnnaaataaactggaatgatcattttggcttgggccgcttaggagcaagaaccggagagaaatgattggaaatgaactcttgccctgg

SEQ ID NO: 1328 - DNA, 807 bp, Macaca Fascicularis
  misc_feature (1)...(807): n = A,T,C or G
tttgcagaagaacactgttatagtttagaaggcntnnnataaatcccctcataggcaaagatgaaaacttcccactatttttttcccctcttaggaagacatactggaaagaaaatgtttaacatcttagtgtagtatagctattgtaaacagttcatgactagattttgattcggaaatctatactgaccaaggattaatcttaaggattgtataaatcattaaagctgtggtcttttcatgtggagattgatagaaaatatttttgtcccatgtcttatttgctgactttttctgtcaatgagtgagattgtgaacaaactgaatatataggctatagcaagtagctttacagtacagatcttacaattaagttttactttttgttaaagtgtgtaccattttttcgtttggagtaagacaaaaattgttttcacataggttccctagggtatacttgctctagcatactttaaaggccactgttgcaaagtctacattttatactgaatctgcattctgtcaggcacgcatagaaagacctcagtacatgctttgcactctcctttgctccctttttccaatttcttattgcatatcattttgttgtaatacagaaagcagcatttttaaatgtcctagttaagaattggcccaccggtaccaactcaacctctattttgtcagttcatagttgaagattttgttttatttcaaaaataaagtacatttttgaaataatgagtttcagaataaaataatctcacttttaaattaagtgatccatttaaaatttgtaatcaataa

SEQ ID NO: 1329 - DNA, 706 bp, Macaca Fascicularis
  misc_feature (1)...(706): n = A,T,C or G
tgtaatgttcntnnnagggnnnnnnnnnnnnnnnnnnnnnnnnnnnnnnnnnnnnnnnnnnnactaaagattgcagccttgatgttagggaatgcctgaactagagaattttctgcattatctttgtctgttcactttctatcttatatacttgtcaggactatactggtaagctttgaagttttccgtgtgtaggaggagttagagggaagttgaaagccaacatctggatcaatgtaatgtcaagatcacaaaaagagagactccaggggtcctctgtgagaggtggcactgttggggaccttcctgattcattctgcctgggctttgctagcctnnnnnnnnnnnnnnnnttttcttccactgcctgaaagacttgggttgaactctaattgttggagagagatgttcctccttaatcatgaaacaccttaggaagaagtctataatgcaatccttagtcctaccctgaacctatgagtcctctaagtcaggccctgatctagtgcagtaaagggaagggtgggnnnnnnnnnnnnnnnnnnnnnnnnnnnnnnnnggaggacttaccacattaggaagaaaggaactccccatgatcgctcctgacccttgtgtctcatgtaccctatcctagtggaaatgatcctgtttgatatgctatcccttaaaataacnnnnnnnnnnnntgtcccttaaaataact

SEQ ID NO: 1330 - DNA, 203 bp, Macaca Fascicularis
tgcggcctctaagggtcatcagccgggccccgggcctcaagctggtggtggagacgctgatctcgtcactcaggcccatcgggaacatcgtcctcatctgctgcgccttcttcatcatttttggtatcttgggtgtgcagctcttcaaagggaagttttactactgcgagggcggcgacaccaggaacatctccaccaaggca

SEQ ID NO: 1331 - DNA, 1395 bp, Macaca Fascicularis
tactggaaggaggctggagagaccaggatccttcttccagctgaacaaagtcagccacaaagcagactagccagccggctacaattggagtcagagtcccaaagacatgggcttgttagagtgctgtgcaagatgtctggtaggggccccctttgcttccctggtggccactggattgtgtttctttggggtggcactattctgtggctgtggacatgaagccctcactggcacagaaaagctaattgagacctatttctccaaaaactaccaggactatgagtatctcatcaatgtgatccatgccttccagtatgtcatctatggaactgcctctttcttcttcctttatggggccctcctgctggctgagggcttctacaccaccggcgcagtcaggcagatctttggcgactacaagaccaccatctgcggcaagggcctgagcgcaacggtaacagggggccagaaggggaggggttccagaggccaacatcaagctcattctttggagcgggtgcgtcattgtttgggaaaatggctaggacatcccgacaagtttgtgggcatcacctatgccctgaccgttgtgtggctcctggtgtttgcctgctctgctgtgcctgtgtacatttacttcaacacctggaccacctgccagtctattgccttccccagcaagacctctgccagtataggcagtctctgtgctgatgccagaatgtatggtgttctcccatggaatgctttccctggcaaggtttgtggctccaaccttctgtccatctgcaaaacagctgagttccaaatgaccttccacctgtttattgctgcatttgtgggggctgcagctacactgatttccctgctcaccttcatgattgctgccacttacaactttgccgtccttaaactcatgggccgaggcaccaagttctgatcccccatagaaatccccctttctctaatagcgaggctctaaccacacagcctacaatgctgcgtctcccatcttaactctttgcctttgccaccgactggccctcttcttacttgacgagtgtaacaagaaaggagagtcttgcagtgattaaggtctctctttggactctcccctgttatgtacctcttttagtcattttgcttcacagctggttcctgctagaaatgggaaatgcctaagaagatgactccccaactgcaagtcacaaaggaatggaggctctaattgaattttcaagcatctcctgaggatcagaaagtaatttcttctcaaagagtacttccactgatggaaacaaagtggaaggaaagatgctcaggtacagagaaggaatgtctttggtccccttgccatttataggggccaaatatattctctttggtgtacaaaat

SEQ ID NO: 1332 - DNA, 395 bp, Macaca Fascicularis
aagaattaaattcttttctggtgacacacacttcctgtcagaatgaggcacacccagccagacaaaaccacccaaagtaaatgaagaaaaatccttctaattcctctaggtccgcagatttagtttctgctggattgttgccattttcccaggggctaagccagaggtgggtttggggaacagcaaataagaacaattcactaataagggtaacaccaatggcatgaaaacatccactatctattatctccagttaaaattctatattcttatagaagcaattcattctcatcatagaaaactcagaaagctaccaaagtttgtgtttatagggtttttttgtaaaaaggaaaccaaaatctctcagtctaaactataatcactgttaacatttg

SEQ ID NO: 1333 - DNA, 705 bp, Macaca Fascicularis
atcaaaaacaccaagcagcagaacaatgccgcccttgagagaggcctaaccaaggctctaaagaaattggatgactacctgaacacccctctaccagaggagattgacgccagcacttgtggggaagacaaggggtcccggcgcaagttcctggatggggatgagctgaccctggctgactgcaatctgttgcccaagctccatgtggtcaagctttctttttgttgaaaacaagggggcatggagtagaggaagaagcaagcagaagaaatggggagaagctggagaaagaagaaaaaaatgggattctttctactgaaatttctaaatgtggaactcattgtctgtactggctttgaggcagaaaaaaaaaaaaaaaaccctaagagtttaaatatttgttgaagtctggatttctccctgcacccatccccccattccctctagtaaaattaaagctgaagctagcagttcacgtctagctcttgaaatgtcaccaggcaacactgctattattctgattttctgggcaacgcccgtcggttccctgctgcagttcaattaaactaactctgcctctcgcagatctgacctgacagctgcattgaatttgggttcattgggtgatttatcgggctgggtgatgtacagccaccatgatttaggagtgcaaaaaaactctggaatgcaccaaaaaagcaatat

SEQ ID NO: 1334 - DNA, 675 bp, Macaca Fascicularis
agccatttttagggggaggcttttctctaccgtatcagtttcttctgtgttcattgtcttttaagattttccagatcttcttgagtcaataattgatatcttcttagaagattactttcttagattagattttctaatttattttaataaaagtatatacacatagtaagcctctttgaaatcattaaaatctgttttctattttctgatttcaatattttacactttctttttgccttaaacttgctaatggtttttaaaatttttcttctttctaccttttttcagtctctttccttccctctaccccgtctcaattgaatgattaatttgtttttatttgttcttgttttaagacatgttatttaatgccacatatttcctttgattgaagacagtttgaatttaatttttttttcctttttaagaaagaagcatttgggtcgggcgcggtggctcacgcctgtaatcccagcactttgaaaggcaaaggtgggcgaatcacgaggtcaggagatagagaccatcctgggtaacatggtgaaacccgtctctactaaaaatacaagaaattagtcgggcacggtggcgggcacctgtagtcccagctactctggagtctgaggcaggagaatggtgtgaacctgggaggtggagcttgcggtgagcggagat

SEQ ID NO: 1335 - DNA, 915 bp, Macaca Fascicularis
  misc_feature (1)...(915): n = A,T,C or G
aggccgccaggccctcagcgtnnnnnnnnccgggctccctctgtagatctgttgnaagccaaactccccgccttgctggagagagtccggtgacnctgctgcgggatctaactgtagccaggcgtcgccccgccttgaaggtgaagtctacctcctggctgatgcctctctaccttgtattccgggagcgaaagctacaaccgtgatggaagtnnnnnnnnnnnnnnnnnnnnncttgaannnnnnnnnnnnnnnnnnnnnntcagcttctcaagtctccttcatcaaaaggtcnnnnnnnnnnnnnnnnnnnnnnnnnnnactgagtnnnnnnnnnnnnnnnnnnnnnnnnnnnnnnnnnnnnnnnnnnnnnnnnnnnnnnnnnnnnnnnnnnnnnnnnnnnnnnnnnnnnnnccacctgtggcaaccagaaatggcccagacatttcctcatgcttgacttttggtgcctagggtcctcttctcctggttacggggaacttggtgtgctcgcactgagggaaagtgaaggacgcgtggcgtctccctgccttggccttcctgccttggtgcctgtgctccccaccatcctgcaaagaggaaccctgggagctagtggaggtggcaggggtttggttcctgcctgctgccaggcggccttgcccaggggatgggtcccagacctgagagcaaagctctgttctctaaagtgcattgtagttgactgcatcttgtgccttactcttttggttgattttcaaattttgtaaaagcaaatttgcatctattttctcttttacttnnnnnnnnnnnnnnnnnnnnnnnnnnnnnnnnnnnnnnnnnnnnnnntgtagtgtatnnnnnnnnnnnnnnnnnnnnnnnnnnnnnnccattctgtctttgtatagttcgtgt

SEQ ID NO: 1336 - DNA, 764 bp, Macaca Fascicularis
  misc_feature (1)...(764): n = A,T,C or G
agaccctgcagaaggttcctcatgtgtgctngggcaaccttgcctcnatnnnnnggccccagttcctgccactcacgtgcagtcagcaannntacatgaacnctgcggtnnnnnnnnnnnnnnnnnnnncccagtgtttgataatgacgagatatgcatgaccaaggagactgtgtgatgtctgcacagttcgaaagcccgcattcctgttactttccaatctcaggtcagcattttggaacttttctgctttaatttttccacacacacctctcgctgccaccacctaacaaagcaaacagaaagtttgagcaagaatttacatctgggaaaatgcttctactcatcaagagtggaattcctttttacacctataattgattcacagcttcaaaaagctgtgaagtcatactttggtcatggaagttgcaggagaccatatttgccaacattttattttaaagaaggtatttaaaactattttacatattaaccacgatttctagaagtgaagttataaaaatcagaagttgtattttaccttttgatgataagtgaaaagagattgctccaagaatgttgttttcaatacattcagtataactgcaacacaaaaattctgcatacaggcttcatatacacacattaataattttatgtatttgagagttgtataattaattttaaaaatgcaacaaaaaatgtgaggttaagtctactttgccaataatggaagtgtctcatagataattttgaatacaata

SEQ ID NO: 1337 - DNA, 1050 bp, Macaca Fascicularis
  misc_feature (1)...(1050): n = A,T,C or G
ggaacaggaaaataaagtatcagtatacatggtgatgtacatctgtagcaaagctcttggaagaaaaggaagactgaagaaagcaaagcaaatactgtatagagagatttttcaaaagcagtgatccctcaattttaaaaaaggattgaaaattctaaatgtctttctgtgcatattttttgtgttaggaatcaaaaatattttataaaaggagaaagaacagcctcattttagatgtaatcctgttggattttttatgcctcctcagtaacgagaaatgttttaagaaactaagtgtttaggatttcaggacttaacattatacatggctctgaaatatctgacacaatgtaaacattgcaggcacctgcattttgtgtttttttttttccaacaaatgtgactaatttgaaacttttatgaacttctgagctgtccccttgcaatttaaccacagtttgaattaaccatatcaaatctgttttaattttttaaactgtacctcagagtctatatttcaagggcatattttctcactactattttaatacattaaaggactaaataatctttcagagatgctggaaacaaatcatttgctttatatgtttcattagaacaccaatgaaacatacaacttgaaaattagtaatagttgtattttagaaaatcccatttctaattggagatctctttaatttcaatcaacttataatgtgtagtactgtattaagtgcacttgagtggaattcaacatttgactaataaannnnnnnnnnnnnnnnnnnnnnnnnnnnngcaattatctctggtgacaaaagagtaannnnnnnnnnnnnnnnnnnnnnnaaatannnnnnnnnnnnnnnnnnnnnnnnnnnnnnnnnnnnnnatctgtcttcactgtttataatagggatggattttctttcaaatcagtgtatgttttgaggtcttatgtaattgagagaaatggtggcttttttttgctacctctttgttcatctaagcaccagtaaagatcatgtctttttatacaagtctagattt

SEQ ID NO: 1338 - DNA, 725 bp, Macaca Fascicularis
  misc_feature (1)...(725): n = A,T,C or G
ggaaaaggcaaaagatnnnagaggatatccactcattttagaggatatccagacggccactaagcatgaaaagatgttagctttattagtaatcagggaaatgcaaatttaaaacaccatgtagtactgctacccatcnnnnnnnnnnnnnnaaatgaaaagcatgaaaaagcatccttttggcaaggatgtaagcaagaggaactgtacgctactggtggaattgctcatccataaaaccatttttgaaagctggcacttaaaaccaagtatacccttttacccaaacccagcaaaaaggcatgtgtctccaccaaaggacacgcagaatatagcataaaactgcacaaaacagaactatcttaaggcacattgcaatggaatgaataaacnnnnnnnnnnnnnnncatggaatactgtaaaacagcacgaatgaactagaagttcatgtaataatgtagctgaacttnnnnnnnnnnnnnnnnngaaagactccagacacaaaagcnnnnnnnnnnnnnnnntccttctgtataaattataaagacgggcaaaacttgtctatgtggtttgaaattaggatagcggttagtcttggccaaggctgaaagggggcatttatatggtgctgggaataatctgtttctaaacctgggtgctaaatatctgagtgtgttctgagctgtgcacttaaggtatgtgtatttttctgcatgtgtgtacac

SEQ ID NO: 1339 - DNA, 654 bp, Macaca Fascicularis
  misc_feature (1)...(654): n = A,T,C or G
gnnnnnnnnnnnnnnnnnnnnnnnnnngattaagcctgatcaagatgacaacctcccaaaagnnnnnnnnnnnnnnnnnnnnnnnnnngggggagaagccagtggggagcctggctgggattggtgaagtcctgggcaagaagctggaggagagggnnnnnnnnnnnnnnnnnnnngtccttggccagttnnnnnnnnnnnnnnnagatgaagacctnnnnnnnnnnnnnnnnnnnnnnnnnnnnnnnnnnnnnnnnnnnnnnnnnnnnnnnnnnnnnnnnngccttcgagagtggtgtgacgcattcttgtgatgctctctgggaagctctcaatccccagccctcatccagagtttgcagccgagtagggactcctcccctgccctctacgaaggaaaagattgctattgtcgtactcacctnnnnnnnnnnnnnnnnnnnnnnnnnnnnnttctcccctaaccatttcaacttttttggattctcgctnnnnnnnnnnnnnnnnnnnnnnnnnnnnnnnnnnnnnnnnnnnnnnnnnnnnnnnnnnnnnnnnnnnnnnnnnnnnnnnncgtccctcaccccccaccctcactttcagtccgtttgataccatttggctcctttttgggcagaacagtcactgtccttgtaa

SEQ ID NO: 1340 - DNA, 782 bp, Macaca Fascicularis
  misc_feature (1)...(782): n = A,T,C or G
agtgcaaggttgtgactgtagctcactgcagcctcaaactcttgggctcaggcgatcctccctcagcctcccaagtagctgagattacaggcacatgccaccatgcctggctaatttattttttgaagaggaggggtctcactcnnnnnnnnnnnnnnntcttcaactcctgagctcaagtgatccctggcctgggcctcccaaagtgctgggattacagcaccttgtgatctgtnnnnnnnnnnnnnnnnnnnnnnnnnttgcactcaagaagcctttcgctaagactgttcttgtggaatttgcaaagtgatatttggaagcccttggagggctatggtgaaaaagaaaatatcctcagataaaaactggaaagaagctttctgagaaactgatttgtgttctgttaattcatctcacagaggtacagctttcccctcaagaagctgttcgctaagactgttcttgtggaatatgcaaagtgatatttggaagcccatagagggctatggtgaaaaagaaaagtatgagccactgtgcccagcctgatatacaatttctttctgnnnnnnnnnnnnnnnnnnnnnnnnnnnnnnnnnnnnnnnnnnnnnnnnnnnnnnnnnnnnnnnnnnnnnnnnnnnnnnntttntcagcgattctcctgccnnnnnnnnnnnnnnnnnnnnnnnnnnnnnnnnnnnnnnnnnnnnnnnnnnnnnnnnnnntttnnnnnnnnnnnccggggttttgtcatgttggccnngctggtctcaactcctgac

SEQ ID NO: 1341 - DNA, 785 bp, Macaca Fascicularis
  misc_feature (1)...(785): n = A,T,C or G
atcatggacannnnnnnnnnnnnnnnnnnnnnnnnncnagtgaacttctgcaactgnnnntgacnnnttagaaaataccaactgtgagaaggatttaatttgcctaatgttaaaaacctatcatctnnnnnnnnnnnnnngaggattttgtcagattttggtttggaaatcgttttaattgaatatttagtcataatagactttatgaactaannngatttaatcagtttaaaaacctctcattaccttcttagattaaagaagctaatactcttttgagatagaaggaaatattttgtgggacatgtgacttttgtgttnnnnnnnnnnnnnnntcttggccgatgtggagaaagtgcaaacttcagtagaatcccggtcttttcatccaagtgctnnnnnnnnnnnnnnnnnnnnnngcaaggaaccatacagaaaccaaagagctcgcttttttgtctttgtaattccttagggtctgtgatatatgccaggaaatctgattgaaactaatatgctttttattctcnnnnnnnnnnctaaattgttatatcacatgcacttgcctacactgggaaagtaagaacaaataatgcccatttaatgtaacttgcctgtattttnnnnnnnnnnnnnnnnnnnnnnntgaactgctgacttaactcagttttaagatttcctctttccccccagcttttccacatttcttaaatgagggtacaatttactacaaacatgtacatttaatataatattgctgttagattcatggtacactttatgaa

SEQ ID NO: 1342 - DNA, 755 bp, Macaca Fascicularis
  misc_feature (1)...(755): n = A,T,C or G
tgctgcaaaaggtaaatggtatttnntttnagtattggcgttctttacnnnnnnnnnnnnnnnnnnnnntaaatgccttggtttcttttcaaagttcatgtaatatttctgatttttcagaatatttgcaataagagtctggattttaaaaaacacacacatacacacaattaagagctcatgtcttagcaagatctgggaaaccaacattgcaagagtagctatttggaaagaataattctccagaagttaacatctaacatctagtatcaccaaacagtatcactgttctcttttgttcatctgatatggaataaatataattatgtaactaacaattgtccaaatagatgagagagcaaatcatgtgagaaaattcagaataccatctgtttcatagccacacagattttggactttcacaaacattgggaactaaatttagaattggcaaaagtctagaagatgggtatccaaacagaagacattccnnnnnnnnnnnnnntaaagaggtgtccctccaaagtgnnnnnnnnnnnnnnntgaacttggaaattaggttctactcacttggacatccctgcatcatggactgttgctgctccctgttccatatgctcgcaatctcagctatttggaagccaccaggaatgctttctnnnnnnnnnnnnnnnnnnnnnnnnnnnnnnnnnngaaattttgtatttttgtataannnnnnnnnnnnnnnttttatataacaggtcctgttacaa

SEQ ID NO: 1343 - DNA, 1742 bp, Macaca Fascicularis
  misc_feature (1)...(1742): n = A,T,C or G
agatttgctgggagtgacagccctaggaagctaatgatctctccaggaaagaattgaccacagttatccagaaactgaacacgatgtagaacagagaggacagcccctcggatgtcccgaagatggcatattcataaagatatcttccgatgattgtgaacatctttacctgtgggtgccaggccgggccagtgacttcgtgttgagctgaaggaacttgtctgccgcttccctgaaaacctttctttcctaattcatgagccagcaagatgcagtcgctgcactttcagagcgccttctcatagctgcgtacaaaggccaaacagagaatgtggttcagctcatcaacaagggcgccaaggtagcagttaccaagcatggccggactcccctgcatcttgctgccaataagggccatcttcctgtggtccagatcttgctgaaggctggctgcgacctcgatgtccaggatgatggggaccagaccgccttgcaccgggccacagtggtcgggaacacagagatcatcgcggcactcattcacgaggggtgtgccctggacagacaagacagggatgggaatacagccttgcatgaagcatcctggcatggtttcagccagtcagccaagctgcttgttaaagcaggagccaacgtgcttgccaagaacaaggcggggaacacggctctgcacctggcctgccagaacagccactcccagagcacgcgcgtcctcctgctggccgggtcccgcgctgacctcaaaaataatgcaggagacacctgtttgcacgttgctgcgcgctataatcacttgtccatcattaggctcctcctcagtgctttctgttctgtccatgaaaagaaccaggctggagacacagcacttcacattgctgctgccctaaatcacaagaaggtggccaaaatcttactggaagccggagcagatacgaccattgttaacaatgcaggccagactccgctggagactgcccgatgccacaataacccggaagttgctcttctccttactaaagctccccaggtaggatttactgccctttccatggtactgattatgtggggctacaaagttgttgggactcctggttgcaatctactgaagccacttcaaacgaacttacatagggaatgtaaccaggcactggaggtgtaggcatccatggggcccaggatgacaggagtcaaaggcttcaagtccagctcttcacgcctgggccgcctcgtcttctccctgtggctggatcattgtctcagccagccgcctgggtcataacttcccaaatactcagccgaggaagaagttccagtgtaagacattacaggagagggccatgattgcagagtttaggccaaatgcccatccctgaagaagtgggacagggactttaagaaggggcttcccagccnnnnnnnnnnnnnnnnnnnnnnnnnnnnnnnnnnnnnnnnnnnnnnnnnnnnnnnnncacgaggccagnnnnnnnnnnnnnnnnnnnnnnnnnnnnnnnnnnnnnnnnnnnnnnnnnnnnnnnnnnnnnnnnnnnnnnnnnnnnnnnnnnnnnnnnnnnnnnnnnnnnnnnnnnnnnnnnnnnnnnnnnnnnnnnnnnnnnnnnnnnnnnnnnnnnnnnnnnnnnnnnnnnnnnnnnnnnnnnnnnnnnnnnnnnnnnnnnnnnnnnnnnnnnnnnnnnnnncaaaaaaaaaaaaaaaaaaaggccaca

SEQ ID NO: 1344 - DNA, 785 bp, Macaca Fascicularis
  misc_feature (1)...(785): n = A,T,C or G
atcaatattacatggtttgaatatgaacagactgcatagatttagagtactcatattatcttcatgttaatagtgaaatactgaaagctttacttttgagatttgtaatatgacaaggatgcccattatttcacttctgtccacattttcctggaagtcctagccaatatggtaagtcaagcaaaaaagtaaagtataaggtttaaaagaagaaataaaattatcattatttagataacatgactgtatccatagaagatccagtcatcnnnnnnnnnnnnnnnnnnnnnnnnnnnnnnnnnnnnnnnnnnnnnnnnnnnnnnnnnnnnnnnnnaagcacctgtattcccagctactttggggggtgggggatggggactaagacaggaggatcatttgagcccaggaggttgaggctgcagtggactgagatggttccactgcaccccagcctgggtgacagagcaaaaccctgtctcaaaaaagaaaggaaaatccagtgatcatataaattcttggaattaataagagtttagcaaagttactggatacaaggtaaataaacaaaaatctattctgtgtctctatactagcaaaagaaaatggaatttttatccgggcaaannnnnnnnnnnnnnnnnnnnnnnnnnnnnnnnnnnnnnnnnnnnnnnnnnnnnnnnnnnnnnnnnnnnnnnnnnnnnnnnnnnnnnnnnnnnnnnnnnnnnnnnnnnnnnnnnnnnnnnnnnnnnnnnnnnnnnnnnnnncaggcgcctgtaatcccaact

SEQ ID NO: 1345 - DNA, 722 bp, Macaca Fascicularis
  misc_feature (1)...(722): n = A,T,C or G
ggagggtcacngnnncccaccccaggtacctccaggctgagtcacggggtgatgaggagttggggccctgtctgtcctaggcctggagagtgcctatctaggaaaaggtcactggacctggaagggtccccagggtcccctgactcctgtctccannnnnnnnnnnnnnnnnnnnnnnnnnncaccaggcgcaaactgcttccgctgttggccatcccttccccagccgcaggtgtcactgcccccaggactgtccagggccggggcctctgagaggcagaggggtatcctcaccaggtcttggtggaagagccagggggctggtcccagaataggcggtctcacaagcacgcagcacactggagtggacgcctgtgcccacctgaccctggggtgtggccaagagccagctggcaccacccacctagggaggctgaggaggaggtcccctgggcacagggcctctttgggacttcagaggaaatctcccagccccaccctcggagggttaagagaagacctcctgcagctgtgccgcccacacctctaggtcgccagagccctggcccacagcccccagcaagcctgagccagggaagaaccagaggccctcccgagagacccagtcacacgtctctgctttaagccttagccagctagtgacgagtacaacgagataacgcccatgtgtttggaacatttatgtaagattgtctatataa

SEQ ID NO: 1346 - DNA, 674 bp, Macaca Fascicularis
  misc_feature (1)...(674): n = A,T,C or G
tgggtaacatgagactgggacntatggggccacgttcccagacagttatggtattctgagtcacagggtgagacaggcggtcagcacaagatacaggtcataaagaccttgctgataaaacaggttgcagcaaaggagccgcccaaatgccaccaaaaccaagatggcgacgagagtgacctctggttgtcctcactgccacactcccaccagcgccatggcaatgtcaggaagtcaccatacacggtgtaaaaaggggaggtatgaatcatccacccctcgtttcgcagatcatcaagaaataaccacaaaaacagagaaccagtggtcctcggggctgctttgtctatgcagtagccattcttttttttttttttggnnnnnnnnnnnnnnnnnnnnnnnnnnnnnnnnnnnnnnnnnnnnnnnnnnnnnnnnnnnnnnnnnnnnnnnnnnnnnnnnnnnnnnnnnnnnnnnnnnnnnnnnnnnnnnnnnnnnnnnnnnnnnnnnnnnnnnnnnnnnnnnnnnnnnnnnnnnnnnnnnnnnnnnnnnnnnnnnnnnnnnnnnnnnnnnnnnnnnnnnnnnnnnnnnctgacctcatgacctgcctgcctcagcctcccaaagtgccgggattacaggcacgagccaccacgcccggccagagtagccattct

SEQ ID NO: 1347 - DNA, 807 bp, Macaca Fascicularis
  misc_feature (1)...(807): n = A,T,C or G
ctgttgctgacagttcattnnnnnnnnnnnnnnnntgtgtaactctgccttgttctgtggccatcttcttgctcatgttattnnnnntgggaatgagcagtttgacttctgttatcacgttcctcattctgtcagctctacgtgnnnnnnnnnnnnnnngctggcttaatatgtctttgtgtatgggtagtttgtagcccgagaatatttacctaaaaatgtctaaaaagccaccaagaacgtttatggggtatagggatgtagttaacagagtgctaatctctcctcaaatgtccttgtggaatgcttccccnnnnnnnnnnnnnnnggtaggagcttttctttactttgaatttctttagttggacggaacgattcttcctcacagacagcgctttgcagctttgatagagaacatcgtgtccagtctcttgagtnnnnnnnnnnnnnnnnnnnnnnnnnnnnnnnnnnnnnnnnnnnnnnntttcttgtttttgcttctctctattttcaaaattagtcatcttgttctgtgtataagaaaatttgacaagctgtgcgacagtttaatagtctgatctggcaacactgatttttgtttggaaatattttgtgttttctttgaggaggatataattattgctatcctaggatgtgaaatttctgagnnncagtatgcatattttaaagaaaattatgattaatctgtataatgtttttggtctgtaaatattataaaaaataaaatcaatctttggttgtaactggttaaaaaccnnnattatagggatatcacactatcttata

SEQ ID NO: 1348 - DNA, 679 bp, Macaca Fascicularis
acattacccgctaggctggcttctttggactccctatgtgattgatgatgtgaaaacctaaattacttgcaacatagtgttacttctttgatgttctcattagcataatgttatttttgaaaaggaaagatactatcacataagttttcctcacatccattgtgatatacaccaatggataaactaacagaaactgctttttgacattaaaagacatgagaaattatatttaactaagtaaaagttaagccagaattacttgggtgatgtgattcaatttagttaaaggatgataaagagaaaatacattatttagcattatttcttcagctataatgaattgctatagaaatcaggcagatctttctaatgtgtattgattggtctttgcagctactgtgaacagattactaaggccatctcctcatctctaagggagaaaaatagtctgtagatgaataatgtaaggtaaagagttgcatgtaagtctttataattatttactttaacattctccagaattcagacatgatttcagcatggtgttagatttgtgcattttattttcctgaccacctcattccagtcaatgtatggttatccactctgtgtgccaaaaccaatcatgcctttagttcagagaagttctgcactgatttttagtctcttgctgtctcaa

SEQ ID NO: 1349 - DNA, 768 bp, Macaca Fascicularis
  misc_feature (1)...(768): n = A,T,C or G
aaaaacattttttaaagaagaagccactgaacccctcaataaaggctgttgcctaagcatggcatacttcatctgttctcgtttgtgccatctnnnnnnnnnnnnnnncttttatggcgttaatttcctgccactacagatcttttgaagattgctggaatactggtgtctgttagaatgcttcagactacagatgtaattaaaggcttttcttaatatgttttaaccaaagatgtggagcaatccaagccacatatcttctacatcaaatttttccattttggttattttcataatctggtattgcattttgccttccctgttcatacctcaaattgattcatacctcagtttaattcagagnnnnnnnnnnnnnnnnnnnnnnnnnnnnnnnnnnnnnnnnnnnnnnnnnttctcttcaagcaaagtagacctgggtcactgtaggcgtaggacttggattgcttcagatggtttgctgtatcatttttcttctttttcttttcctggggactnnnnnnnnnnnnnnnngagtaattaaaatcgcttgtaaatgagggcatacaagcatttgcaacaaatattcaaatagaggctcacagcggcataagctggactttgtcgccactagatgacaagatgttataactaagttaaaccacatctgtgtatctcaagggacttaattcagctgtctgtagtgaataaaagtgggaaattttcaaaagtttctcctgctggaaataaggtataatttgtatttgcaga

SEQ ID NO: 1350 - DNA, 667 bp, Macaca Fascicularis
  misc_feature (1)...(667): n = A,T,C or G
acttccccaccccctgcagagggcaggggtcctcagggaaannnnnnnnnnnnnnnnnnnnnnnnnnnnnnnnnnnnnnnacctcagggtcctgggctggcatgggccttctgggcctcaatttccccatcaacaaatggagatgaatcacagcttagctgcctcctgggatctaacaagaaaatgagtcatgtgaggtaacttcgaggctcactgcaacgggtagggtggggtgtatcagattataaagtgggagtaccctcctcacccccaggcttggcctatacccccctctccttcatcaagtggccggtctgtgtctgtcctttggggtggtgacactgtaggccatgagaaatgggcagtctgggggtcagaggccaagggtcagggaggcaggacttggggagagagtgagaccctcagaggagaaggaagtttataaaaccacattttgtgtggagatggaggctggaggcccagccctgggacttggtctggggttccttgaggaagatctgagggtctgagagaggaaggatgccnnnnnnnnnnnnnnnnnnnnnnnnnnnnnnnnnnnnnnnnnncctaagacaggagagcaatgtcctcgaaggttccccgggaggccagttaggaaaccctttgctgcttctgtctctagctc

SEQ ID NO: 1351 - DNA, 768 bp, Macaca Fascicularis
  misc_feature (1)...(768): n = A,T,C or G
atgnnnnnnnnnnnnnnnggatgctcaggtaattgttatgaacagaacactttaggaaacactaattttcaagttaatattgaccatctttgtcaggnnnnnnnnnnnnnnnnnnnnaggtaattttgatctgattcccttcatttggttttgtgtcattcaggagacttcacaaaattctaatgtatgattttagaaaacagcaaattttgatagtctttagagtttttatctttgggtagcatttccaagttggcatatctcccacattaaatctatactctgtgtactnnnnnnnnnnnnnnnnttagaaaatgaacccgtannnnnnnnagatcaggtttttaaaacctttaccatggtgctaaggctgcttgtgtttcctaacggtaattctacctgcctttctgcaggtagatctgtttctgaaggtagatctgcagaatccaacattacacatacctttactcannnnnnnnnnnnnnnnttgctgaattactactggnnnnnnnnnnnnnnnnnnnnnnactcgatattggatcgggctgtccttatccaagtattttacataacctctattgataactgggaagtgcagcaagttgctggtaagatgtgccattaacatgttaacagtgtgtaactacagagcttttatggatcagaataagcgggtaatactgtannnnnnnnnnnnnnnnncttgcaagttgctttgagcatattgaaaatagtcatggaatattgtaacaatgatattgaatgaat

SEQ ID NO: 1352 - DNA, 186 bp, Macaca Fascicularis
ttaaaatacacttttttagaaaaaagcactctttgtagtgagcacagtatggtgtcttttgttctgaaattaaaaatgataaccacagaaagccctttctctaattcttctactgtcacatacacgataatatgaagataatatgacaatatttaaatattaagaggtactagggaaataaaagaa

SEQ ID NO: 1353 - DNA, 865 bp, Macaca Fascicularis
  misc_feature (1)...(865): n = A,T,C or G
catcaaagccctggggagcggacgctgagtgccctgctcactggaagagccgcccgcacccgggcctccgtggccgtgtcatcctttgagcatgccggcccctcccttcccggcctttcgccgggagcctgctccctgcctgcccgcgtcgaggaggaggcnnnnnnnnnnnnnnnnnnncaaatttccctggccccagaaacacttgactcttctggagatgtgtccccaggaccaagaaacagccccagcctgcaaccccccaaccctgggagcagcactcccaccctggccagtcgagggatcttagggctatcccggcagagccatgctcgagccctgagtgaccccaccacgcctctgtgacctggagaagatccagannnnnnnnnnnnnnnnnnctctcagcacactttgggctgggatggcagtggggcataatggagcactgggcgatcactgaatttcttccctctgcttcctggacacagaggaggtctaaggaccannnnnnnnnnnnnccaccactatctctagtccccctagcttgatgccttctcctgcaggagccagagcagccacattgcttgccttcataccctggaggtggggaagttacccctcttccagtgctttcccatcctgggccactgtatccaggacatcactcccatgccagccctccctggcagcccatgttctcctcttttctcaccccttgactttccctgagaagaatcatctgtgccaggtcaaccggagttcccggtgactccattctgaggtgtcacaagaaatgaagctatgcaaactataataggagggtgnnnnnnnnnnnnnnnnnnnnnnnnnnnnnnnttactgt

SEQ ID NO: 1354 - DNA, 768 bp, Macaca Fascicularis
  misc_feature (1)...(768): n = A,T,C or G
tgattattaatcagntccttcaagtctttgagcatnnatggtgcaggcctggggctgngtcctggggaggtggcttctccctgaacttaaggtaggtggggcggggcaggccaggccaggcgcannnnnnnnnnnnnnnnnnnnnnnnnnnnnnnnnnnnnnnnnnnnnnnnnnnnnnnnnnnnnnnnnnnnnnnnnnnnnnnnnnnnnnnnnnnnnnnnnnnnnnnnnnnnnnnaaatacaaaaattagctgagcatggtggcgcacatctaatcccagctgcttgggaggctgaggcaggagaattgcttgaacctgggaggcagcgattgcagtgagccaagatcatgccattgcactgcagtctgggcaacagagccagactcccatctcaagggggaaaaaaaaaagtaggtggggcatctagtcaagaaaatgggtaattacagtaggacttccagagagtcgccttctctacccaggaactagggacatgtcctaaggggagcctccctcccctctcctggttccaagcaagacatgacttagctgtgcaattgggaaccctggtccctcctccaggaagccttctaccccccaacccccactgcaggctggtgagggtgctgcctctgtgcccctcagcccttggcatgtgtccttgctattgcacccctgctgtgacctctccaggtcagggacagcatccatcacctggcacagggcctgcagtgagtagctgtcagtgaaagttggtgaatgaatgc

SEQ ID NO: 1355 - DNA, 750 bp, Macaca Fascicularis
tggtgcgatcttggctcactgcaacttgcacctcctgggttcaagagattctcgtgcctcagcctcccaagtatctgggattacaggcatgaaccaccacgcatggctaatttttgtattttccgtcaagacagggtttcaccatcttggccaggctagtctcgaactcctggcctttagtcatctgtccgcctcagcctcccaaagtgttgcgattacaggtgtgagccaccgcatctggccaggggtccagtcatattctgaaaaccagaatcccagcttccctccccactcgagtcagtgccagaccccatgggtaaagcttgttctgggaccacagtgacctcaggcacatctctgcccctgccgcggcagtcccacaccatctgtgctaggctcaccagggcgtgttgcaggtgtgggtgagcgtcaggtagcgcactcccagcatgtagaaggtacgtaagacggagaggctattgtccagcgagtggccaccctccacaccgatgaggcaggccaatttctgggtgtcattcagagctttagccgaggtcacaagctccagctcagaataggaggcacacatgcggcgaatgaggtcaatctgctccagggtgaggcgcagggcatcccggtcctgggtctggcatggaacgtaggctgaccagaactggggggaaagccaggggttggcttggacaggggctactttggagcaccctggactgctcacagcctccacagctg

SEQ ID NO: 1356 - DNA, 310 bp, Macaca Fascicularis
gagagtatcatattcaagaggagggtacccagacagtcaggagggggtcacacttttatggaaaaggagagatatgtgagataaaagacaaaccacgacaggggagtgtaaaaataaagagtaaagaatctgagtcgccccacgcggtgactgtatatatgcgagagcctcactcccgtcaaaatattcttgggggggaatatccagtgatatgtaaaatattagagacagcagaggaaaaaggagttctttctctccccaaataaaggatattcaagagaggggaaagaaaagatcacagaaagccacg

SEQ ID NO: 1357 - DNA, 735 bp, Macaca Fascicularis
  misc_feature (1)...(735): n = A,T,C or G
ctggacttagcnnnnngctctgtgatccagggcttaccttctttgggcctcggcctcnnaatctgagtaatggggaggacttcattggcattgttagtcccacaggccaaggataaggttgaaatgagatggcttgtgtgtgaaaagatttnnnnnnnnnnnnnnnnnnnnnnnnnnnnnnnnnnnnnnnnntgctggaagggactccttgctgtttatctactgctttgagccctcttgagttaacctttgccccatttgtaaaaccaccagcatcaggagtaagggggacgccagaaggctcagatggacacagaattctagctttatctgcatcagctgattcagttttctgttgggatcagagagaggatacttccatatgggtgacagcagccatgcccttgggagtcatcttcaaggatctgggacattttggtgtgcccattccttattttcctgaacccacagtcttgggatgtttctgcacttggccatgtgtgtcttgtcttatgtctgtcttctgtagctttgcctgtcagggctggagtggtgcagcccctggcatctcagacatggttcctgcctcactcgtgggagctggaccagcctgggtttcatctcccacaataaagataagccccacagaccttactgnnnnnnnnnnnnnnnnnaatgctgtgctcataatcttgtccaggatgttaagaatgtcagactgcnnnngatgactca

SEQ ID NO: 1358 - DNA, 760 bp, Macaca Fascicularis
  misc_feature (1)...(760): n = A,T,C or G
tcattcacagcttgggtccccaattccaatgctatgtttcggggagtggtttctaggagctgcctggtgtctgctgtaaatgtttgtctactgcacaagccttggcctgccccgacccaggctcaggaccgatgcctgggctgggctaggtccctctgtccatctgggcctttgtatgagctgcattgcccttgcgcaccctgaccaagcacatgcctgagaggggtcctnnnnnnnnnnnnnnnccctcttgtggcaagaactgtggaccatgccagtcccatctggtttccatcccagcactccaaggactgagactgacctcctctggtgacactggcctagagcctgacactcctaagggannnnnnnnnnnnnnnnnnnnnnnnctccaggcaccctcagccgcccatcatggttaattctgtccagcaaacacacacgggttgatcgctggcctgtgctaggtggcagggacacagatgactgacctggacactccccctgccacccnnnnnnnnnnnnnnnnnnnnnnnnnnnnnnnnnnnnctcctggagctacaggcacggggacagggagccatcattcctggctgggaatcctggaagacttcctgcaggagtcagcgtttaatcttgaccttcaagatgggaaggatgttctttttacgtaccaattcttttgtcttttgatattgaaaagaagtacatgttcattgtagagaattggaaactgtagagagaatcgagaaaaataaaa

SEQ ID NO: 1359 - DNA, 757 bp, Macaca Fascicularis
  misc_feature (1)...(757): n = A,T,C or G
gaatacatgggctttccatatttcaaagtggaagcntnnntctctgaagtcaatgtatggttttgagttactagagctttggtcaatatttccttccctgtatgtcacannnnnnnnnnnnnnnnnnngtgtgcataggacctcaaaatacaaaattagcaggaccttacagtcagcttcctagtggctagtttttcccccttatattacaatttttgttttataaatcatttttttcctgacatttccaccacttttcagtcatctgcaaaatttttctttcctcaagagttccttttgccttattccttatgcctnnnnnnnnnnnnnnnagggttttgataataaattggtaggaaaaaaagttcctcctagaaggaagccttccccgccatttccaggnnnnnnnnnnnnnnnnnnnnnnnnnnnnnnnnggtaactgnnnnnnnnnnnnnnnnggttatttttaataagcctcttcctactagaacattttattttccttgnnnnnnnnnnnnnnnnnnnnnnnnnnnnnnnnnntgcttttaaaaaatacctggaactatctttaaaaaaactttattaataatcatgtatttttactgatcacattttgaaatgcctaaaagactttattgttctaattatccagatgtacctttgtaaaatagctcttttatgaattagctgataaggctgnnnnnnnnnnnnnnnaaatattggtcatctaaaaactttctgttttctggggtctggg

SEQ ID NO: 1360 - DNA, 726 bp, Macaca Fascicularis
  misc_feature (1)...(726): n = A,T,C or G
gtttggttggagcttgtgcttaatgtaaatacatcattcataattagaatggacatgaattattttagtaataaacacaggataaatgacttnnnnnnnnnnnnnnnaagtctgtttttatttgatgatgtgtacatattttaagctgtaattctgtgattggtactgatttttatggttggtttttttatattttgtttaagcagaggagtggaatatggggtcaaaatcatacaagaagttgccatgagtgtttcttatttgatttttttattgtggtaaaatatacataacagtcaccattttaaccatttaaaaatatacacttcagtagtggcattaagtacattcacatttttgtgcgagatcaccactatccatctccaggactgtttcatcacctcaaatggaaactctgtacccactaaacaataactcctccccattccacactccagctcctagcaaccactattctactttctgtctctatgaatttaaatgtgactattctaggtacttcatataagcagaatcatacaatatttgtttttttgtcctggcttatttcactcagcaaaaagttttcaaggttcgtccatgctgtagtatttatcagaatttcctcccttttaaggctgaataatattccattgtatgtattacacattnnnnnnnnnnnnnnnnnnnnnnnnagatatttggattttttctaccttttggctg

SEQ ID NO: 1361 - DNA, 2360 bp, Macaca Fascicularis
  misc_feature (1)...(2360): n = A,T,C or G
tggagtagtagctaatgcacaaatgtacaaatgaattcatagtttttattctttctgtaactacttaaaaagcatcattttacatatatctcaaaacattcataatattagcacttattaggggtttactgtgtaaaagataggagaagatgagtcaaacatgagtaatgccttcaatctgggaggggaaataaatgacataaaagaattaatagagggctgtgagtcatttgagtattcagaaagagtaggaggcggaaagggctccagaagtgtggctgatactgtctacccagtgtttatttccccattttcccttgctaatggaagacggacttcatacataatgacaaagattctgcctaaatcctcagttttctaaggtttcattgtatctatgaatgactctttaatatagttctggccaaagagctggaaaaggatgttttctgggggtttctgggaaagttgcttactttctcaataacataggacagatattgctgactccatccttccccctctcatctacctttgaatgtgaatgcaatgcttacagctggggcagccatatcaacacccatgagggcaataaacaaaaggatgaagaaatggaaagatagagagttcttagggcccaaatgatctctttgaacatctggaacaatatcaataacctgacttctgaacttcctattgcaggaggacaaattaactctattacctaatctactactagaatattctgttgcttgcagctgagcactttgtgcttattctcttctgtaaatatgtatttcttcaatgactatttcttcaacacatttttcttcaagtttctattaagcacctatgtgtcaggctctgttaggcactagaaatacaaatataatgatgccacccttaatttttctctgtgagaatacctgatgattttgaagatactcaaatggagaacaacagaaggactctttcctctccacctttctttcatatcaccttaactgctgtctacccctaccagctcatctgcaaaatgggactaagagacaaaaagagacaaagtgaaaatgagtctaaaagaaggctaatatatagattacacatgcctcctccccattctcccagaagaaatggaaacaaatggacactctgtaagagaccaggaaagccagtgcagctcctttatccctcctcacatcttgcaccaaagagcacactctccgagctgtggagcagctgtagaatctccacccagaacttcataatggacccatttggggaaaagatttgttcacttgtgggcatactggttatagatagaaaggtgtcattaagcaagtcctcaaacctgaggccctaaacttccccttagaccttgctgcactcaggcatatccagtaagaaaagcatggtcatgagaagtgactgggaaacattcttactctatgtgggtgagagcatgtcataggaatactctggactcttccgtttcttgttgtttccaccatcttaaaagcaatggttatctgacaaatgctgtgttaaggctctgcccttggacttgtccaagtttgcacagcaaaggcagggcaggatttgaatccaatgttaaagccccttagtattttgggaaatgagctgaacacggttttagtcttggtatcaaatctcgggatgtaatccagtcaagaactaccttttggtggctgggtgccgtggctcacgccagcactttgggaggccaagatggcggatcacctgaggttgggagttcaagagcagcctgaccaacatggagaagccccatctctactaaaaatgcaaaatacaaaaattagcccagcgtggtggcacatgcctgtaatcctagctgctcggaaggctgaggcatgagaatcccttgagcgtgggagacagaggttgcagtggcccgagatggcaccactacactccagactgggtgacagagcgagactctgtctcaaaaaaaaggttagtgaaaccaaaactgagatccatttttcaggacttgaccaagtttgcacaacactggcagggcaggatttgaatccagtgctaaagcccctgtcctgcatctaattagcccattatcgttgcttcttgctccctgtgcattccagaagtacagaggctgctaacaggcagctaaggggctgaattctaaatttttagatttagtggattttaaaacagtcttcaaaaatcaggagaagccgagctcaannnnnnnnnnnnnnnnnnnnnnnnnnnnnnnnngccaaggtgggtggatcactttggatcagcccaggagttagagaccatgcctgaacaacatggcaaaaaaaaaaaaaaaa

SEQ ID NO: 1362 - DNA, 723 bp, Macaca Fascicularis
  misc_feature (1)...(723): n = A,T,C or G
aggcgattccagggagagccctgatcggacaatcacatcacagatcacactgcagtttccatgttagcactgtggatgggtttttaataaaaacggggtttcttctcacccgtctctccacttgcccaaacttccaaaggctggtggttctgggacagtccttcactttggagccacaggatggggtgggggagctccgtgggcctgggaaggaaggtgctgtggagggggctgcagggctgnnnnnnnnnnnnnnnnnnnnnnnnagtggggtcagcaggagcagaagcagggtctctgtctttgggactgtcctggttggccatgggccctgtgaggatgcagggtgcttgggggctcctgtaccgttgggtggggggcatgctggcctctgagcgatcaggtgaggccagcnnnnnnnnnnnnnnnnnnnnagcaataagaaggggggggggtccctgggagcttccagcccaggctagaagcccccatggcttctnnnnnnnnnnnnnnnnnnnnnnnnnttggggtgattttggtcatgacagtgtgcctgtcccactgttacacgcatgaatgggggttatggggtgggggtggggactcagggctggaccgatgtcctagtggacctgatgtgaaattcctgtcaaacacacaccacttttaaatnntttgntaggagtatnnnngtattgaaagtttctaattatgcttttaaaa

SEQ ID NO: 1363 - DNA, 723 bp, Macaca Fascicularis
  misc_feature (1)...(723): n = A,T,C or G
tctttcctttattcattatcagcgccaatgaagcaaagacccctggcaannnnnnnnnnnnnnnnnnnnnnnnnnnnnnnnnnnnnnnnnnnttaagcaacagactcttccacaagacagtctatctgcagtcagccctgagcagctccacttctnnnnnnnnnnnnnnnnnnccgcatccatcacctgccaaacnnnnnnnnnnnnnnnnnnnnnnnnnnnnntgccatccaaaggggatgggcgggattggaannnnnnnnnngcagctcttttccctgttcacctccccctgccagggaaggcaggacccactctgccaagggccctctgcgtattcccttctctcagaggaatgagatannnnnnnnnnnnnnnnnnnnnnnnnnnnngttccctgacaccagtgtgtggnnnnnnnnnnnnnnnnnnnnnctgaaagnnnnnnnnnnnnnnnnnnnnnnnnnnnntagcatttgccagtccctgtgcctggactgatttgaatactttgtttttctccctgtgccatttacccttccacctttccatcctgccttctaccacccttggatgaatggattttgtaattctagctgttgtattttgtggatttgttatttttgttgtttttcnnnnnnnnncatacattggatatgggaggtaaaggagtgtcctagttgctcctggtcactccctttatagccattactgtcttgtttc

SEQ ID NO: 1364 - DNA, 794 bp, Macaca Fascicularis
  misc_feature (1)...(794): n = A,T,C or G
aatgaaggagagaaatagnntgtattaagatgtggcaacaaagatagagctgagctagttcattaannnnncaggtgcagaatacttagagtccaaagaaatgttgagtggacttcattagacgcaattgtctttaccctgaaagnnnnnnnnnaagcctaatttccagcattttgaaagagatttctttttgtttcttnnnnnnntgccctttttaaggcacagagttgctccacaccactgggtggagaaagaaagattgcgaaccctcgaccatccttttgaggctacgttctatgttatttgnnnnnnnnnnnnnnntatcaataataacaatgctatataatacaaactgcccttgtgttagttaaagggagcatttttaatcattcagaaattttcgtgacatgtaaagtgcagttgtgaggaatgtgtgggtgtacgaaaatgtatctgtcaagttcagagtcctttagatttaaaaaaaaaattatgacttatcaatggtgccgttatagctgtgtcagacaatgggtgtgcccattctcacaattatccttcaaaaaaatctatgttcaaatgctttaaaaatttatcacatgatacaagagtatgactttgtcagccttctagagttcttttttcttttattttctttcttatcttttccttcaaaaaatcaatgaagacttgatttctgtcaataattgtattaagggtgaatatactacctgaattttgtgcatgttgcatcgtagtagtaaccttttctaattcaggatgaatacgagatg

SEQ ID NO: 1365 - DNA, 781 bp, Macaca Fascicularis
  misc_feature (1)...(781): n = A,T,C or G
gtacatgttaaatatgtgctacatatacatttagacaaccagcatnnnntaagtatttgctctagggactgagtttggatttatgtttgctcaaaaggagacccatgggctctccagggtgcactgagtcaatctagtcctaaannnnnnnnnnnnnnnnnnnnnnnnnnnnnnnnnnnnnnnnnnnnnnnnnnnnnnnnnnnnnnnnnnnnnnnnnnnnnnnnnnnnnnnnnnnnnnnnnnnnnnnnnnnnnnnnnnnnnnnnnnnnnnnnnnnnnnnnnnnnnnctnnnnnnnnnnnnnnnnnnnnnnnnnnnnnnnnnnnnnnnnnnnnnnnnnnnnnnnnnnnnnnngtcatcactacacaggcctcctaagaggcttcctggaggttttgnnnnnnnnnnnnnctgagagatcnnnnnnnnncctttccctcttggccacattctgnnnnnnnnnnnnnnnnnnnnnnnnnnnnnnncaccnnnnnnnnnnnnnnnnacagcgtctccaacagagctccttgtgttatctgtttgtacatgtgcatttgtacagtaatttgtgtgacagtgttctttgtgtgaatnnnnnnnnnnnnnnntggctgagcaaggcacatagtctactcagtctattcctnnnnnnnnnnnnnnnnnnnnnnnnnnnnnnnnnctttatcccttttgtctcatgtttcatcgtannnnnnnnnnnnnnnnnnnnnnnnnnnnnnnnnnnnnnnnnnnnnnnnnnnnnnnnnnnnnttaatttaataaa

SEQ ID NO: 1366 - DNA, 487 bp, Macaca Fascicularis
cggggctgggcggggagaaggagaatacggaggaggaggagagggggaggagaaaggaagaaggaacaaggtgaaacaacagtccagagatgattccatttctggggaaagaggtcgacctgaggaaggcagtcatggggataaaagctcccacagatccttttccttaaaaagaaagcaggccgggtgcagtagctcacacctgtaatcccagcacttgtgggaggccaaagcaggagaatctcttgagttcaagaacaacttgggtgacacagcaagacccccaactctacaaaaaatatattttttgtgtttggttttcaagaagtgattcaaattgctgctcagattttaaaacttactgtaactatcagtgtaaagacccatgcctggatcctgtttcatttttataccaaacttggtaaataatgctgtctcttgacaccctgtcctccctatcctccctcaaaccacatgtgatctctga

SEQ ID NO: 1367 - DNA, 754 bp, Macaca Fascicularis
  misc_feature (1)...(754): n = A,T,C or G
gttttaacgatttgnnnnnnnnnntccnnnnntctatcagacctgaccccacacaaacctgtcccctcggttgtgttgaagtcccctggacagtgggcagggtggcagaggacacgagcagccactgcccgtaccccctctcctctctgtaagcccatgccctgtcctcccagggacttgtgagccttttccctcgaaggtcctcttctctccttccagtcctctccccctgctgtctgcagcccctccccggggagttggtgctttctttttcccttttttttttttccagggggagggaggagaggaaggagggggatcagagctgtcccagagggaaagcggtgaggtttgaggaggggcagaagcagggccggcaaaggttgtaccttcataaggtggtatgggggtttggggtcaagccctgaacatcgtcctgcttgagaatctgtcaggggaaaaagtcaaggggagcagaaggaggagccaggagggccagaggcaaagaagagatggagtcttaggggccagggtgagcgaggggtccagggcctagaggtgcttcctgggggcgggggaatgcagccagtgtccccctccccttttccaccccagctccagccctggtcttgtcttttcatccctcttccccacgacagaagttgtggccctggccatgtcatcgtgttcctgtgtcccctgcatgtaccccatcctccaccccttccttttgcgcagaccctattacaataaa

SEQ ID NO: 1368 - DNA, 689 bp, Macaca Fascicularis
  misc_feature (1)...(689): n = A,T,C or G
ctggagatctgcatggagtgctgtgggctctgcttctcctcgtgagcctctgtcgggggctgggccagccaggcaccnnnnnnnnnnnnnnnagggtccctctggggccaggcccgggactgtcacacaaggcttgagaagccccctctccctggtcctctcccactcatccatgtcctctcagaacccnnnnnnnnnnnnnnntgagggggacacttggagaggccacctcctcagccgtgggtggtgggcccatggtagagaagcctgaactctttactgggttaccagggacatannnnnnnnnnnnnnnnacaggacaacctaggggcagggctggggtgggggccgcagagggcaaccagggctgcggaacactgtgaaagttactttggggagggcgggcctgtggggctgaggctgtctacctctccctgctcctggtgcccgcctctctcctccaccgcctctctcctccaccctggggcttagaggacagcaaaatgtgaaaagagacgccccacccaccttcggccagccctctccagtctcctttcctgggcttttgtgggggcctaacccacgcagtgaccccagagggcagggctaggcgagagcctggggtggggcgggaggggaacagtatggaaaaagactggaaggggaaagggagggaagggagggagggt

SEQ ID NO: 1369 - DNA, 793 bp, Macaca Fascicularis
  misc_feature (1)...(793): n = A,T,C or G
gactctgttatgtgagggatgnnnnnaagnnnaggtgaggtggatgtggtagactgatcactgtctctcagttttagcgaggcacatggtagctgaaaagactacantncccagattcctttgcagctagatgtagccatgtgactgattctggctaaattcctgggtagaacactcaagcttaagaaagggacggcggggcacagtggcttacacctgtaatcccagcactctgtgaggctgaggctggtggatcacctgaggtcaggagtttgagactagcctggccaacatggtgaaaccccatctctactaaaaatacaaaaattagtcaggtgtggtggcatacacctgtaaccccagctacttgggaggctgaggcaggagaattgcttgaatttgggagacaggctgcagtgagtcaagatcatgccactgcacttcagcctgggtgacagagtgagactcttttttaaaaaaaagaaaagaaagggacataccttttttccaccttcctaactgtaatacagacatagtatccagccatctcagaccataaggacaagaacgacacatgggatggcagagcaacaagacagcaggagcctgggtctctggtcaatttcagggagcacagccaccataccagcccacttccatattgctatctaagaaagaaagaaacttctaatttaagccatcattattctgggtttctgtcacgtgcaacagaatttacagcctaagacaggggtctgcaaactatggccaactctagcctgctgcctgattg

SEQ ID NO: 1370 - DNA, 2867 bp, Macaca Fascicularis
tactggtactccctggctggaggcagtgctgaggctgccgtctcctccaccatcagtccaatccggcccaccctcctgcagccatgtcccggcccctgtcagaccaggagaaaagaaagcaaatcagtgtgcgtggcctggccggcgtggagaatgtgactgagctgaaaaagaacttcaaccggcacctgcatttcacactcgtaaaggaccgcaatgtggccaccccacgagactactactttgcgctggcccataccgtgcgcgaccacctcgtggggcgctggatccgcacgcagcaacactactacgagaaggaccccaagaggatctactacctgtctttggaattctacatgggacggacgctacagaacaccatggtgaacctggccttagagaatgcctgtgacgaggccacctaccagctgggcctggacatggaggagctggaggaaattgaggaggatgcggggctgggcaatgggggcctgggccggctggcagcctgctttctcgactccatggcaacactgggcctggccgcttatggctacgggattcgctatgagtttgggatttttaaccaaaagatctccgggggctggcagatggaggaggctgatgtctggcttcgctacggcaacccctgggagaaggcccgccccgagttcacactacctgtgcacttctacggccatgtggagcacaccagccagggtgccaagtgggtggacacacaggtggtactggccatgccctacgatacgcccgtgcccggctatcgcaacaatgtcgtcaacaccatgcgcctctggtctgccaaggctcccaatgacttcaacctcaaggacttcaacgtcggtggctacatccaggctgtgttggaccgaaacctggcagagaacatccctcgtgtcttgtaccccaatgataatttcttcgaagggaaggagctacggctgaagcaggagtatttcgtggtggccgccaccctccaggatatcatccgtcgcttcaagtcctccaagttcggctgccgcgatcccgtgcgcacgaacttcgatgccttcccagataaggtggccatccagctcaatgacacccacccctccctggccatccccgagctgatgaggatcctggtggacctggagcggatggactgggataaggcatgggatgtgacagtgaggacctgtgcctacaccaaccacacggtgctgcctgaggccctggagcgctggccggtgcacctcttggagacgctgctgcctcggcacctccagatcatctacgagatcaaccagcgcttcctcaaccgggtggcagccacattcccaggggacgtagacaggctgcggcgcatgtcgctggtggaggagggcgcagtgaagcgcatcaacatggcacacctgtgcatcgcgggttcgcacgctgtcaacggcgtggcgcgcatccactccgagatcctcaagaagaccatcttcaaagacttctatgagctggagcctcataagttccagaataagaccaacggcatcacccctcggcgctggctggttctgtgtaaccccgggctggcagaggtcattgctgagcgcattggggaggacttcatctccgacctggaccagctgcgcaaattgctctcctttgtggatgatgaagctttcattcgggatgtggccaaagtgaagcaggaaaacaagttgaagtttgccgcctacctagagagggaatacaaagtccacatcaaccccaactcactcttcgacatccaggtgaagcggattcacgaatataaacgacagctcctcaactgcctccatgtcatcaccctgtataatcgcatcaagagggagcccaataagttttttgtgcctcggactgtgatgattggagggaaggctgcacctgggcaccacatggccaagatgatcatcagactcatcacagccattggggatgtggtcaaccatgacccgacagtgggtgaccgcctccgtgtcatcttcctggagaactaccgagtctcactgtccgagaaagtgatcccagctgcagacctctctgagcagatctccactgcgggcactgaggcctcaggcaccggcaacatgaagttcatgctcaacggggctctgaccattggcaccatggacggggccaatgtggagatggcagaagaggctggagaggaaaacttcttcatctttggcatgcgggtggaggatgtggataagcttgaccaaagagggtacaatgcccaggagtactatgaccgcattcctgagcttcggcaggtcattgagcagctgagcagtggcttcttctcccccaaacagcccgacctgttcaaggacattgtcaatatgcttatgcaccatgaccggtttaaagtcttcgcagattatgaagactacattaaatgccaggagaaagtcagtgccttgtacaagaacccaagagagtggacgcggatggtgatccggaacatagccacctctggcaagttctccagtgaccgcaccattgcccagtatgcccgggagatctggggtgtggagccttcccgccagcgcctgccagccccggatgaggccatctgagcctccagtccagaccccaaaccagcccttgagcctgtcagaatcccctgggccagccccagtgcctcatgcagagggtggggtactaaagaaaaaaatctaagccccctcctggaagtctcattttccccacttcaatgtcccagtgtccagcgtgactaaggacacgggcccccttccatcctcgggctcccggtcccctcctatttatggggtctgaccaactgcacccactccccaataaactgatctcct

SEQ ID NO: 1371 - DNA, 661 bp, Macaca Fascicularis
  misc_feature (1)...(661): n = A,T,C or G
cnnnnnnnnnnnnnnnnnnnnnggctccaaggagaacgtgcaagagacgcannnnngaggcggtggggcctggcgggcaaggggcatggagccccccaccccggtcccagcccgggcacagcctgaccgggacccctccctcccacagcccagcccacctnnnnnnnnnnngcagggaattggggagaggtggcttccagccccatctggggctcggacccccagtgaggacagggtggggctccaggaacggagtctctggggtccttgcctcaccccnnnnnnnnnnnnnnnnngggaggggacgtgggacccaggagaagtggcgtttcctcctcgcgctccgcgtttcctcctcgctctcccgaccaagcgttcccggcccgccgccttccaggggacacaggagctttttccaggggtgtcctttcccctcggccccagacaccctccttttacggttcagtttttgcagtttgacgcccgtccctccctcccactcctccgccctcaaaactgaagagatggacacgtcgccagagctcccggccggcggtccctgtcgtcggcagagggtggcagcctccacccgccccagccccacctgccccacagacacttttgatactgaagggaggtnnnnnnnnnnnnnnnnnnnctc

SEQ ID NO: 1372 - DNA, 789 bp, Macaca Fascicularis
  misc_feature (1)...(789): n = A,T,C or G
ttttggtggggggtnnnnnnnnnnnnnnnnnnnnnnnnnnaggctggagtgcaatggcatgannncagctcactgcaacctttgnnncctgggttcnnnnnnnnnnnnnnnnnnnnnnnnngtagctgnnnnnnnnnnnnnnnnnnnnnnnnnnnnnnnnnnnnnnnnnnnnnnnnnnnnnnnnnnnnnnnnnccatgttggccaggctggtcttgannncctgaccttgtgatccacccaccttggcctcccagagtgctgggattataggcgtgagccaccacgcttggccgagaacacctaaatttttatgtttcttgactcaaaaaccagttccatttctaatgttttcttcacaagaaggctaattggtggtgagacagcaggggaggaggaagagctgtggtttacaacttgttcaactcaggcaataagcgattttagctatatttaaagtcttctgtccagctttaagcactttgtaannnnnnnnnnnnnnnagcttttctatcagaattgcagatagtcatattgggctaatagccattggatttattcctttacctcacatgatcccagcaactgaggtggtatctagaggtgaaataggcaagtgaaatggacacctctgctgtgaatgttttagaagaggaaattcaaaaaatgttgtaactaaaagcaaactacattgttgaatatgggtatcggctttctttttcactttgattcttaacataatcagtcaacttccacattaatgaaagttgaccatagttatttccaaataa

SEQ ID NO: 1373 - DNA, 750 bp, Macaca Fascicularis
  misc_feature (1)...(750): n = A,T,C or G
ggaaggtagcatannnngactcgantcctcgttctcagcagaactcgttctgtcgtggccacnnnnctttctcagctcttacctacttctgtttcataggctggtctgcaagtctgagagcaacagcnnnnnnnnnnnnnnnnnnnnnnnnnnnnnnnnnnnnnnnnnnnnnnnnnnnnnnnnnnnnnnnnnnnnnnnnnnnnnnnnnnnnnnnnnnnnnnnnnnnnnnnnnnnnnnnnnnnnnnnnnnnaaaatcctgtctacaaaaaatacaaaaattagctgggcattagctgggtgtgcatctgtagcctcagctacttggagggttgaggtgggaggattgcttgagcccaggaggcagaggttgcagtgagctgagacagtgccactgtgctccagcctgggtgatggagccagaccctgtctcaaaaaaagacaagaaagaagtatggactccaccttcttgcccttttgtagattgggaactgcctgcccttggcctctttcccgtccatctcgtattatgaaaggttgtttctggcacacccaggctcctctgcatgcttcctgggaagtgactgagggtcagaggaatggagcccctctgcagttggccgctggtatcttccctattgaacccttctttaggtttgctcgctctttttgatgggtgtctttccaaagctggctggggacctccctgattgagagacatggggctagttctgttgctgtggctacacagaa

SEQ ID NO: 1374 - DNA, 755 bp, Macaca Fascicularis
  misc_feature (1)...(755): n = A,T,C or G
agaaggctgnnntcnnnnnnnnnnnnnnnnnnnnnnnnnnnnnnnnnnaggtgtcggctcacatnnnnnnnnnnnnnnnnnnnnnnnnnnnnnnnnnnnnnnnnnnnnnccaggaagcggctgtaggcctccgagccaccctcggcnnnnnnnnnnnnnnnnnnnnnnnnnnnnnntttgtannnnnnnnnnnnnnnnnnnnnngccagtgggttgtccccctgnnnnnnnnnnnnnnagcgacgggccatgttggggccaggggtctggaggggcagggagacacatgactaggggtgggggcactgggaccactcctacnnnnnnnnnnnnnnnnnnnntggaaggggctgtcagtgacttgggtaggctgaagtttagcccatgcnnnnnnnnnnnnnnnggacaccagctgagccaggctcacagagggcaacccagactgagggacaccccaagctgaggggatactggtagagggtgggnnnnnnnnnncccagccttgtctctccttcctctgggnnnnnnnnnnnnnnnnnnnnnnnnnnnnnnnnagtttgaaaccagcctgagcaacacagcaagaccccatctctacnnnnnnnnnnnnnnnnnnnnnnnnnnnnntggcnnnnnnnnnnnnnnnnnnnnnnnnnnnnnnnnnnnnnnaggattgtttgagcccaggnnnnnnnnnnnnnnnnnnnnnnnnnnnnnnnnnnnnnnnncctgcctgggtgatagagactgcatcg

SEQ ID NO: 1375 - DNA, 295 bp, Macaca Fascicularis
gtcgtgagctctggggtttataggcacaatgtaatttccaattaatccccaatatcctggcaagcccttgacttacatgagaaacggaggccggcccgttatatgacataattaccttgggaagtttgaatttaggaaagatttcttctagaattttgttgggtagtcactgtgtgccgtttcttgccgggtggggtaggtttctacccatcatgaaaagatatctataaacagttgtaagtacttatatccagcatagtgaggttttagttcagtgaagtgtatttcccaatag

SEQ ID NO: 1376 - DNA, 716 bp, Macaca Fascicularis
  misc_feature (1)...(716): n = A,T,C or G
ttcatgatatgaggatgccccagtattaacactctgattatagttctgannnnnnnnnnnnnnnnnnnnnnnnnnnnnnnnnnnnnactaataacaattcattataaagttatgtccctctttacatcacttatctttctcactgaggttcnnnnnnnnnnnnttactcacgcaatctcagtagagtgcaacgtagatacagaacctaggagagtcaacacctggaggattttagtcttacacatacgtgtgattttaaatgaatattctcagaccacaggaaactcttcatccccctgttgtttaccagtaacagtatatcacagacctttccaaatgtttgtatatgtaatcagatgtacatttatattnnnnnnnnnnnnnnnnnnnnnnnnnnnnnnnnnnnnnnnnatactttctctcttacctgtactatatttctattagactaaagttatgtgattttttttttacattttttcagatgactagcaattttgatagtttataagataatgcaaagaactttctctgacaaactaactgcagtaacagaaacctttcttttcagttactctttttcaagaatgaaagattattatacaaaaaaattgtatactacttgatggaaccaactttgtacatcttggccannnnnnnnnnnnnnnnnnnnnntannnnnnnnnnnnnnnnnnnnnnnnngtccaatgctaaga

SEQ ID NO: 1377 - DNA, 705 bp, Macaca Fascicularis
  misc_feature (1)...(705): n = A,T,C or G
aaacgcgcgtgggctcccagcgcagccccgtcntgagttacacatgcggcaggcgaccgcactgggccgtttctctttcttttccggacccagcagtggcgcctaaatctgcaaggagaaaatcgcctgtgtgctggttcccaccatgtggcccctgcctccctggcccctgactccccattccttgcggatgatatgcagcatgggaacctacaaggcccggatcaacacccggttgggacaggagaccaccagggcagtgcacagctgggatttcagtctctggtatcatctcctgggtccactggcgccactgagggcggctagactctgcagccagtcggcctggattcaactccctgcctgggtctcaccagcactttccctcttggtgccgcagtttcctcatctatgaaatggggaaattaacagcatttatttcttgtggttggatgaatgataagggtgagcatatatgaggtgtttgcagctgtgccatatgatttttgtaattttgttattttattatgttttaatatatcacatgtgcagtaattgtattattatagatgagctttatgagtgagtgtcctggtgacggttcctcctggggagccaggaccagctttcctggcaccttgagtttccctcacccctgttctactctcctgcattaccctattctactctgtcttcatatttata

SEQ ID NO: 1378 - DNA, 757 bp, Macaca Fascicularis
  misc_feature (1)...(757): n = A,T,C or G
atacagaatattaaggcataacaaagtaaactgaaataaagtttaggtatcaatattcannnnnnnnnnnnnnnnnnnnnnnnnnnnnnnnnnnnnnnnnnnntggctcagattgatttaataatggggctgtgatgtctgcatctctatgctgcttttcnnnnnnnnnnnnnnnnnnnnnnnnnnnnnnnnnnnnnnnnnnnnnnnnnnnnnnnnnnnncagcttcagcaaaaagtttggtnnnnnnnnnattagtgaggagagggattccactatcannnnnnnnnnnnnnnnnnnnnnnnnnnnnnnnnnnnnnnntagtgttgttgttaggaaggttaannnnnnnnnnnnnnnnnnnnnntctaatnnnnnnnnnnnnnnnnnnnnnnntgggattctgtccgtcnnnnnnnnnnnnngccactggggtggcggggacnnnnnnnnnnnnnnnnnnnnnnnnnnnnnnnnnnnnnnnnnnnnnnnngaaaccttcattgtgtaattgttcagccacaccaaggnnnnnnnnnnnnnnnnnnnnnnnnnnnnnnnnnnnnnnnnntttctggggtatcttaaatcctgtggaaagcattgcctttaggaaggctgtatgaataccttcaccaaagcaagccacctctccagtggaagccatttcacatctcagaatggggtcagcatccctcaaccggggccaggaaacatgggagccttannnnnnnnnnnnnnnnnnnnnttatgggatgg

SEQ ID NO: 1379 - DNA, 722 bp, Macaca Fascicularis
  misc_feature (1)...(722): n = A,T,C or G
gcgtgtgctgtcntnattcnntcacaatcctgtggaaggggcctccacctacataacagaaatgcggctcagagagaccaagtgacagctagtgannnnnnnnnnnnnnnnnnnnnnnnnnncaggcctgaaccccaaagttcatactcttgctgtagccgctgaggcaggcagaagagctcctcgggaggaaagcgaggggcattcagggccttctctgaatcactctccaagccagagtagaaccccggttccagttgtcctcctctgtttctgggcagagtcaggcaggtgtcatagcatccctcccggccccaccagtgctggccagactcccattcaccgaccttgactagacagagaacagccaccttttagtattcatcccaacaggtcgagacggtcagtgtgatggccacacggttcctaagggaccataggtctaggaattattaggacactcactcagccaccctcgatgcccccatctgccccacactgccattcatctcccccatctgcactcctagagtattggcactggtctagcccactccaggtcagactcatnnnnnnnnnnnnnnnctcgtaaagaaagttgtttccacatttgtcttgtcactctatttgggggttgggagagagcccgcgggggccagtgttggccaatacaggaaaaagggagaatgctagagaaactggactcatgagaggnnnaatac

SEQ ID NO: 1380 - DNA, 713 bp, Macaca Fascicularis
acatgagtggataaggtattacatgaatattttgtatgtatacatgcaaatgaaatgagggctgaccaagaactctggtgacagagcagagtaaccttcacaagcaacagttgcatttcttaagtaggaaagaataagtagatttttcctattcgccctactcctagcatatatgagaactggcacattgtgctgtgtaacagtacttattaaacttcaccatgcatgaatcacctgaaggaatttcttaaacattttctattttttaaatacctgtagcaaaacatactaatgtacttcctgtggcagttccccagtttctcttctttgcaagcaaagtcatctcgtttttcttcaggttgtgtaccacatgtatgggtatgtgaacaacacgtttttgttcacctgtttttaacatcatgtaattggaatcatgtgttcgtattcatctgtgacttgccttctctctaaaaatagtatttttgaggttcatgcgtgctgctaacatagctgcagcaactgtggtccatttatttgcactggtatataactttctgttacgaaattattctgtaactttttcatttattttattactgatggacatttgggttgttttcagctttttgcttttaacaattgttctaagttttctgctaagaatgtgggtatacatgtcttctggtatagctgtgtaagcatttcattgtctc

SEQ ID NO: 1381 - DNA, 759 bp, Macaca Fascicularis
  misc_feature (1)...(759): n = A,T,C or G
agcgcccgtgtccaactccccggcctgccgctgnncagggttcagagccccagcagccccaccaaaggcttcctggcgagtgggtggccgagacgacttggagcctgcatcccttctgttcagtgtcctggcccttccctgacacgagcagacacagcatccacagacacagcctggacaccctccgaggccccgatgannnnnnnnnnnnnnnnncaggagccacaggcagcggatcccacactccctcgggtggggccggcttggctgcccagccccagctnnnnnnnnnnnnnnnnnnnnnnnnncgcttnnnnnnnnnnnnnnnnnnnnnnnnnnnnnnnnnnnnnncatttttgtggtagagcgagtgctgggaacaacgtcnnnnnnnnnnnnnnnnggcagcgtggtggggaggcgggcgggggcggcttccactttctccaacatcctcatcccatggtctgggtttnnnnnnnnnnnnnnnnnnnnnnncagtgacatacacctgcagnnnnnnnnnnnnnnnnnnnnnnnnnnnnnnnnnnnnnnnnnnnnnnnnnnnnnnnnnnnnnnnnnnnnnnnnnnnnnnnnnnnnnnnnnnnnnnnnnnnnnnnnnnnnnnnnnnnnnnnnnnnnnnnnnnnnnnnnnnnnnnnnnnnnnnnnnnnnnnnnnnnnnnnnnnnnnnnnaggaagccatggctatagtgagccaagattgcgccacacactccagcctgggtgacagagcgatcc

SEQ ID NO: 1382 - DNA, 756 bp, Macaca Fascicularis
  misc_feature (1)...(756): n = A,T,C or G
agttgagtattgannnnntaaagggtgtcaagatgtaaaaaagaaagttcacctaagtgaaaaaattcacccttttatcagaaaatctattaacataataaaaaaatacttnnnnnnnnnnnnnnnnnntaatcaagatattctcaaaaataaagaaagctgggataagattttnnnnnnnnnnnnnnnnnnnnntcnnnnnnnnnnnnnnnnnnnnnnnnaaaagtctcacaannnnnnnnnnnnttgggagcactnnnnnnnnnnnnnnnnnagatgtcagaataacatcaaaaatgacaaatatggaccctggctggagtgggagattatgctccagtannnnnnnnnnnnnnnnnnnnnnnnnnncagcaaaggaatcaatcatctactgaagannnnnnnnnnnnnnnnnnnnnnnnnnnnnnnnnnnnctgtgcnnnnnnnnnnnnnnnnnnnnnnnnnnnnngatccatttactgttccaaccataannnnnnnnnnnnnnnnnnnnnnnnnnatttccattaatgaagaggaaaaagaggagaatgaagctgaatctnnnnnnnnncatagaaccagagattataagaagaccannnnnnnnnnnnnnnnnnnnnnnnnngaacattttcttgaannnnnnnnnnnnnnnnnaaaaggagaacttcttaaaaagagtgatttacaaaaagannnnnnnnnnnnnnnnnnnnnnnnnnnnnnnnnnnnnnnnnnnnnnnnnnnnnnatc

SEQ ID NO: 1383 - DNA, 682 bp, Macaca Fascicularis
  misc_feature (1)...(682): n = A,T,C or G
ccctaataacaaaagatgggcacccgccccaccaagggaagactgccccattccctgagagccatcattcccaacgaccttgatctggagaatgtggagggaacatgtccctgaattttcctagatctcctccaaatgctacccaccagagtcactgatgaccccagaaaatgnnnnnnnnnnnnnnntgcctttccccgttttcattccctgtactgaaagagggaccagggtagatgccccctgccctctaatcccccctccctgaatgtggaatggatcgaccttaatgatcttccccacccccaaacactagaatagactggcctgaaatacccttgtccagtaggatggactgatctgtatgcacacacccccatcacatggaatgggctggtctaggctgtggcctgcaccccaccttccttagagtgaatagggcagatactcctcccttttcctgtagcgtgtggaccggtccacgccattctttgtcctgtgaactcatctgagtgggaagtggcggacactggggtttccctccctctctccgtggcacccattggtctttccatctctgttggtttgtctgtctctgtcttcctcccgaccccaaggggaagggggcacttggctagggggtgtccctgtaagcctagacctcgtcccctcgtccctctcc

SEQ ID NO: 1384 - DNA, 1517 bp, Macaca Fascicularis
tactgggttctctgcctgtgcagcagcccctccgcgttctgcaatcatggctgtgctggcggcacttctgcgcggcggcgcccgcagccgcagccccctgctccggaggctggtgcaggaaataagatatgtggaacggagttatgtctcaaaacccactttgaaggaagtggtcatagtaagtgctacaagaacacccattggatcttttttaggcagcctttccttgctgccaaccactaagcttggttccattgcaatgcagggagccattgaaaaggcagggattccaaaagaagaagtgaaagaagcatacatgggtaatgttctacaaggaggtgaaggacaagctcctgcaaggcaggcagtattgggtgcaggcttacctatttctactccacgtaccaccataaacaaagtttgtgcttcaggaatgaaagccatcatgatggcctctcaaagtcttatgtgtggacatcaagatgtgatggtggcaggtgggatggaaagcatgtccaatgttccatatgtaatgaacagaggatcaaccccatacggcggggtaaagcttgaagatttgatcgttaaagacgggctaactgatgtctacaataaaattcatatgggcagctgtgctgagaatacagcaaagaagctgaatattgcacgagatgaacaggacgcttatgctattaattcttataccagaagtaaagcagcatgggaagctgggaaatttggaaatgaagttattcctgtcacagttacagtaaaaggtcaaccagatgtagtggtgaaagaagatgaagaatataaacgtgttgattttagcaaagttccaaagctgaagacagttttccagaaagaaaatggtacaataacagctgccaatgccagtacactgaatgatggagcagctgctctggttctgatgacggcaggtgcagccaagaggctcaatgttacaccactggcaagaatagtagcatttgctgacgctgctgtagaacctattgattttccaattgctcctgtacatgctgtatctatggttcttaaagatgtgggattaaaaaaagaagatattgcaatgtgggaagtaaatgaagcctttagtctggttgtactagcaaacattaaaatgttggagattgatccccaaaaagtgaatatcaatggaggagctgtttctctggggcatccaattggaatgtctggagccaggattgttggtcatttgactcatgccttgaagcaaggagaatacggtcttgccagtatttgcaatggaggaggaggtgcttctgccatgctaattcagaagctgtagacaacctgctatttaaggagacaaccctatgtgaccagaaggcctgctgtaatcagtgtgactactgtgggttagcttatattcagataagctgtttcatttatattattttctatgttaacttttaaaaatcaaaataaaatcccaaaaccttggaaattaaaaaaaaaaaaaaaaaaaaaagcca

SEQ ID NO: 1385 - DNA, 573 bp, Macaca Fascicularis
  misc_feature (1)...(573): n = A,T,C or G
aggtaggagaagccggnnnnnnnnnnnnnnnnnnnnnnnnnnnnnnnnnnnnnnncttggcggtgaactttagcgtgggtgacagagcaaggctccgtttctgaaaaaaaaagctgggcatggtggcgcatgnnngtggtcccagtttttttggtgggtaaggcaggaaaatttcttgannnnnnnnnnnngagnnnnnnnnnnnnnnntatggggtttttgcactccagcctggnnnnnnnnnnnnnnnnttcaaaaaaaaaaaaaaaaaatcctcactctcttaaagaggagactgagggtcannnnnnnnnngagagggaaatgtcttgcccatggtcannnnnnnnnnnnnnngcagagaaggccagggtgnnnnnnnnnnnnnnnntgaggtgcaaggaccaacattaaagtcagtaatctgggtttaagtgggctctggcacgtccctgtgcctgctgtatcactctgggtgagttnnnnnnnntctctgaactttcatttttccacctgtaaaatannnnnnnnnnnnnnnnnncacaattttcatgagatttcaggtgccaaaca

SEQ ID NO: 1386 - DNA, 771 bp, Macaca Fascicularis
  misc_feature (1)...(771): n = A,T,C or G
acagtggtggtccttttnnntcnnnnntctccacagaagggttccagtcctggatgtggcggggcctcacctttctcctgcccttnctcttctgtggccatttctggcagctctacaatgccgtcacgctctttgagctctccagccacgaggaatgcagagaatggcaggtgttcgtgctggcgctcaccttcctcatcctcttcctcggcaacttcctgaccacactcaaagtcgtgcatgccaagctccagaagaacagaggcaagacaaagcagccgtgagcctcaggctcctgtgccctcggcccagacttcagactgcagggggctcccggccttcttcccagtcgccatctcaggcacgtggcgtcgctgggagagggcccaggccctggtcccccaacggaccccaacggactaggggaatgtgagccccgcctgtccgcccacctatttatgacatatttaatgctgggtcccccatcgtccctggaacccgaggcctcccccctgtgcttgaaggtggctgaggccaggccagtcttcctggggatggggcctgaagcctcagggagcccctctgttcccactcctgtcatttgaacccctctgggtttggatgtgcctcgcggggttggatttatgctgacctgctacttaccaggcccaggctggggtggtgtgaaccctcagtgtcctgtggcgcccccaccccggggccactctgcttctgctgtgagccccctcctcgcccaccctgccgagtgag

SEQ ID NO: 1387 - DNA, 733 bp, Macaca Fascicularis
  misc_feature (1)...(733): n = A,T,C or G
caaaagcaatgtcnttcttggtgatannngagttttaaaaggatcaaatcntccaaaccttgtgtattttagagggcagcactagaagaaatcagcaggtctaatcccacaaataagaaaagtaccacttcttgatttttacagatttaaaaaaatcttttcagttaactttctttttaatgtaaatacaaatttaaacctaggcttaatataggctttttccctttcacccaagtgatgtcagtttgatgcaaaatcaatgatccagaatgatcagtgggtaaaaataattcaaagtgtttcttgagggtgagttggcatgcaaaaaattacattgattacagtgtgttttggagctggctctgtttgactgcgtgcatatgataatgcggagttgagccagagcctggaaatgtcattctagatctcaataactactggaatcagtgttttaatctcttnnnnnnnnnnnnnnnnngcttaactctctattggaagatttttttaatgttctacatcatttatgttgtattacgatgtatgtagagacagtaacctgtgaactatgcttttccataactttttgaaaatatatatatctaaatgaatgcaatgtgcataaatattttttaaacacaacagtgaactattgcaccttttgctaatgcctctatttacttgctttggcataaagaatgagccaatgaacctctgtgtcctgtggaaaaatgta

SEQ ID NO: 1388 - DNA, 729 bp, Macaca Fascicularis
  misc_feature (1)...(729): n = A,T,C or G
gaatcgcccaaaaatcaaaggagaacatcctggcctgtccattgatgatgttgtgaagaaactagcagagatgtggaataacactgctgtagctgacaagcagttttataaaaaggtggctgcgaagctgaaggaaaaatacaaaaaggatattgctgcatatcgagctaaaggaaagcctaattcagcaaaaaacggagttgtcaaggctgagaaaagcaagaaaaagaaggaagaggaagaagatgaagatgaagaagaagatgatgatgaataagttggttnnnnnnnnnnnnnnnnnnnnnnnnnntacaaagcatttaagccacctgtacacaactcactccctttaaagaaaaaaacttaaatgcaagcactgtgtaacatttgtttttaaactgcacgctgtctttttttgtatagttaaccactaccgaatgtgtctttagagagccctgtcctggtggtattttcaatagccgctaaccttgcctgatacagtatgggggctgtaaattggcatggaaacttaaagcagattcttgttagtgcacagcacaaattagttttatatgaggatggtagttttttcatcttcagttnnnnnnnnnnnnnnnnnnnnnnnnnnnnngctgttctgttaactgaataccacgctgtaattgaaaaaaaaaacaaaaacaaaaaaaaaacagttgcagctgttttgtgacattctgaatgctctaa

SEQ ID NO: 1389 - DNA, 755 bp, Macaca Fascicularis
  misc_feature (1)...(755): n = A,T,C or G
gtggttcntngtcaccttcagttagtgtggaaaggaagactcctgttttnctgagatcagtgcagtctcaggcctttgacagggctcatggatcagagctgagactggagggagaggcatttggggtagcctgggagggtgactgggggcagcagaaccaaggaaggcaaggttgtttcccccatgctgggtcctgtgttcaggtgcgacacacaatcctcatgggaacaggaccacccatgcgctgcccttgatgatcaaggttggggcttaagtgggtgagggaggcaggttctgggctccttgccttttcagagcatgaggtcaggctctgtatgcctccgtttcctagctgatgttctaactagaagcgtttgtcaattcctttgcctcccaactgacaacacacgttcattttccaaccttcctaacatcttaaacctttcttctgggagaactagaaggtagaatttgctttgattctctcaggcgctgtgcacaagccaggtcttctgtttgctcttactctacccacagtctcgccttctctatccaactgtgaaagtgaggggaggctcctgtccccctcttaaggtccccaaacctgggagtgcataggtactaaatcaagcagtgcaacttgtaattaagcagctgcagtgtttacatgtttcttaatgtgtcatcttttcaatggctgtactttaaaataagaacatttgttttaatggtctttctgattaaaggaagccccc

SEQ ID NO: 1390 - DNA, 709 bp, Macaca Fascicularis
  misc_feature (1)...(709): n = A,T,C or G
ctcccggtgcaatcataaatgatggctggaactactccattcctctggaggtgaagtctacattctcttgtctgaggtagataagtttgcctgggttctgcttaaggagatgggggagagcagtgtgtttcagggcctggaaaatgtgttctctatatagacttctggttaatgtttgttttcagtcttgcctatcagtcccaccctcggggatacctggtgtctgagtctagaacctttccaggttgctgtgggacaaattagcttacttgttatcggtatccccctgacctccacttttgtttgctttgctcgactaattaaccattttccatttactgtcattgtctaacggaggtgaattctcttctgttggtaatcgcatttctttttttgtaattgtgtgtttatataatgtttcttcttcactgtatttctagaggagcctcaggacaaagagctgatggtggaaatatgtgttcagtgttcagtttttttctgtaagacatttgcaaattctgtttttnnnnnnnnnnnnnnnnnnnnnnnnnnnnnnnnnnnnnnnnnnnnnnnnnnnnnnnnnnnnnnnnnnnnnnnnnnnnnnnnnnnnnnnnnnnnnnnnnnnnnnttttcctaattttgaatcatccttgcactcctataataaacactgtaagaatggctatggtaatatttcatttttgcattt

SEQ ID NO: 1391 - DNA, 720 bp, Macaca Fascicularis
  misc_feature (1)...(720): n = A,T,C or G
gacccagctccagtcggtgnnngtggaggagcccttggaactgtgacccagtgcggccctgtggcctttcccaacaatggtgctgaagatgcagggacaggagtgggaggaggggccccgaaaacacggttgctgaagaccgcagccagcacatccttctgcccgggtggcctctccaagccctggtggtgctcggggtcgcgtccctggctgcctcctgtccaggtctccctccccctgtggatgggaagcttctctgttacagccctccccatgctgtgtcctaccatatacatgggggacccagggtcctgactcaggggccctgccgcctccacttggtactagctgtgagtggaacaccctgccccagggccggacttccagcccccagagccctctcccagtcactccctgaaacactattaatagctctgctgatagctggtgttgtcacaactgtctggaatccaaaagcggaggacaggcagccccgtgcccccaagactggagaccctccccagcgtggcatttcctgccgggggcgggagggggcagctgtggggaggcgggggtcttcccccaccagctctcctggactcaagcccttgtcctcatatccggcccagaccaaagattccctcattcctgggggcagccctgccactgtgtctcctttgtatcctaaatctttatttttctaggatatgttatgcctcc

SEQ ID NO: 1392 - DNA, 766 bp, Macaca Fascicularis
  misc_feature (1)...(766): n = A,T,C or G
gagccagaagaaagtggttgatccattttctaagaaagattggtatgatgtgaaagcacctgctatgttcaatataagaaatnnnnnnnnnnnnnnnntcaccaggacccaaggaaccaaaattgcatctgatggtctcaagggtcgtgtgtttgaagtgagtcttgctgatttgcagaatgatgaagttgcatttagaaaattcaagctgattactgaagatgttcaggnnnnnnnnnnnnnnnntaacttccatggcatggatcttacccgtgacaaaatgtgttccatggtcaaaaagtggcagacaatgattgaagctcatgttgatgtcaagactaccgatggttacttgcttcgtctgttctgtgttggttttactaaaaaacgcaacaatcagatacggaagaccttttatgctcnnnnncaacaggtccgtcaaatccggaagaagatgatggaaatcatgacccgagaggtgcagacaaatgacttgaaagaagtggtcaataaattgattccagacagcattggaaaagacatagaaaaggcttgccaatctatttatcctctccatgatgtcttcgttagaaaagtaaaaatgctgaagaagcccaagtttgaattgggaaagctcatggagcttcatggtgaaggcagtagttctggaaaagccactggggacgagacaggtgctaaagttgaacgagctgatggatatgaaccaccagtcccaagaatctgtttaaagttcagacttcaatta

SEQ ID NO: 1393 - DNA, 745 bp, Macaca Fascicularis
  misc_feature (1)...(745): n = A,T,C or G
acaggaactcangntgcccttacccnnnnnncagacctgatccctttctttgacagagcaccatcnnnnnnnnnnnnnnnnnncaaatggttttcttctcaatctnnnnnnnnnnnnnnnnnnnnnnnnnnggtctgtgtccctgccactctgagttatccagaaaccaccacctacaaatgaggggactcatctagaagacctctaaggtcccttttggcnnnnnnnnnnnnnnnnnnnnnnnnnnntggaattaagcaccgcaaggaaattatgggtatgtgagtcatnnnnnnnnnnnnnnnnnnnnnnnnnnnnnnccacccatggtgatggatggttcggaaagggaatgttggggccttttgtgccacaagttaagatgctactgttttaataaaaataaataaagcactgatcttcaatttgaagacatgagcttttctcgcaggaaattttctttttcacagaactggtgtcaggaatcactgaagggctaacagtgatggtccttccnnnnnnnnnnnnnnnnnnnnntggaaatagaagacatttcaggttgagagaacagattggttggaagcttaaattttgnnnnnnnnnnnnnnnnnnnnnnnnnagggtaatttgattgtgaaagagtgaattttctggacagaaaagggagagctaccaaattgtttttttattttttaaaggaagtttaatgtccattgtatcacaaatcagtgtaaaaacaccaaaa

SEQ ID NO: 1394 - DNA, 1390 bp, Macaca Fascicularis
gcatcagctgcctctgctgtcaaacaatccgaggttaggcaaagagtgctgtgtgtgaccagatcccccttctccttctcataaggagaagcacatgctccattttcagaaaaaaaaataatctggcttctttactctgtcagtctttaaatggatgttggaaatgttctgttaggaaaaaccatgatgtaattaaaagaagctgccagctgccagaagccgccagttcaatcccacttctgtggctaccagccttgccctgctgagaacagtgaatcaggcccaagaggggctgctcagctcttcttcagggggaaactccctcactcagaagcctacccctgcttgggaatgtggcccatttgcacactttaacttcctttatttgtaaagggaggaaagagaatggatattcccttaggaacttcgcagcgagccaggccaactcccagactgaggctgtttgcatgcggcaatccttccatttcatttacctaccagtccacagctttcccttcttcatttctgcatgaaattgttgctgtccccagcaccccaaagaggccaaggaagaccaaaacaaaggatgttcttagcagtcttgccatcattttctgtttcatttatttcatgccacagcaggacactttccacatagattgtggagtctgagtttcaaggcgctctcaggctgtgctggctctgacgtttgattccatttacctgttctgtttgctgttcggggcattttcagaatgggatggatcccatgtaattgtgcgattctgtcacaacatgccagcgtgactccggatgtctttgtgctgaattgttgactggtttgcaaagtcatcaaaaagttctgcagaaaaaaagggaaatacagttaactctttggagtgaacattgttgtataaaattcagtgggcaggggaacatcattttaataagtagatgttaaatatatttcatgtcttctcctcctgattgactcaatgagtgagagcaaatgcaggtggttcgtacattaaacagaaatgatgaaaccttatgtcttcgtaataattaggatctgtcacttataataatctctgtcttaaggaaccagttgctaaggggtacttcaaagggttgcttcaaagtaacagtaaatttaactgtattttaccaaagatgtttacatattctctccacctccctggttttagccactcaatgtggtgcttcacttcaaagaagctttggtgtccagttggctgctatgcaataggtaaacatattgatcacccactcttcaggttaataaaaaatgttacaaacatctattttgcccaaactatgccttctcattctcaaagctgaatctgaagtagaaaactagaagaaaatg

SEQ ID NO: 1395 - DNA, 727 bp, Macaca Fascicularis
  misc_feature (1)...(727): n = A,T,C or G
aggaccagatnnnnnggtggaganngggggctgctccttnnncnnnaagactcgggtggtccaggagcatggcgggcgggcagtgatcatctctgacaacgcagtnnnnnnnnnnnnnnnnnnnnnnnnnnnnnnnnnnnnnnnnnnnnnnnnnncagctgacatccccgcccnnnnnnnnnnnnnnnnnnnnnnntannnnnnnnnnnnnnnnnnnnaacagcatgggctgccatgggccatcatttccatcccagtcaatgtcaccagcatccccacctttgagctnnnnnnnnnnnnnnnnnnnnnnnnnnnnnnnnnnnnnnnnnnnnnnnnnnnnnnnnnnnnnnnnnnnnnnnnnnnnnnnnnnnnnnnnnnnnnnnnnnnnnnnnnttggggagagcatctggggacaagtggagccaggtagaggaaaagnnnnnnnnnnnnnnnnnnnnnnnngggaagccacaccactggccttaccttccccagggccccaaagggtgtctcatgctgcaagaaggggcaaaagacaggccccagggcttctggctaaaacctgaaacaaaaggannnnnnnnnnnnnnnnnnnagagccatctgtgacctgtcacactcacctggctccagcctcccctacccagggtctttnnnnnnnnnnnntcacagcagttgttggagtggtttaaagggctnnnnnnnnnnnnnnnnnnnnnnnnnnnct

SEQ ID NO: 1396 - DNA, 730 bp, Macaca Fascicularis
  misc_feature (1)...(730): n = A,T,C or G
cacctgtcttgaatgtgtggnaaatannnnagtcaagagattaaatggtgaacttattaatgnnnnnnnnnnnnnnnnnnnnnnnnnnnnnnnnnnagaagtgacaagaaagaaagacaggttggccaaagggagaaaagggnnnnnnnnnnttaattgactttctgttcccaaaatgggctagttatatcaaataagtactcccacttccctttctgagtgagagtgtttctcacaagtcagtaacttctgtttactcattaactacannnnnnnnnnnnnnnncatagaggagtattctgtttatttttgcnnnnnnnagattgagtaattcnnnnnnnnnnnnnnntccgagcttaatgataaggatgaaaagcacagggagcaacacagaagcaggcttgctaagaaaactttttaaataattgacaagggaatatcatggaatgtgatgcaaagtttgttcagaacttttatgaggaaattattctctnnnnnnnnnnnntaatctttttgctatgactttgaagaccactgacttttgagaaagagaataataggattatctttcattgccttatactgcaaagaaggtatatgctttataaccaatgttgtctttttgcctagagaaacaagatatggctttaaatagctacaatcatctttggatgtatatgtcactgctgcttcaactttttggatgcatttgaacctctgagtttgtctt

SEQ ID NO: 1397 - DNA, 766 bp, Macaca Fascicularis
  misc_feature (1)...(766): n = A,T,C or G
aaaaggaatatagtgagcnnnnaaggacacgtacattgaataaataattggaatatgtggttatctttagatccatatcttagttgtcatttgtttactctcaaactgatgttcatctttctgttaatttccctctgcctcaagactacatgacagaaatgacctatcactacttattatttctgaagcccaactgcaagactgatttctgagatcaagtaaagaattggaatacttatttttcatataaaaaatctaaatatgttaataaatcatttcatacaaaagtacattattaaataaccatattatcaaaataatcacaagaaaatggaccatatttacaatgttttgtaaacttgccagtgtgtggatatgtaccctacttgtgaaatacatttgaagatataaagatcagccaaaatgatggcaaaatggtaggctaatatcttctattattattggagaccatatcatattttggattcatgcaattttgcacacagtgaaaccattaattttccaaggtaattcctttagaatatggtattggcatgcagtttcttacttatctagaatatttggcttatctgaaagataccaatttaagatctctggaagtgttagaatttttgatccttcacagtatcaatatttaatcactaagctttatttattagacatgttgagtgagtgctgagttccttgctgccacttttgttaccattgccacacactatttgtaaaccagtcccaccacttatac

SEQ ID NO: 1398 - DNA, 677 bp, Macaca Fascicularis
ttactttcacagcatgcagttgacagcagttgtctagagctcataaatcaggaggtgggaagtttatcagtattgtaatgggaacccccagaagagcctgaatcagatgatctaggtatgactagaagtcaggtgacctgaattctacacttgaccgttttcaacttgctgtttgacacattaacaaattccttaatgtctgtatatatttcttttttataagactaggatattgacttcctaaagagaaattatagaatttttaaatgacaactaaaatagtgtttattaagcattccagaatacaaatcagtgggcattgtgtgtgttcattaaactgagtttattaaaatgagtattcaccaattagcagaatataatggaaagaacaacaacatcaaattaaactttttttagagtcttggctttgctataaatttcctttatgaatttggataagtcagtttacttttggacctcaagttcatctatgaaaaattgggcaaaaatatgaaactgagacttatatcaagaagtttaatccaaatatatagagaatgcttaatctttcctagtaataaaaaaaaaaaaaaaaaaaaaaaaaaaaaaaaaaaaaaaaaaaaaaaaaaaaaaaaaaaaaaaaaaaaaaaaaaaaaaaaaaaaaaaaaaaaaaaaaa

SEQ ID NO: 1399 - DNA, 740 bp, Macaca Fascicularis
  misc_feature (1)...(740): n = A,T,C or G
gaccgctgccgagatggcccnntacatgaagcggctttcccggggccaaacggtggaggatctgctggaggttctaagtgacatagacgagatgtcccggcggagacnnnnnnnnnnnnnnnncttctcgaccaacctgcagcggctgatgagctcggccgaggagtcttgccgcaacctggcnnnnnnnnnnnnnnnncgctccatccagaacagccccannnnnnnnnnnnncttcctgcccacattcatgtactgcctgggcagnnnnnnnnnnnnnnnggtgcaaacggccctcaggaacctgcccgagtacactctcctgtgccnnnnnnnnnnnnnnnnnnnnnnnnnnngggccttcctggtgggcnnnnnnnnnnnnnnnnnnnnnnnnnnnnnnnnnnnnnnnnnnnnnnnnnnnnnnnnnntggaggccgtgatgtgagcctgtggcagccgacccccttccaagccccagctcgtcccatccctggggatcctcaaggcgaagcccagggagcgccgccattgctggtctccgaggaggtgagggcgccgagctccgaggccaggcaggcccaggaataatactccgagccctggggtggctctgggccggctgctggcatgggggccgtccaccaagccctcattcaccttccgggccacagccctgcaacagagtggtgggcagcgtggcccagcgtggcaggatcccaccgggcgtggcctgggct

SEQ ID NO: 1400 - DNA, 678 bp, Macaca Fascicularis
  misc_feature (1)...(678): n = A,T,C or G
gatttttaaatttggatactttttttcagnngaataacagaatggtttactttacaannnnnnnnnnnnnnnnnnnnnnnnnnnnnntctacttggaaaattgagaaatggctcaaaagagataagaaaagttgatggagccgggaattgctgggttttagatgcactttttcttttgagagtaagggaagttttggaaaagaatagaaaattagtgtaaattgatacgattttatttaatcaaaattactgctacgctgtgaagaacagcttttacaaagtagctgaatttgtttttcccacttgatttggattcacattgctttcatttcttaaaatgtttccctttaggttcttggtcttggaaataaatttcaaggtgcattgtatccattttaagctgctttattttattttcacttgtatgagcaaattcttaggggagctttgcttttcttctgccagaaaaacaaaagggggaaatgaaaatcttttttggaatgagttctgtgggttttcttaaccgccaccatgtttattagttacattgnnnnnnnnnnnnnnngtgcaatgtaacagattttaaagttaattgctttcaattgagtcagtaaacctctgatagataatttatttaactggaaaacctaggtacccataagaaaaaagattcattct

SEQ ID NO: 1401 - DNA, 738 bp, Macaca Fascicularis
  misc_feature (1)...(738): n = A,T,C or G
tgggtactgtaaaaatgaatatgattttgatggcagtaatgagtaaggacatttgagactgatagaagagtatatacaatatgtagtgatggggaaagataaggtactgtcaaaggacaacgtgttttctggtatgtcagagaaatagaatgtgttaagggaagctgagcaccagaaagatccgggtgtcacagtttgtgtaggatgtttaaagctaaaccacagagtttaattttatccaatagaagagaacccacagaagagtttccatttattcatcaatttattcatttattcaaaaaatatttcttgagtgcttnnnnnnnnnnnnnnnctgtgccaggcacctgggataagacacagtcccttctgtcaagtctttacattgggtggatgtgggagggacagatgacagaacaatatgcattgagtgtaagcactatggtataggaagctctgaatgggaggggcatggaagccatggaagatcacggaaggcttcccaggagaagtgacgtctggactgatcctttggtcaagcaggagttaaagaggagaaaaggagagatatgggtgttccagagagaagaaggagccttgtcccaggagcaaagtgagggtgattattccagaaatgtgagtgattcttttaaggctcaagcaaagcatatgattcttcttaatactttctatttctttgctgagtctttctgttctttttttcaagcatgctgcagt

SEQ ID NO: 1402 - DNA, 742 bp, Macaca Fascicularis
  misc_feature (1)...(742): n = A,T,C or G
gctgctgctgnnnnnnnnncacagcagnnnnnnnnnnnnnnnnnnnnnnnnnnnnnnnnnnnnnnnnnnnnnggaggaggcaaatggacaaattgctccagaaaacgggacatagacccccagcccacccannnnnnnnnnnnnnnnnnnnnnnnnnnnnnnnnnnnnnnnnnnnnnnnnnnnnnnnnnnnnnnnnnnnnnnnnnnnnnnnnnnnnnnnnnnnnnnnnnnnnnnnnnnnnnnnnnnnnnnctcatctttctaaaatacagttctgaacccgatgctcatccccacctgtcttcaacggctccccattaccctcaggacagtgtctgaactctccagcttcgtgggagaagtccccttccatcccagagggtgggcttcagggcacgcagcatgagaggctctgcgtcccctatcaccctaatttccagtgaattagtgtcatgtcagcatcagctcatggcttcatcgtggagctctcagttccgatttcccagactgaattgggagtgagatgcctgcacgctgggttctgcagagctggcctcccgcgtggggcagcatggctggctgggagtgaggagcgccctcgagggagggacatggccccggtgcagctgcagctcacccagccccaggggcagaagagacccaaccacttctattttttgaggttacgaatatagtaactgaagaaatgccacgacatgattttttttaagtgtactttaaatg

SEQ ID NO: 1403 - DNA, 737 bp, Macaca Fascicularis
  misc_feature (1)...(737): n = A,T,C or G
gncnatgccctctggctgggtggcaagagggctgtgagtggaacaagtcagccagtcactgtcccttgggnnntggttnnnnnaaaaaagtctggggccaagaaaagctagaacatggggccctcccttcccaggagtgctagcgaaccctcccagatagcctttgcctgtttggaaaagaatgtaatccatcagaacgtgagctccttgtgcttccagtgacaagtgggccacagtgctggtggcaagttgctcccctcacagccctgcccaggggtaggaccaggcctgccccttgatggatgtgctgttgattgtaatatacttctgttgccaaataatggtactgtttaattttccataaaagagagactatattgtctgatatgtaatgttaatggaattctaagaattactagacactattataaattgtagacttatgtatttgtctaagggtttgatgaagcagggccaaaacactgtttcttcttttttgtttggaagaagctgaggtttgtttttgctgtttgagtgttcctttggcaacttattatgtgtgaaatgttaaattttatccattcagatgatggtaaatgagacctttctttaaaccagtagcaacatcagtacaaattgctgttcctgcgtatcttgaacctaaaaagaacaatctcttcaaaaaaacaaaaacaaaaaacaactctttggtcatttgacccgccaaataaactcaa

SEQ ID NO: 1404 - DNA, 669 bp, Macaca Fascicularis
  misc_feature (1)...(669): n = A,T,C or G
accaccatgccagnnnaatgttnnnnannnnttataaagacggggtttcactctgtttcccgggctnnnctcaaatnnntgggctcaaagtgagccannnnnnnnnnnnnnnnnnnnnnnnnnnnnnnnnnnnnnnnnnnnntgtgcctagcctaaagctataaaatattacagaaagaattgtagtaccttggttactcttccctggttacctcccttccctccattcatatcctgatatatttatatcattagagtgtttattaatttcacatacgcatttatactgttactctataattgatccaaaaatataatgtaacatttttgtctattttcagtgtttataaaaataaaatgagagtatgcatattatttaatttatgtttatttgttcagtattctatgtttgagttttcaccatgtnnnnnnntagatctctgattcattccttttaagtgctgtatactatgctattgatggaatatacnnnnnnncattttccattcttttttatttttgatgagctgnnnnnnnnnnnnnnnnnnnntcactattataaacatgatatgttaatatccctccatctgtctgcttacgcatgtgtgttccgtttctctagaagagtatgcacctggaaatttaaatgttgtgcgtatctacagcttc

SEQ ID NO: 1405 - DNA, 1806 bp, Macaca Fascicularis
ttattctatcttatttttggtcatttgctgtaatactttttgaaatttatttacttttttaaaaacctgtcatatctctctagaccatactttttcccctaaagttttgtgtttaggcaatcaagttgggtcttcctaaagacttgaattagcaattaaaattcttgcaagcaagcagccagttatacctccttccaacctggagctccattcctacagttctttcccaaggggtttctcccaagaagcttactgtggcttggttaatgcttgcctaaccagtccgtttcccactaaaatggaaaagtccaccttcagtctttctttcttacctaccaaaaggaagaagaatgcagttgagagaaaatcaccaggacacatttatgttcttagaaacccctctacttcaagtttaactgagctaccactagagtgatttggaattctagccctaggccagaaaccttaagttcctggtggctgcagtaattcacaggagttttgccttcttgaggtctgcttaccagatgtttggaagtgctttgcttaacttggaaaaccaatgcttaaagttaaattgagatcaatttaatgtccattttacctgtcaaatttgttggcagatatttaaaataaaacgctagaatggtgtttaattgattgttttcaatttgaaacaatatttaaaatacctgtcttggaatacagaggttttgcaaatattgtgagtattgtttgctattattctgttataagcaatactctgtcatcaaattattttaaatgaatatgcaagaaacaaaattgagttcagcatgaactgaatgtaatgatagaaatacatctgaatggtgggtttcctatcatgttgaagacatagcttctccagcctgaattctaaactggactcattagcccaaaagttctgaaacattcctccatttccatacccctaataaataaatgttgcattcacatttgtataattataccgtaatgggcatagtgattttaaattctcaaagtactttgacatctgttatctcattttagcacaaacaaggtgtccaacacactattcatgtgcatacagcacctggcagatcagcttttaattctgagttatgtggaaatgagatagtaaatggaaaatatatccaaaggaggaaaatattttcagtattattgaccttgtgatatttagtagtgccttaggcttgtcaacattgagcaacttgttcacaaagaggcccagcaggttatttttccacttgttaaatgttcaaaatgtttcttattacatgcagtccagttcttgggtccacaggtcagtttttgctgttataatctgcccttgctaaattttcaagggtaggagaattctctgattcttattccccttctccttcttccctttctttttccagtggtaaaaaaagtaaaagaaggttttttaacatctagtggaaatagggctgtttgtgcggccgtgtctcagttaattctgtatgtataggcctaaagtaatttatcagcaaggacttctccagatgcatgtaagtaacaaaaattgcaactcaggatggcttaagcagaaaagggcaggagtcctggatccaggtgctgttttgctgcattgctctctggctctccatctcttggctctgctcttctctgtgttggctcttttcccaaacagccttcctctacatgtggagagtttcaagccaaattgctctttaacttgaagttacaagaaagagaacctatctttccaacagtgtcaaaaaaaaaaaaaaaaaaaaa

SEQ ID NO: 1406 - DNA, 798 bp, Macaca Fascicularis
  misc_feature (1)...(798): n = A,T,C or G
aagaggnnnnnttcggncttcttcctgttctgctctgagtatcgcccaaaaatcaaaggagaacatcctggcctgtccattggtgatgttgcgaagaaactgggagagatgtggaatnnnnnnnnnnnnnnnnnnaagcagccttatgaaaagaaggctgcgaagctgaaggaaaaatacgaaaaggatattgctgcatatcgagctaaaggaaagcnngatgcagcaaaaaagggagttgtcaaggctgaaaaaagcaagaaaaagaaggaagaggaggaagatgaggaagatgaagaggatgaggaggaggaggaagatgaagaagatgaagatgaagaagaagatgatgatgatgaataagttggttctagcgcagtttttttttcttgtctataaagcatttaacccccctgtacacaactcactccttttaaagaaaaaaattgaaatgtaaggctgtgtaagatttgtttttaaactgtacagtgtctttttttgtatagttaacacactaccgaatgtgtctttagatagccctgtcctggtggtattttcaatagccactaaccttgcctggtacagtatgggggttgtaaattggcatggaaatttaaagcaggttcttgttggtgcacagcacaaattagttatatatggggatggtagttttttcatcttcagttgtctgatgcagcagtttatacgaaacaattgttgttctgttaactgaataccactctgtaattgcaaaaaaaaaaaaaaaagttgcagctgttttgttgacattctgaatgc

SEQ ID NO: 1407 - DNA, 699 bp, Macaca Fascicularis
  misc_feature (1)...(699): n = A,T,C or G
gagcagtagcttnnntngnnnttgnnnnnnnnnntgggaagagggcagcagtagtacgccagagcttccctgggataccagccgcgtggctgcttttcattcgatctgatttttgtttcccactgtagatctgattttgtagttgaaaacatttcaccatcaaacactatttctgaatatcgtgccttttttatacctagcctagatgaaaannnnnnnnnnnnnnnttcagaaaatccccccatcctacatgactgttacctagacataaagcaaaagtgcatttaattcaaaatttggttcacaatagaagtattttgtaaaagcnnnnnnnnnnnnnnnnnnnnnnnnnnnnnnnnnnnnnnnnnnnnnnnnnnnnnnnnnnntcatacaaatcaacttggtgtcctagccagaatggaacagcataatgacctggagttcgggggagtatttctgcactattacttgtcagggagagaagaaagaagtgtccctcaannnnnnnnnnnnagaactatgaatacatgttctttcaccagctcacaggccagaaatgcgggacccaagtcaactaggtgaaacttactagcagacccagcttttccataataacctaatctgcaaatcagtttattaaagtttcccttggctgatattgttgttttcaggatgcaatgaaagtggatttcagaaggc

SEQ ID NO: 1408 - DNA, 766 bp, Macaca Fascicularis
gagcagggctgggtatatagtaagctaccactgttactattattattacaattaccatcatttcctaaaagtgatcagaataaagaacagtttttaggggctatcatattattgccttattgcaaaatagcatagtggttaatagagtcatttttgggtcaaataacctgagtatacagcctattgcactcaactagcttgtgaatttggacatattgcttagcctctctcagcttcagtttcctctcatatgaaatagaatattaataaatgcctacctcaagatttttagaacggctaatacttgtaagtattagcacattagtgcctgtcacatagtgctcagtcatttttattaataatagtaatattattgccttaaaggtacaaaagcagtactttcccaagtggtttctttctggaaatgtagttatttactgttaattatatcttctgacttgatagcaacatttacatcataattattcttgtattgttggcggaagcgccatgcccatcgtttagtggctgcctcccactcttgttttagttacactcaatttaataaattgatggggtatacccaagtcctcaccattttaacaatttgtgctaatgcatttgaaaaaagttttacttccaacatataaatccattatctctgttaacaggaggcgtttctgaacatagtaccaaggctcattttacctttttacaattctttcttaatgtttgacgtttatcagagttatgttaaagaaacata

SEQ ID NO: 1409 - DNA, 2839 bp, Macaca Fascicularis
agttcttcgccttccgctggctgacactgctgctgtcccaggagttcttgctgcctgatgtcatccgcatctgggactccctcttcgccgatgacaaccgctttgacttcctcctcctcgtctgctgcgccatgctcatgctgatccgggagcagttgctggaaggggacttcactgtgaacacgcggctgctgcaggactaccccatcacagatgtctgccagatcctgcagaaagccaaggagctccaagactcaaagtaacccgcggcaagaggcccatgttcgggagagaagccacccgaccctgtgccctggctcacgggacacacagaaacctgtaggaacccagcctgaggggaaaccgcagggttggcccgagtcccaggcagcgcccgctggggacacactgtgctgtgctccttcttctgccaccacgcccagctccccgcctgctctgcaccctgccctctttgcccaggatactgagcagggccgaagctcgggaagttgtccttcccgggccagggccatttccggcactgggaggctcccagcggccccctccctgcctcggctctgctgccccagcctcggttcctgcttctggtcttttcctgggctccggtcaggggaggtgcttggccagtgggccagaaaccgcttctgagtggggtgcttcacagggaaggcaacactgaaagcagaggcctgccatctctctcacccacagatgtctgtctgtagtcggttggtgtggacgtgggcccaggtccccaggcgtctcctccccgcgtatgtgtgtgtgagggggtgagggtctctcaggcctccaggtctcccagcccctccttctctgtctctacctctctgcctgtctccttccgcctccttcccagagtgggactatgtcttgctccatgtttccactgcccattactctccctgcccttctctgttggggtgccttatcctgagccgcctcctctccctgcttccctctgctcccctgaacctgggagacagatgagaagactggctcagcaaggcccctggaggtcaagcttggcctttgcctcctgttcccatcccccagccccaggctcctgggtccccccgactgcgagggagccctccgtgcctcacttagagggttctgaacccgttccctacacagaaatcttggaaaccaaatgctgctgagtaagaacgaagctttgagcttcctgcccctgtgctctgcccagggagggagaaggaagagggggagctggtttttctggaggttctcccagaggccctcctgtcccaaaagaaaaggaccttgattctgagcccagggtcggaacctgttgcttcagaagagttgtcatttcctcggcttccaggtcccaacccagggtgggtgagtcccacaaaggacaagtggggcctgaggaagcttctctggggccgggggtagctgcacttaaaggccttgggtcctgccagtaccatgagggctgtgtctgtgcctctgtgcatccctccaccctctgcggactgagggaggtgcagggccttctctgacccctgcctgagctgttcccagggctggggcaggtataccctgagcaggggcagctggccgctcccagttctcacaaagtcacctccctccttgtacaaggtctgcgtccggaagccaggtgccatagtgagtacccttgtcccccagactggctggcaggagtcaggccccagcagccctcctgcccccaaagccttccgagtctggtgggcaggacttctcgctgccctcccaagcctggctgtgggccagaaacggcttccccaggtggctcttctaccaggcttttccttggatgccacctggatttctgcacctgcgcagtatttgggagactttgactatttattcagactcctggctatgtattgcacattggtgagtgctctggggatgaggcgtggtacgtgtaggaaggtagaaaggagttggagacaagatcctcttcattttccaagatcaaagtcagcctcttctccccatgcttctaggacctgcctgattttccagcaggtcctggctgggtgggctcttgagttctgtactggaattgactgtaaaggtgggaagagaactgggctgactccaggacctccaggatgaggcagagacatgatgcttcctgccggcctgggccaccctctctccagtacttgtcagctggtggttcagcccctcctccaaccccttcacaaccttgggccactgcctgggacccagcagacattgcccaggactcctagtgcactcactcttgtctgcacccgccttcctcctgggaccacactacttcactgcccaggactcctaatgcactcgctcttgtctgcgcccgccttgctcctgggaccacactacttgaatcaccgtctgatttgcttcgctggcagagttgggtcaagtgccctctcctttgccttgagatgaaagtcaagagcacagggaccaggccttggttaggctgagctcccagcaggataccgcctgcagaaaggacctgccctgacagtgacccttccccagattctcaagcagatgcccaagggaggttcccacagaaccagagtgcctgaggcttcctgcttgagaactctgctttcctggatcttgaacacttacagattgagctgtatgaattcagtgggtctcactccagagggtctagaacgtttgctttagttttttatctgttttgttccttgagtcagtgctgttgatgacgagttgtcttgaataaatcatgtgttctttgcaaaaaaaaaaaaaaaaa

SEQ ID NO: 1410 - DNA, 202 bp, Macaca Fascicularis
ctgtgccatcagcatagacaggtacactgcagtggtcatgcccgttcactaccagcatggcacgggacagagctcctgtcggcgcgtgaccctcatgatcacggccgtctgggtactggcctttgctgtgtcctgccctcttctgtttggctttaataccacaggggaccccactgtctgctccatctccaaccctgatttt

SEQ ID NO: 1411 - DNA, 239 bp, Macaca Fascicularis
  misc_feature (1)...(239): n = A,T,C or G
tgtgggagtgagaggcacgagatgttcacgccctccccctgtgagatcaagaaccccgagatctgtgtttgcaaaagcatatgaaagtgtgtgtgttctcgagggcacaaaatgaggagagggggagaacaccccactcccgtgtccaccacgaccctcttccccacgcggacacgcattccctcccccatcacacnnnnnnnnnnnnnnnagggggggggaggtgtccatatctgtgt

SEQ ID NO: 1412 - DNA, 693 bp, Macaca Fascicularis
  misc_feature (1)...(693): n = A,T,C or G
cagttttcccattaggatnnnnnnnnnnnnnnnnnnnnnnnntttctataatgcttnnnnnnnnnnnnnnnnnnnnnnnnnnnnnnnnnnnnnnnnnnnnnnnnnnnnnnnnnnnnnnnnnnnnagttagtgaacaagaaagtaagtctaaattgatgaaagaatgaggagttttcttatcttctgcatattccttggaagtcaggacaagatgaaaaacatccaaaagaagtgaaattggtgacagaatgagaggagcagagcattccagtgtagtaaatgaaatgnnnnnnnnnnnnnnnnnnnnnnnnnnaagtaatatttttgtannnnanntttagatttttgataaggctaatgcaattgcattccaaataggggttaatgtcagatttccgtggctggaagctgtgcttttggcatatcacagtgttgtgtcagtactacaaggtaaagcatcgacaacagagaatgagcttgaaaatgaaggatctattgnnnnnnnnnnnnnnnnngagagcatatttaataagcctctataacatgcagccaaaccagacattcactcctgcagagaaatgttgccctgaagaaaaagaaatatataaagataggctatcattcttcctttgctgcagtactaagaatagcaagaaattagaatcatttacattggaaatttgaaaattccct

SEQ ID NO: 1413 - DNA, 784 bp, Macaca Fascicularis
  misc_feature (1)...(784): n = A,T,C or G
gaaatttgtgtccacaaggacaagaacnngtatgagctttgaaactccataggaaacatgttaatcagcaaagaagtgttaatgctgcaagtaatctctttttttaaaactgtttttgaagctacttattttcagccaaataggaatattagagagggactggcagtgagaatatcagctctgtttggatgttggaaagtctcattttattgagatttttaggatacatgcagaagtttnnnnnnnnnnnnnnnnnnnnggcaccttactcagtgtgggtgggctgagagttagacagtgtggctgcaggagcatagaggcgcctagaaattccactcgcaccgtagnnnnnnnnnnnnnnnnnnnnnnnnnnnnnnnnnnnnnnnnnnnnnnnnnnnnnnnnnnnnnnnnnnnnnnnnnnnngagatattcaagattcaagagtattctcacttctgggttannnnnnnnnnnnnnnnnnnnnnnnnnnnngatactgtggcttgttttgtttatgttttttttttcttattcaagaaaaaagaccaaggaataacattctgtagttcctaaaaatactgacttttttcactactatatataaagggaaagttttattcttttatggaacacttcagctgtactcatttattaaaataggaatgtgaatgctatatactctttttatatcaaaagtctcaagcacttattttcattctatgcattgtttgtcttaaatataaataaaatgtatactacattgaataaagcaaaatactcaggt

SEQ ID NO: 1414 - DNA, 666 bp, Macaca Fascicularis
gcctttcctaactgcaacatgcacagattcgcccttatatccactgcaagggacatcacagaaaaatggaaagaaatgtagcaaacagaaagtgaagagagagagaagataatgtgcaatcagctggggaaagacttctgaggtaactctcttatgcctgctcatcaaccaccattttgagaactattcctctcagcaaatatcttaccaagcaaatactttatctttcagaatatgcagtttgcttattcccatgtttgtacaaattactgtggttattcttttatctcctggaaatacacatctttcatgggcatcaaaattcagtttcaaattcccttcatgcagtaggcttctattgatacagtaaactaaattttgactgttctctcaaatactcctgcacgctatttactttatgctgatttgagtatgttggaatattttaccctaagtgtccttcagtcatttcgcctatcagtgccaagaattctggcttttcaattatattgtaagcacttgagagcacagattgtcttcaatcttttgtagcccagtgtctaggaccatattttgcacaggtatgggcaatacgttctgatcaaacttctgagtttcatgaatcttatcctgtttctggaataaccacatcactacctttcttcc

SEQ ID NO: 1415 - DNA, 729 bp, Macaca Fascicularis
  misc_feature (1)...(729): n = A,T,C or G
ggcgagactgagccannnnnnnnnnnnnnnnnnnncacgtgggaagactgggactnnnntgctggggtgctccccgcggggctccgcactagtcctgcccgaaggacgcttttcgccgcccccagggctgcctttttgttggccgcgagccctttaatgcgcgataggggggcggagccagatctnnnnnnnnnnnnnnngggggcggagcacggcagcggagggagaccaggattggctagggagcaggacccagagaatagcaagctcgggattgggtaataggggggcccgacggtagtgtgtagcgaggattggccccctgggcagggcctcgcggctggaattggcccccgcgcgaggaccgcggggaattgatggagtcggccgggggaatggaacccgccgaggccgctatggccccggcctcgaagaatgccaaagaggtctcgaggagccgcggtcgccggcggtggcgaaaaggcaaggccaaagagacggaatctcactatgttgcccaggctggtcttgaactcctagcctcaagtgagcctcctgccttgacctcccaaagtgccgggattacaagcatgagctaccacagctggccccatactatcctaatgatcatctgagccttcagcaaatcctcatctttttgctggtggagggtcttgccccagtggtagtggctgctgactcacgagggtggtggttgggaaagtggct

SEQ ID NO: 1416 - DNA, 2247 bp, Macaca Fascicularis
ttttgtgaaaatggtggactgtttagggcacacaggacagattccccaaattgctttatgtttccacataactagagcacttcagtctatttaagcctttgtctcctaactgaaacatttctaaatatttctattcaataagttttttctttttgagcaacttaagtgaattttgaagattgctccttccagtcttgttccttttcacattttcctgcattatctaataattacctcagtgttagaatttgactgaatgtattaattgatttaaacatcatgtagactaaagtcttaaacatctaagactcagttgcacaaaaaaattaaagtcacctgtactgaaccttggtttcaatttaagatttttcttgcttttcaaaggggtaactaataaagattgaagggtttttttcccagttggtcggaggaatgaagaactattgatgcaagcttttcattgtttcttttctatgatcaggtatctgctttcattttagactgctgcttccaaactaagttagaatcttggttttaatgagaggaggcagagaaagggaggcagatggaagaagagaaacagttaaataaagacatacccagtcactgcatttttggactatactatatctttctagctcaaggaaatagataaactgtagggtctttttttactctttatgtatcagtttttgtgttagtcatagctgttcatagtggttgtctaatttttactttattatatgagaactgtgcagatcttcactgaagttagttctgtcacacttcttcccattatttagagcaaggttttttaaagcaaccgtcaatttctcagccttatgagcttgctgtatttcttagtatcatgttgcttccaaattttgtttttactgtaaaagacaatttattgtagagaagtggctgtgaaagtcattctctatctttaaaaatcaattacagagttcatttgtcattttctagagataaattatagtattcaaactggcagtgctcattatgtacattttgtaagctctgtcagtgaaaccatcagttttgcaggagcttcctttcctggtcaagataaagcttaaaattccagaaattaatatcatttggactgactttattcatatttccatcaaactcctccattacagtaagagatagtgttgaaccagcatcaggtctccggaaacgtggcagagcagacaggccgttaagtttcacaaacatcatagatcattttcttagagaagaaaaacatgtctaaaatagttttagtagtccaaaatgtcaactatctgtagctgcttttgtgtgtgtgtgtcagtgaacaaataataatgccttgctcaatcaatgcattcagccatctcaagtgcaatttgtgaaggagactatggtttccaaaagatacatttttttacaaagttaaagctgtaaaaagtctgatttttttcctccagccgtataccagctgcgcttggttatttcagcagttggtatactattgtccaggccaaataagtttctgtagctgttttagtaatttgaagccaaattctcatgctgtttctcattaaataataataatgagaatttggtccacagtttgctttaagttctctcttcctttctttcccttacagttaagggtttggtgggggatggggagattgtttttgttttttggatttttttttcttttggcctcaagtatcatactttcttttgcctgtatccaactgcttctttgagtattttcatctattttaatatgagtgatagatggtgtgctgtgtcgtcaaagtgttcaacattttgttcatttaaacaatagtgtaattcatacatatatagatcatatatagatacatatcttaattgatttgtcacataacttttataaataactggaatttttcattagatcttatacagagaagtattttattaaaaattcaaaagggaagacttttatgtgctcattttgtaatttttgtttttaaatatctttacattgtctgccaattaaagtgttttaaacttgcattggaatggactccgaatgtatttttgtggtgttatattatctgtagatttctagcatgaagttagcctcacaatgctgtgcaaaggattttaaaatatgagagtcactgagagtttaaacatctgttcatgttaaatgctctatggattttaattaaagacttgagaaaaaaaaaaaaaaaaaaaaaa

SEQ ID NO: 1417 - DNA, 2671 bp, Macaca Fascicularis
  misc_feature (1)...(2671): n = A,T,C or G
attcacaggttaactcttttactaaactttgaaaatgagatgtgagtcgtactttcctctttcatttattttaggaaaatgtgagggtggtggtgggttgcgggaaagggaggcaggtaaaaagtcgcagcgcttctaaagtgaatgtgatgttgagttaaattagcctctgatgggcccgaaacctacatgacagatgatgagaagccgctgggcaccctcagcggtgccatgggcacagtggtaacccaaagagtgcaatgaaaagcactgaggtagatcgggctatcggtctcatacaccctccatcagccttgaagttggctttgggaagcacgtctaaagaatcccaggtataatcgtgtggctaagagcttcagcttaggattctaaaaggcctggctttgaaccccagcttggtgtcttcctggttatttaacttctcacatggtcaaggtctcatataaaatggagaggaggagagaatattttccagggtcactgtgggactcagtgagctcttacactgagggtacttatcatcttcgctaggcacaggatgcaccttgaataagtgcaagctggctgggcacggtggctcacgcctggaatcccagtgctttttggacacaggcgggaggattacttgagctcaggagtttgagaccagcctgggcaacatagaccccatttctgcaaaactgaagaaaaaaaaattagccacatagttaggcatgatggtgcatgcctgtagtcccagctactcagaaggcttaaggaggagaaggatctcttgagcccaggagttcaaggctgcggtgagctataatcgcaccaccgtactccagcctgggtgacagagcaagaccctatctctaaaaaaaaaaaaaaaaagatgtacaagctgcctgattattacacttatatctgctttcctgctactcttttttaaatctttgactctgtgtcttagattcctagtgagatcagagtgtacatctaggaccagttaagacgatagcaaagtaaattacaaagcttaagctggataccaaaccctcaattgcctgtctagagttttgtgtattctgtagctacttctcaatctgagtgaaagagcatggagttgagaaaactaagtaaaggtgcagaccagggattggaaacagattgaatctctggtgtcaactcagattgattgtggctgcacagaacaccttgttgatgaggagtctcagattgtggcatgtggcttctcccagaaagagtgcatgattgattagtgatgcctgccaagggtggaggagtgagagccacaggatacctgccagatgtagtttagttgttcctggcacagaatctggcaactgaggagtgatacaaagccacatgttgtgtgtttcagcccaaagatgcttctgttctttcgggcatgcctgttttccttatgttatggatttgcagcttaacaaggcaccagtattttcatgcctagtacatggcttaaagataatttaacaagtgagagctttatatcagccatgggtagccacacttttcctaggtacttgagaagccttctctattgattacattatggtaacaattcacaagatgtcatcctcagataacaagggttatgttttgatgccttaattttaaaagtgtgatttgtctgtgatgatatttgtcatctctttgcaattttgtattaattggggatgaattgcttacattttaataccactaattatagctattactttcatgtgctacttattttacttaaaagaagcaagtctattcttttgtgtaatttttagcaaacttctttctttaaactctgaatgaaaatgcatttaggaaatgcttaatcaagcacagagctatttttctaagattgttctgtcatctcttctaaaaaaaaaaaaaaggcagtgtctttttttgtgatgagtggagtgaacgttaattaatttttctttctcttcagttggtgggttctattatcccacttcttgatgtgtgattgggtgacttcacactttagatagaaagcatgccctgtctaaatgtgatttatgttttccctgcacttttgcacagttcagctgaaattttcttcatgttgatcaaggtcagaaaaccccgggattgtgccatccatctcagcaactaggttgctgaaaaaatttgtgatggaacatgatgcaataacaacagaatccaagggtggggtgggaaactatgcccgtgtgtgtgcgtgcgtctaccacacaaacatcacccaattcacttcttatattgagctgctttttatcaagttacgaggcgttttggccaattctgggttaggatttatttttgcatgaagtcataaaaactgcgtgatcttctttttactgtggccactttaaactaacagctatcagaatttgcggatcaaccagaggcttttcatattttctttgtttttcagattgattgaagtatgattgacaagtaaaaattatatgtttaaggtgtacaacttgatgtttacatattcatagacgttatgtaaaannnnnnnnnnnnnnnnnnnnnnnnnnnnnnnnnnnnnnnnnnnnnnnnnnnnnnnnnnnnnnnnnnnnnnnncaaaaaaaaaaaaaaaaaaaaaaaaaaaaaaaaa

SEQ ID NO: 1418 - DNA, 750 bp, Macaca Fascicularis
  misc_feature (1)...(750): n = A,T,C or G
gagtggggtgggggagacagaagcatgaggtgtccaggttggcatgacagacaccagacatgcaccgtgcatttcagcccctccccaactcccttcccaacccagcccagagcagcaccccccacccccatctcctgccactgccctcaggctggtggctttgcagaggccaggggaccacggtgaggggtgctacagtttgccccatagacaaggacaagaacccttagatgagtctggctgggaggcagggcgatgggaaggaaggtagcccctccgcggagacatgcaggaggtggcccatgggaccccggcggggggtgaggaggtggggttgagcctggagaaaccctaccagtcagaaatctaaggcaagggtcccagcgtcccctccaagcccgcccacccctgcacacatacacacagacacacgggcaacacactcacaaccctgagcacaccccaatggggttcacaccccgagttcctcaggagcctcttgggagcttgggagggggctttcctctcaggccaagactcgcctgagacaatcctcccttctagtgaccaggccagccctctccaggctggggagagggacagccaaagccagggggctaagtggcagcctagcaggcctccccgagctggcagagctggtgactgcagagtctagacaggcagatatggctatacccgcaccggggggcctgnncaggctgtcagnnncccccgggnnnnatactcata

SEQ ID NO: 1419 - DNA, 2224 bp, Macaca Fascicularis
agatgcagctggattggttacagcccagaatttgctttatttgaacacggttccaaccgttatctacattcgatgggccaaaactcggtgattggcacaagagtaggacatttttgaagatgccttggaaaccatctcaatatcttctcactcagatatggcaacaagcagccttcactttgcatcatgtgatacacaacaggcacccagacaacgcggagcatctactgtgaacagttcatcatcaaccaaggtggatctcaagagtggcctcgaagaatgtgctgtggcattgaacttatttctaagcaacaaatttacagatgccttagaattgcttcgcccctgggctaaggagagtatgtaccatgctctgggctacagtaccattgtggtgttgcaggctgtcctgaccttcgagcaacaggacatccaaaatggcatttctgccatgaaggacgctttacaaacctgccaaaaatacaggaaaaaatacacagttgtagaatctttctcaagtcttctttctagaggatccctggagcaactgagtgaagaggaaatgcatgctgaaatctgttatgccgagtgtctcctacagaaagctgcactcacgtttgtgcaggatgaaaatatgatcaacttcatcaaaggtggactcaaaattagaacaagttaccaaatatataaagaatgtctttctattctgcatgaaattcagaagaacaaacttcagcaggaattcttctatgagtttgaagggggtgtcaagcttggcactggggcctttaatttgatgctgtcccttttaccagcaaggattatcagactactggaatttattggattttctggaaatagggagttgggcctcctgcagttacgcgaaggtgcctcaggaaaaagcatgaggtctgcactgtgctgcttaaccatcttagcttttcatacttacatctccctaatacttggtacaggagaagtgaatgttgccgaagcagagcgtctcctggcacccttcctccagcagtttccaaatggctcactcgtgttgttttatcatgcccgaatagagttgctgaaagggaatcttgaagaggcacaagaagtatttcgaaaatgtgtttcagttcaagaagaatggaaacagtttcaccatctctgctactgggagctagtgtggattaatgttttccaacaaaactggatgcaggcatattactattcagatctgctttgcaaagagagtaaatggtccaaggcaacttatgtgttcttgaaagcggcaattttgagtatgcttccagaggaggatgtagtagcaactaatgagaatgtggtaactttattcagacaggtggacagcttgaagcagagaattgccgggaaatctctccctactgagaagtttgctgtgaggaaggctcggcgttactccgcctccttgcctgcacctgtgaagctcatcttacctgccctggaattttaccaaaagcctgtttttcataaagtctcagatatgagcttgcctccttccgataaaaagatttcatccataaaaggaatttttaaaagatcatcatcaatttaaaaaatactctgttattgaattgacctcttactttattagcaacaagaagttgttacatgtaaaactgaatgaaggaaatgatgtatgtctggaatggtttttcaatagtgagcaaaagaaaagacctttctgaaaatctgttggtaactgttgaaaaagctgaggcagctttacaaagtcaaaattttaacagcttctctgtggatgacgagtgcttagtgaagttacttaaaggatgttgcctcaagaacttacagcggcccttgcaagctgaactatgttacaatcatgttgtggaaagtgaaaagctactgaagtatgaccactacctagtgccgttcactttgtttgaattggcatctttgtataaaagccagggggaaattgacaaggccataaagttcctagaaactgcaaggaacaactacaaagattactccttggagtccagactacacttcagaattcaggcagctcttcacctctggagaaaaccttcctcagattgatcagaacttgaaggatggaattttccctcaattagcatcggcaatctgctatagattcaaccttatgttaaagtggaaaagtgatattgtgaataagagacaaaaaaaaaaaaaaaaaaaaaaa

SEQ ID NO: 1420 - DNA, 2662 bp, Macaca Fascicularis
cattcagttcttactgtaagtttctttatagaagatggtcttaagatgtcataaatacagccttttccaatagctttcataatttatctattatcacagatatgttgcatgcctgatacctaaaaactgatgaataaagtttgtgtctcctactcggtaaaactttatcactaactaaagtaacattttcttacatagaagacagggaatttgttgaatacttacaataactagaaatacctgagacatgtgagttttcctctataatagatgactgtagctctttctctttcctttgttactttttcctttttttttttttttttggtagaaatgcgatttcactatgttacccaggctggtcttgaactcgccttaagcaatcctcctgccttggcctcccaagtctgttactcttgattgttatgctggtggaaactaactgatgactagttttagttttaatattattaattcattctctttctctcttgttatgcatcctttcaaggtattcaaaagtattttaacatggatcattatgtttgtactttagaacatggaatctagcagtgtttttagtttattaggaatattttaatttacaggcttgtttcatatatgcaactcagctaccctgtaaataagaaagaacatagaggtataagtgatttttgttgtattatctattggacaatacaagtcagatgctatatattgactattggagcagaacttttgaatctctgtcaccttcagaatgagacaccacactggagagttcacactctcccagttccttccttgttatagccataatctcagccagctgtactcataacactgtgcttactaagaaaaaaacagctacagctatccacgatgtgtgctggctggcctgctcagcatggacctggatggcagatttcagcatctttctggatggtaaatagggcagcagaggtgagagactgtgatactgagctgtgtacacaggcacgcagtatctcagcagtaatcataaaacctgctgaaggagattggtcacctgccactcagcgtgcaagtaattttggcaagtgaccttagaaagcaagtccttgtgagtggtgtaatttagaatccatgcttagtcttttgtattttaggcagataacttgtgaatgacaagaatatttgtgaaaaggaagagaagtagaaatggattctttttttgtagtatttttgtaccaacctaatatttttgtttcaaaatactacaaatcatacaagtgttagaagttagtttgcctataaattacagaggggaaggcacagctgtgaattgaaaggcacagatccttttgaatttgttttcatagcaggctgtgaatcctggagaagattgagaaacctaaatttaaaataattgatatatagaaccactgccacatgaagactgtaagattttagaatgtatcactggaggagccttgtgacttagcagaagaggatccagagctgtctttagatgattaatggggatgctatgagtcacctcttggtgttctttcagacttagaaatgtaggttttgctgtttcctttgagaaattaaactttcttctttttcttttaattaggctgttgtttttttccttttcttttttttcttgtctttttcaatttaccacataaaacatgtttacacatcaatatacatgagcaaatttttcttcatacatttcttccctggagacccatctggtcttaaatagaaactgaacttagattttgatttttttttccattctcatacatgaggttatcccagggaatgtgttcataaagtagtatctcctttcagagggagcaagtgcacactgaaacacatcacttaatatctaattataatgcaactatcagaaggtcatgttgcttttgaacatctatacacagtatgtccaaattaaaagccatcctaaatacaaaaaatcttgaaaggtttagataatatggctatttctaaaaacataggatcttgaaattattatttctcaatttaaatacaatattgttataaagaataactattttatcagtctatatacattgttccatgtactttgtcagtctttaggtattcctgaatcccttttctgtaattttagagaagccagtcagattgttccttttctcagttaaattttattttatttgaatttgccatggaggaaaaggaaagcatccagttgaaatcccttctttgtcattcatgatgcattatatttcaactgagtttctcctccctgtgaggaagctgttctaagaaccagtcttgcaagaataatgattagctagctatttggtaattggagggtggatagattgaatcttgtacgatagatagcattatgttagcaacagtctcacctcacctgagagtgtggcttgtgttctaattaataaatctggggatcaaatacatttacaatgtttataagcttattatatagttaggatttatcagttgtacgtaatacagttaggtttccaatatactgtgatttcagatctcagtaaaaatgttataaaacatgatcacaaaataaaagctgctcttcaaagctgaaaaaaaaaaaaaaaaaaaaaaaaaaaaaaaaaaaaaaaaaaaaaaaaaaaaa

SEQ ID NO: 1421 - DNA, 709 bp, Macaca Fascicularis
cccaacgtgctgggattacaggcgtgagccaccgcgcctggccacttttgaaattctttcaggagattctctagtgaaatgtctgaagactgctgccttgggaattggagccatgggacactttctgcctcggggtgccggctggtaacgcggacctggatggacttcactgccagcttgttccccaaattgctgcgtgagcccagaaaagagaggagagcataaaccctaggggggcacattccccaggatccctgtcttcatggagtggggctcatggggtcaggacttgggtcaactccactccatagcacgaaataacttcctggaggcatgtgcgtgggggaggcttagcccctaaaggacagcccccatgtgactgatggactgtgcatgtgaaatattttattttttctatttactgtcacagatttgggttttcccttctctcatccttctctcccagccacactcaggcctgggctccattctgctgcccaccaggtatgaagtgggttagaagcagcaaggggacccgaagcagcaatgctcccgggagccagtggcgaggggcgcatgttccccagggctactaggaagtcgccccagataacatctcagctgatgacagacttctcatcactaaaagggaaattctagtttccctagtgcaggaatcctgtttgtttgctcacagatgtacctgaca

SEQ ID NO: 1422 - DNA, 777 bp, Macaca Fascicularis
  misc_feature (1)...(777): n = A,T,C or G
cagcactgagtatacagttnnnnnnnnnnnnnnnnnnnnngagcagtggcagggctggacatggggttctagtcctgcccctgcatctgcaccctaggttttcccctcacccctgcctctttgtgcatttnnnnnnnnnnnnnnnnnnnnnnnnnnncagcagatggcgcctttgttccacctaactttccatctttcctaggatgctgatcctcctcccctggcttccagacagacctgggacttggcagtcatgctgggcaatggtgttcctgtggagaccctcagttgtcctattccttcctagcttccctgcaataaaatcaagctgcttttgttggagatgttgtcttgcctagtcttggtgttgcttgctcacatgtaggtggttacgcttactcgggttggagttttgagagttcccacctggaagtcagacaccctgnnnnnnnnnnnnntttgctgtgtgatctttagcaaatcacttcccctctctaggcctcattttttcctcacctataaagtaaaggcattgacccagaacagtgatcccctttnnnnnnnnnnnnnnnnnngatttcatattttgaaaaacttttgtctatcaggtgaattgcacaaaaggttatcaaatgttaaggcaagtggaatagtgggaagaggctgtggagacaaactgcctgggannnnnnnnnnnnnnnnnnacctcccagctgggccacttaacctctcagtgtccacagacataaaatgtgatgatagcatctactgcaaatg

SEQ ID NO: 1423 - DNA, 433 bp, Macaca Fascicularis
  misc_feature (1)...(433): n = A,T,C or G
tcacctgtcctccactgtgggcggagcagcnnncttccagagacacacagactggggaggaagggagggcaaaagaagggcattccctccagcagtttttgggcacctgnnnnnnnnnnnnnnnnnnnnnnnnnnnnnngaaccaaacaactttggtggcctttctggcctctgggtctttgcacttgctgtctcttctgcctggaatgctctttcctcagctgtacacaaggctggcaacttctaattatttgtcagagctgtcnnnnnnnnnnnnnnnacaaagannnnnnnnnnnnnnnnnnnnnnnnnncttggtttctgtctgcctccttcaagatagcaatacttaggccaggtgcggtagctcatgcctgtaaccccagcattttgggaggccgaggagggtagatcgcctgaggtcaggagtttg

SEQ ID NO: 1424 - DNA, 713 bp, Macaca Fascicularis
  misc_feature (1)...(713): n = A,T,C or G
taaatgatattccaacnngtctggaccagctttatnnnnntggtgccgatgtttggagaccttttaaaggtatggagagtcgacttgactacaccgtgtggagcaagttttaaagaagcaaaggactcagaattcatgcttgaagaaatgcaggttagtttaaacttttaaggaaatttttaaggtggcaaaaggttttagtggcatatacaccttaatctgtagatgggagtgattagctgtttgaaagttgaaatgtgactgaaaaggaaattgagtagggaaattttaaatgggattatnnnnnnnnnnnnnnnnnnnnnnnctgttatcctaaactaggtgagtcagcttttggtacatgtgataattttcaatgtaaccaatgatgtaatgattctgccaaatgaaatataatgatatcactataaaaccgttccattttgattctgaggttactctactaacaagcatcacacgtttgttttttgccgtgattaatatgttgtctttgctttcagggtttttaatgaccacagcaagcaagcatgtagctttaccgcttgaaagggtcttgcctcatccaagctggagtgcagtggccctttgaggcttactacagcctcagacttctgggctcaagtgatcctcagcctcccaatggtctttgtagacannnntgatggnnnnnnnnnnnnnaagaagataaaaca

SEQ ID NO: 1425 - DNA, 705 bp, Macaca Fascicularis
  misc_feature (1)...(705): n = A,T,C or G
gagctgccctttggcctgtgcctgttgtgttcctgttgcagtcccgcctggctgagacgggggcaggcgggagagccttcatgcccagattcccacaggacagttggggagctgctggcattgtctttctgggaagattctgctttcttggaccaaatggcagcctggattcccagtgtcaggcctgcatgctgcccctgccccacacacacacacgcgcacacacacagtgcacatgggccatagccacaggccagctctcctccagggtcctttcaacttcactgtccagggaccctctccttcttgcccatggggcttccatctggcagagaacgctcagggctggttgaacttgaaagcacattagacttaagctgtcacctgtgcttggtgccccaggaacagccagagaggacagtgcccactcacttctccttgttggcagcctcctgtgcaggaagtgccagccgggcctcaacnnnnnnnnnnnnnnnnnnnnctgaggaggagcgggaggcggnnnnnnnnnncaggcggggactcctctcctctgccctgaccttaccctccatcctgcctcnnnnnnnnnnnnngggctggggggtgggcggaatcagtgttttaatcggatttttaaaaaacattttatttctttgtacaattaccatcctatgtaaagatgaaatttgtgttgagtgaaga

SEQ ID NO: 1426 - DNA, 2141 bp, Macaca Fascicularis
cactctgcatgtccatctctttcttgctctctgtctcattctgcccatccactccggcatctctgggtccccacatcgctatctccctgggggtctttgtctctttgtgccaggtctttttgcttttctctctctgtgtctctctctgcccatctctgcctctctgtgtctctgtcttccctgagggggtatgtgtctgtctgtctgtccactgggtctcaggcaactgaaaataccccctgcgtcctatttgatgtgcagttgtgagattccctttgaatattgcagcagcgagttgacggttgccaagggaacagagatgatccctgcacagcacccagcacggtgccacactggcctggccggacacacaccagcctctgctgtccaagttagagaaccctgtgaacttggactggacttgaaccatctgcttctggaatggccccggttgtttcaccagcatttactcacttgtacaccagagtcgtctatgaggaaattgaggaattcagcaactataatacagaaatgaaagtgcaatgatttggggaaatacaggaagtcaggggatcaaagaagcagatgcccctctgctcccaccaccctgttaatggaaggcagagccggagggtaccaccagatgaggtctgagcagggtctggtggggtgtgtgggcgtctactgggtgcattgtgcgaagctgggtttggaggggggcgtgcacggactgtagacaggtgtggagctgggtgtgaagcccacctgggcagattagaaggacctggagtggggtgaaggctccttgcagggaggccagggggctcaggagagggctgagcgcctacattctcttccccactcccagctacctgtgcggaactgagttgaagaacaagactgttaccatcctgggacttccagccccagccagccattgcttctgcaggaccggactgcagggagccagctctgcccaacaagaacccccaggagggaagggcttctcctttcagccacctgcccctcgtcccctcccaaggcagcctgaagcctatcctctgtccctctctctccggttgctttgaccgcatctgttcccattagttatcctacctctttctaagagatgcctggtgagggtggggctcggtggtagggacagtgccactgctctgtcctggagcctgcatgtggctccgtgtagtctcttctcaaggtggaagcttctcccctcttgtcaaaccctgttccggcagctccaagtgccagctgatgctgcccagggcgtctgagctgtctttctcacaacctgcaggaaatgtgggtctgcagcctccaccattgggtgagagggaaccagtattggcaacgggactgggagaaggacacagtctgtaatggaggctcctgcgcacgaccccctcttcctctgcctcctgcagacccgctgcttctctacgtggtgcacccccccgctgttcctcaggatctgtgagtaaccggccgtctttcaaatggcagtctgctcctctgctggcctcaccacactgagcatttaatgcagcctcccagggtgtgtgccaggcccctccacatgcccctgcaggcccatcgctttcttcctcttctcggggcgctggaagcctgtctttggcaaggatgacccctgtagactctgggcttctggcttccaggcatctttggagacaccagccagaaccctaagggcagggggagagtgaggttggggggattatccccgtgcccttccctacagggcataggctctctgagttactctgcagaggccacggctcttcttgggtgccccgctcccatacgggttctttctctgggttccgggatgtgctttcttttctcaccctgcaggtcttggcatggcaagggcttcctgctgtcgctggccccaagtgcttcaccgtcaccatttccttgagccctgatggctctttgtaaacagtcctgagtgaaatgctccttcattgttccactggtgcagagtcttgctttgtcacccagactaggttgcagtgagctgagatcgtgccattgtattccaacctgggcaacaagagcgaaactccttctcaaaaaaaaaaaaaaaaaaaaaaaaaaaa

SEQ ID NO: 1427 - DNA, 770 bp, Macaca Fascicularis
  misc_feature (1)...(770): n = A,T,C or G
ttgcannnntgtgtgtagtttnnnnnnatttnnnnncagaaatagtttccaaaaagatcattacatctcctgatatgatttgtataatnnncagttctagctaaaaataatgtaaagaactcnnnnnnnnnnnnnnnnnnnnttacaatgaactgtgccctcctattccccatattttatccttgtttcttattttatagtgtgggatacacatgagtggtgttttctttgtgcactgaggcaagcctatttttaaaatatttagggagaagtactttcgttcatgcttcttgtacaacttttttctgttggttagctttggttggattacaaannnnnnnnnnnnnnnnnnnnttgccttatttcatgtaaaatttatgtcattcagttttnnnnnnngagtttgaagcatcagtggtatttcttatctacttgttacatatagtttttcaagtaatgactgtgattgtgaccgagtaatgtgcactttttcttgtaactgnnnnnnnnnnnnnnnnnntttcttctagtgtttctagaattactgttccttacagttacgtaaacaaaaaacaaaacaaaacaaacaaaaaaaaacttttgtgatactgttggtgaatataatgtgaaaatcttattgaaatatgagtattttgggaatacatagctgcacaaacatcttttaagatgtggatttagagtttgcttatttaaatgaaaattcaaaaattgagggctggtataattttctctgttttgtttggtttaat

SEQ ID NO: 1428 - DNA, 632 bp, Macaca Fascicularis
tagggagtagttttcattctacatgaactgaaataatatgattactccaataattggttaaaaatactgtacaaatcaaaatagtactaaaatactgtggaattttagcatttttattttgcactttgtgtggattgaggtattcagaaataccaaccataaaaatctaatctagttggcaaagatatgcatcaaagcacagaacctaacatgcatttattttgataatttttgagggtttttgtcaaatagcatgtgaagggttacatttttcttaagattggtggtcccaatgtcaaatttcttgaaacacataactgaatgatagatttttttttaaagataaaactttacaacctgcacatttgttatgcatactaaatggtgtgttaaaagtagggtttctttgcctctctacagtacactaatctgcctaaaggtggttgtttcatatttataatgctaattgtcatacctacctactttagattttaggtagaaaattatctgatttcaatacagacacatatttttctcacattgagtcatatgcataatgtagttccaaatgtatttcattactatagtcacaatatccaacaaaaatttacactagctataattgtaccgac

SEQ ID NO: 1429 - DNA, 2868 bp, Macaca Fascicularis
  misc_feature (1)...(2868): n = A,T,C or G
aaaaaaaaattacattggtgttaataattttgatagggtcttgatattcttaaaggatttgtcttgtcatcattataaatcttcatcttggcaaatgcactatagcaggcagtgtcttcacctctaacaagggaataaagatgtttacctcatgagtctgtatgaatgaaatggtatactcatcacctatttattatttttgccagaatgattaaagtgaatctgatcatgaggaaatagccagtcagattcataatgcaagacgttctacagcacagttgacacctgactgtttacagtgttcagtgtcatgaaagacattgatgtcttccacaggagataatataatcttacttgggaagctaatgaattcatttcaacataccagccttttagacaacagaattcatatttgtgccttatcaagttatgtacagtaatattatggaacttttgattgtttgcagataaaaacctaaaatgctaatgggagtgtcattaggaatttatgaatgtaatgttgttgagttcttttattataattatttttttgtccattatggcagtgcatattggagttggagaacctgacttcattttgggacagttgtatcacctatcttcagtacaggcacctgaagtagccaaatcttgggcagcgttggccagctgggcttataggtggggcagaaaggtggttgacaatgccaggtatgtttaaatgtgtagtttatgcattgcataaatagatatttaaatgtctgctgatatggtaaagttttggtagctaaaatactgatgacttgttcatttttatagtcagggagaaggtgttcgtctgttgcctagagagaaatctgaagttcagaatctgcttccagacactataactgaggaagagaaagagagaatatatggtattcttggacaggctgtatgtcggccagcggggattcaggcaaggaaaacatggtgcttggggcaagactgctactccaaatcattgattttgagaaaactgatcatatatatttgataaaatattgaatggggcttaccaattgttgttgtaaacaaaaacttctacgttttaagatgaaaatgagttatatttttctaagaagaatatacttcttttgagaaaataaggcatttccttagagtcctgttaaaagtaggtgaagttggcctggcatgnnnnnnnnnnnnnnnnnnnnnnnnnnnnnnnnnnnnnnnnnnnnnnnnnnnnnnnnnnnnnnnnnnnnnnnnnnnnnnnnnnnnnnnnnnnnnnnnnnnnnnnnnnnnnnnnnnnnnnnnnnnnnnnnnnnnnnnnnnnnnnnnnnnnnnnnnnnnnnnnnnnnnnnnnnnnnnnnnnnnccatttgaaggttgcagtgagatcgcaccactgcactccagcctgggtgacagagtgagactgtctcaaaagaaaaaattaataagttcattttaggtaaattaaatttctttttaacttactcatcagaaattgtagttcttaacccttggttatgagcttttaaaatatgccagtgcatgaaacttacccccatttattctgaatgagacatgcgcgaaagtagtcatatctgtcaatctttttaaaagttgcatctggatttcgagtggtaatttaaaagcctttccatataccaaggttatagagaagttcatgtgtgtttcttctagtacttgaatggttttgtgttttacatttatgtatctaatccattttgagcttattttcatgtatggtgtgagtaatggatcttatttcatcttttttccaaatgattatttgtcccaacagcatttgttttagaaagccttctgtgttccagtgatttgagataacacctgatcatgtactagatttccacttgcagttatgtctgttgagagattttctgttggtctgttgtttccaatttttctctaaaatgattaatgctgtgataattaccttatgcaaaaggctttacccacatttcagattatttcctgaaaataaatcatgtaagtagcacaaatacttaatcaaaggatatgcagtgttaacaaggcttttgataattgctacgttatcttctaggaaacattctaccaatttatattaccaccagcagaaaatgtttgagagcatcctttcttacaatgagtataatcttttaaagtatcttttataattttgataatcaaaaattatatttaaattttatttgcctttttagagatttttggtgatgcataaattttcatgttggcttatttatatgtgtatgaattctctgcattttcttttcccatttctcctttggggtattgagctgtttatacaccaaatgaaaagcacatttttattcctttatctccctagtgaaataaaattctcaactatccaattagagcctgcctatctgatttttttcaatctctaatgctgttttcatgaatataaataaccctcagccaaggtattagcatttccagctgctacgcattagttcaaagtatattacaaagaaagggagctataaacatgcttatcccaaaggagcttacaaggtagccttttgcactttgggaggccgaagcaggtggatcacctgaggtaaatagttcgnnnnnnnnnnnnnnnnnnnnnnnnnnnnnnnnnnnnnnnnnnnnnnnnnnnnnnnnnnnnnnnnnnnnnnnnnnnnnnnnnnnnnnnnnnnnnnnnnnnnnnnnnnnnnnnnnnnnnnnnnnnnnnnnnnnnnnnnnnnnnnnnnnnnnnnnnnnnnnnnnnnnnnnnnnnnnnnnnnnnnnnnnnnnnnnnnnnnnnnncaaaaaaaaaaaaaaaaaaaaaaaa

SEQ ID NO: 1430 - DNA, 723 bp, Macaca Fascicularis
  misc_feature (1)...(723): n = A,T,C or G
aaagcatttcgcnnnnnnnnnnnnnnnnnnnnnnnctcacctaaagagaccaaggctcagaaagaaaacttaagatgtgaaaataatgcataaaagacagcattttttgtgctaccaattctgccttactgnnnnnnnaaattaaatacagcttggaaagagggggagaaaaaaaaagtaagaaaaaatacaattagctagcaaatatggataggtttacttagaaatcctgtttctaaatgcaagtcaagctttattgttagacttgttgctactcattaacccaaatatttgtacaaaaaactaaagagtctcattgaacgaatgtaaaatcctgcaatatccttgaaatccaaaagaggcccatgacatagacccaaaggtattcatgagttattcatttaaatgcctggaactgacttcttgataaaaatataaaaaataatttccatgtaagttaccagaaagcccaccagcaacttaatnnnnnnnnnnnnnnnattactttaaaaaatgcagcttacataaaactacttatgcctattttatttctaatccatcacttcaaaagatggtagtctttcagctcattactccttcattttttaatgtctcatttttttctaacacaatcaaaaacttttatttataaaaagtcttgaaaaatatagacaatctttaacgtattatttgtacttatattctatctataggtacaataaa

SEQ ID NO: 1431 - DNA, 732 bp, Macaca Fascicularis
  misc_feature (1)...(732): n = A,T,C or G
actgaaattggctacacaannnagtcagttttgannnnngaccaacatgancnnncacagaatnntccaggtgagtctttactatggggtgctcacaaaggatacttctataggnnnaagacaaagagctgactggcctatttatctgatcaagaacatgtcagcaatgtctctttatgctctaaaattctattacactataataatatattgtaaagatcctacagctttctttttttttttgcgtagtgggagggagttttgctctnnnnnnnnnnnnnnnnnnnnnnnnnnnnnnnnnnnnnnnnnnnnnnnnnnnnnnnnnnnnnnnnnnnnnnnnnnnnnnnnnnnnnnnnnnnnnnnnnnnnnnnnnnnnnnnnnnnnnnnnnnnnnnnnnnnnnnnnnnnnnnnnnnnnnnnnnnnnnnnnnnnnnnnnnnnnnnnnnnnnnnncaaactcctgacctcaggtgatccgcccacctcagcctcccaaagtgcagggattacagacatgagccaccacacctggccagaccctatatcataggtaagacatataatgcagtctaattacatttcacttcaaggctcaatgctatcctaactaatgataagaattttctattaaaccagaaattggtagaaggatttaaataagtaaaagctactatgtactgccttaaatgtacctatggcaatttagctctcttgggttcccaaatccctctcac

SEQ ID NO: 1432 - DNA, 950 bp, Macaca Fascicularis
  misc_feature (1)...(950): n = A,T,C or G
gcaaagcagatataaaataagcatggacgcatgannnnaggtcaacgtatttaattatttttacttaaaataggcatttttggttggggaagagaaggatgaacaatttgatgtcacctttaatattgcactttttaattctgcttttgggaccacttgatctagaatgccttgannnnnnnnnnnnnnnnnnnnnnnnnactgagttaagcaaaacaagaaaagaaagtaggggtggggtggtacccagataatgcaaatgcaggatgtattgtnnnnnnnnnnnnnnnnnnnnnnnnnnnnnntgttttgataatgtctggtaattaatcatctcactgattacatgtctttttttctatttgtttgtaatcttgtatcttcaaatgtgtggaagatgtgcagacttattttcaggtatctgagataggaagggccaatgttggcataatttgaacccacatttcagctacttgggggctaacaggcggacaccacctggaaacacttacctgtaccatctgttttgcaaacacaatgattagcatcttgctgaatgatgaccccagtgtgannnnnnnnnnnnnnngtttatttctggatctatgagttactttagcagagttattagtagtttatnnnnnnnnnnnnnnnnnnnnnnnnnnnnnnnnnnnnnnnatttgaattgtgcactatgttgattactgtatataaatgtggaaattctgtatatttggtcttaatgctgtatgtatttgatgtgtaaatgataactaatggatatgaaatagttttctgtgaatgtctttattnnnnnnnncttctgttttgcaaatttgaatgtttaaatnnnnnnnnnatggggaaaatctgaaatgtttgcatctaatatactgttaagtggtggtctcttagatgattgggagnnnnnnnnnnnnnnnnnnnnnaca

SEQ ID NO: 1433 - DNA, 1744 bp, Macaca Fascicularis
  misc_feature (1)...(1744): n = A,T,C or G
cagatgttttatcggacacttgctttttctaggccactcagggttccagtaccagacatagtgcactgctatacttgtatccttgggaatagcagcttataataactggaaattagatatgcatgagagggtaagaaggctaggatcgaaatgttaagatgtagaaagtaggttagaggccagagctgtataataggtgaagggaaataattacttaacaagaaaattgtgtccagggttggtgctgaggacagtaaataaggcatgacccataaaggatgcaaaaatcacatgaagagttagtgctgctggttcttaaaactcacatgcagtatctcattcagtcgttggggcctgaaaagtagggtttatagccccacttcatggatagctaaactaagaatggaaaaaactgtggcttgcctaacagtcatgaaggcaggtgagaattcaaatgtaagttctctagttgcaaagcgtctttctttctactacaccagagagtaagattagaagagaaagaaacagaggcaaaaggaacaaatacagcaatgtctgccctttgatgtcctccaccagttcttccttgagtgaggattgagttctactcgagttctgatttaagaaatattgatagagaggtagcgagatttatttccaccccatctaccagatttctgggacagccttcctctcagtggaaactaactcaccattctcatattgtctttacagcaacttctagagctgcagcttttagcttgctgtgaacaagaatagctagcttttattaagcacttactctctgccagacagtgttctaaatttaattcaattaaatttcataatgtgcctatgaagtagggtctggtattttctacattttacatatgagcaaattgaggcatagagaaaggatctttcctgagatttcacaagtaaaaggaggacctgtgttttaaacctagtaagtcttaagccacaatgttgtgctacctctcaactgaaaggtgagtagctaccataaactaatagttgtcagtgctttgccaggaattgaatcattacaactctggaggcaggtccttttattatgttgtttttattttacaggtggggaaactgagtcacggggaggttaaactatttgcccctagttacacagctaccaagtagtggaattgggattcaaatcccagcagatctgagccagttcttgataaaattgcaattatatgaaagtctattattggtctttaaattattaagatgttagtgaacttggaaggtgaagggaatctgatcaccttttttccatcctgcttgcttatcagttgagggctatagaatcaagattgtatggactaggtagaaaactgctttttatcttaggcaaataagtcattacactcacttgtataagaaaggagtgagattatatggcatctcttgtaactgtcactaaagaatatctccctgtaatcccagcactttgggaggccgaggcgggcggatcacaaggtcaggagatcgagaccacnnnnnnnnnnnnnnnnnnnnnnnnnnnnnnnnnnnnnnnnnnnnnnnnnnnnnnnnnnnnnnnnnnnnnnnnnnnnnnnnnnnnnnnnnnnnnnnnnnnnnnnnnnnnnnnnnnnnnnnnnnnnnnnnnnnnnnnnnnnnnnnnnnnnnnnnnnnnnnnnnnnnnnnnnnnnnnnnnnnnnncaaaaaaaaaaaaaaaaaaaaa

SEQ ID NO: 1434 - DNA, 1108 bp, Macaca Fascicularis
gtaggaagctgagagatcctctgcaggaggggattacagcagctaggggcacctgccaggctggaggtgtgggttatctaggggaagggtggtcactgatgtccagcaggagcccttgacaggtagagcccatcacagcatctccaagaccacaccatgttcctgttctcccgtaagaccaagacccctatcagtacctacagtgactcctacagggctcccacctccatcaaggaggtctataaggacccacctctatgtgcctgggaagccaacaagtttctgactccgggtctgactcataccatggagcaacatgtggatcccgaagccttgcagaagatggccaaatgtgctatacaggactacacttatagggggcccatatcaggccacccctacttgcctgagaagtactggctttcttaagaggaagcagacaaatgcagcccaaactacctgggcagtaaccggtacaacacatggaggatggaaccttacaacagcagctgctgtaacaagtataccacctaccttcctcggctgcctaaggaggccgggatgcccttggaatgccctcctaagccggagcggctcaatgcctacgagcgcgaagtgatggtgagcatgctgaactcactgtcgcggaaccagcagctgccgcggatcacgccccgatgcggatgcgtggacccgctgcccggccgcttgcccttccacggttacgaaagtgcttgctcaggccgccactactgtctgcgtgggatggactactacgccagcggggcgccctgcaccgaccgccgcctgcggccttggtgccgggagctaccgactttgtgtacctccctacgagcaccggcccggaatgcagtgtgctgttacaactcccccgccgtcatactacccatatccgaaccttagatgggacacaagtcacttcaagaagtctggtggtccccagagaaacaactatgttatccaccctgagtttgtgtctgagacctatcctgactatcgttgctggtagagcctgggcttgctgggccacggggacagagcaataaataaactcttcacccccaaaaaaaaaaaaaaaaaaaaaaaa

SEQ ID NO: 1435 - DNA, 106 bp, Macaca Fascicularis
tctttgccgcgtgggtttgttttctgtctctgtgcctctggcttcccaaagagatccaggtctttgcgtttccagggcgtgtatcttttgtcctggtttctgcctc

SEQ ID NO: 1436 - DNA, 717 bp, Macaca Fascicularis
  misc_feature (1)...(717): n = A,T,C or G
acaggnnnnnnnnnnnnnnnnnggccctctatttctaannnnnnnnnnnnnnnnnnnnnaacttaagaatgaacacaacgtgtcagggtactgaggttcagataatgtggcaggttgtattttctgannnnnnnnnnnnnnnnnnnnnnnnnnnnncatgctcttctagaccnnnnnacttcccgagcaagaggcaggatctatatctcctctcattgaagctgagtggcccttggtgactgcctcaaccaacagaggatggcagagtggtgctatgtgattttagaggctaggtcannnnnnnnnnnnnnnnnnnnnnnnnnnnnnnnnnnntgttcattcatggaactcactcaccatgaggaagcccaagcaaggcatgcnnnnnnnnnnnnnnngagcaactgaggctcctggcccatagccctgctgaactctcagccgtccatcagccagcaaccacttgccagccattgaaataaattcccatccttcatctataaggggcagagatgagccatccctgctgagccctgnnnnnnnnnnnnnnnnnnnnnnnnnnnnnnnnnnnnnnnnnnnnnnnnnnnnnnnnnnnnnnnnnnnnnatggataactgatacaaataagtaaggtaacttgtgcaagatcataaagtgtaatttccagagctagcactcaaaccaatgtctttctggccccaagtcnnnctctaccact

SEQ ID NO: 1437 - DNA, 746 bp, Macaca Fascicularis
  misc_feature (1)...(746): n = A,T,C or G
tgggtggnctatggagcactgtttgtgacccccagggagtgtcaaaggctgagggccaagaggccagaggtcctggagcctgggtggacaggtggatctagggtgaatgacttgctgcttcccaaccttagtttgtgccttctgtgaaaaacagagagaaggaggaggaagatctcaaaaagcctttctggcccagtacgnnnnnnnnnnnnnnnnnnnnnnnnnnnnnnnnnnnnnnnnnnnnnnnnnnnnnnnnnnnnnnnnnnnnnnnnnnnnnnnnnnnnnnnnnnnnnnnnnnnnnnnnnnnnnnnnnnnnnnnnnnnnnnnnnnnnnnnnnnnnnnnnnnnnnnnnnnnnnnnnnnnnnnnnnnnnnnnnnnnnnnnnnnnnnnnnnnnnnnnnnnnnnnnnnnnnnnnnnnnnnnnnnnnnnnnnnnnnnnnnnnnnnnnnnaaaaacagagataagtatcaaaaaaaaaaaaaaaaagctgttgcagcccctgttgagcctttgacaccgcctgactcccaggaggaggaggaggaggaagaaataccaatgacccagagacaccagaagtccatgtggaggcacacagcagctggtggcagagcccaggctgggacctgccctcaagagaatgagtggggaggaggagggaggaagggcagataaaacgtccttcccagggccccctgcaacgaagaaggtactttttacaagagctgtcatgntaccctaaatggc

SEQ ID NO: 1438 - DNA, 517 bp, Macaca Fascicularis
  misc_feature (1)...(517): n = A,T,C or G
aaaaaaaaaacagtgacacatatatatattatatgatccaggtggtttttagtctttactgatgaaagggtgttcatgttagtttctttttctcaaaaccctatctaatactaggcaaagtagccaagagccttttgttttgtttttattttgataaattagtggggaaattaagtcggcattttaagaggagtctcttctcaacttagctgagtcaaattcttctcttccctaaccagtgaaactaagtggatatcccagaaacttgtcttctaaaagggaggactccaggccatcaataaagatgtccagggagtgagcgtactttctacaccctgtagaattgtgggctgtagcgttactctgattttctgtctagtatcagagaatgctggtagcttaaaatttttattttaggacttgtactctgaattttcaggaaccatcaaaggagtagcagcaaattcacatattttcgacttgagaaatgcttgtggtgtgtgttttccanaactgc

SEQ ID NO: 1439 - DNA, 2203 bp, Macaca Fascicularis
  misc_feature (1)...(2203): n = A,T,C or G
cccatgcccatatgtctttatttcttcttgataaacctataatatttgatgctactgactaattccaaggagtattctgattccattaaaaattctgcagtagtggaggacattattattttcttgtatgccattagtaacatgatgcacatttttgaagagcggctttattcgaaatgaaagggaaattttaaaaatggaaatatatgagtttgtaaagcacaacttgcatatgtcaaagaaactaaagtttaactcagcttagctgaagtaacttttctaacatacaagccaagagttttctttcttcttagtattgctttgtcaggaagcctgaaggatatttaggtagatcctatccttcattcaagttagaccactttatctgtttctcatagctgttatttggacctcatttttctctctgccacctggcctgacctctatggaagtttaagtctgtttacctcctcttagctgcctaccatggaaagcaaaagactccaacacgtcaaagttgcagagccctgttagatgcccagtttcctacaggaggcatgtctccactcttcctactttctgagattctctctagtaaagtcagtcatgtccattttttttcccacccttcctaatttccagataaatgttttttccttggcttagagtagaaaaatacttcaacacatatattctcatccaggtaatcaccaagtttattaaaaatgcatgtgctgaatgatagactaattaaaaagaaagatagccctttttcccaaatgaatattcacattttcttgttttcctaataccaaatgtccatccatagagatttgtgccaaggatgttggcaggttttacatcaattactggtattttatgagagaaaatgaattaagaagaagtgttctggggaagcaattattcactttgtttttctcaacttactctttttttcattctatttcagtcttggtttcttttggcttttcttccattgacaatctttttcccttttatttttgtttacattcaaaaatgtcctactctgcttctaactttttattcttttaatcaaaacttactcctcaaaatatggggtcttaagtttaaaatgtagttaaaaacatgttaaaattgtttcttcggctgggcatgnnnnnnnnnnnnnnnnnnnnnnnnnnnnnnnnnnnnnnnnnnnnnnnnnnnnnnnnnnnnnnnnnnnnnnnnnnnnnnnnnnnnnnnnnnnnnnnnnnnnnnnnnnnnnnnnnnnnnnnnnnnnnnnnnnnnnnnnnnnnnnnnnnnnnnnnnnnnnnnnnnnnnnnnnnnnnnnnnnnnnnnnnnnnnnnnnnnnnnnnnnnnnnnnnnnnnnnnnnnnnnnnnnnnnnnnnnnnnnnnnnnnnnnnnnnnnnnnnnnnnnnnnnnnnncaaaaaaaaaaaaaaaaaaaaaaaaaaaaaaaattgtatcttcatattagattcagttgtcttaggaagtgaagaaagaaggatgaagaggaaattatctcttggattgctttccaggaattccttctctatactttaaaagctcttattcttttctaggagtccaatgtgctgattgctgctaacagtcagggtacaattaaggtaagctatttactgtatctccattttaaactcaggaccatttttagactgaaacaggattatggaaatataccattgtactgagtcttagcgatcatcccaaatcatgggtctctgtctcctggcaaatggcttgatttaaggaaaaagaataggtagcttgcatctgtggagaagatgatagtgcttgttgaagttgtatggatgctagatggattaatagatggtcagtttgaaaaacagataaagactagtgaacattcactgggggctaagcacagtttagcttctgttatgccagtacaactatcccacagggctttcagtagacagaacccaaaacatagcaggagatgcaagatatagcagaagatgcttacacatcaccagatttaaacatatgttagtcttattttattctcttcctcatggttctctttcttctgttccccaaaaagtaggtttttcctcagttgtcaaaggggggggacaagttattttagtgttcagttgaaaattgatagatgtgattcaaggaagcctagccataaaacaaaaaaaaaaaaaaaaa

SEQ ID NO: 1440 - DNA, 774 bp, Macaca Fascicularis
  misc_feature (1)...(774): n = A,T,C or G
cggaagacatcccaacaagagcatgnnnatgaagcggccatctcattgtgctgtatagtggtttttaccatggnnnnatatcatgctctgtcggaagacatcccaacaagagcatgtctatgaagcggccagaatctaggcaacaactacnnnnnnnnnnnnnnnataggacaggagtaccagannnnnnnnnnnnnnnnnnnnnnnnnnncccacctactggacacagttcctctggattatgagttnnnnnnnnnnnaggnnnnnnnnnnnnnnnnnnnnngccccactaggccaggatctgctgacataattgtctattcagtccttgccttctgcatggccttcttnnnnnnnnnnnnnnnnnnnnnnnnnnccaaagtgtctgccctgccaacactggggcccctgggagtcactggctttgccttnnnnnnnnnnnnnnnnnnnnnnnnnnnnnnnnnnnnnnnnnnnnnnnnnnnnnnnttctagtatctctgctgggggcttctggtactcctctctaaataccagaaggaagatgcccatagcactgggacttggtcatcatgcctacagacactattnnnnnnnnnnnnnnnnnnnnnnnnnnnccagagggaggctnnnnnnnnnnnnnnnngagnnnnnnnnnnnnnnnngatcatttctctttcttcagggccagacagcttttaattgaaattgtcatttcacagaccagggttcaattctgctcctannnntgtaagtctaatgttctgactctcttct

SEQ ID NO: 1441 - DNA, 703 bp, Macaca Fascicularis
gaattagtaatgtttataaatttgtttagtttgtaaattattatcagaaatagtaatgtctataaaccactttaagagacaatcaggaactatgatgagggcgataataaaaggataagtcttataaaaaattaacctggatgttacgcttgctctaaggctaagtcacttagggaaacaaattcagtattatccaatggcttaatcctccttctttttgttccctttttggtggtggctgggttacaaagagtagtgtcttcttccctgaagttagtactagtatggcaggtgcctagaggtcaattattggtttagaagagattcaggctcttaatttctacatgtgcttcccaggaaaggggacactttctttctcagccctgtgtgaggactacgttagcccagaacgtgttctcagatcactgggtgcccattctcagttctaggaacaggaagaccctggtttcctggcagaatttatggaccctacagctttctctccatcaaactttaagtcacagtaagataggactctggagtcacaggcacacccaggagaggtcagcatccttatgctgattcctggtcctggacatgggtcttaagatccagtagtcagtaagtctgttgccaagtcacggactggctagatctctccataacagaagaacgccctaaggaacgcatacatgctgacctg

SEQ ID NO: 1442 - DNA, 721 bp, Macaca Fascicularis
  misc_feature (1)...(721): n = A,T,C or G
agcnnnnnnnnnnnnnnnnnnnnnnnnnnnnnnnnnnnnnnncccctatggccaggggactgtctgctagcctcccagacccatgccctcctgacgcccctgcactgaggcacagattgtgaaggcagatgccccctcaaccctccactggagcctctgacaccacaggtgccctggagcccttgtgtgactcagcctctgttagctgggtgggtgtcaccagcccctgcctcccaggccagaacctgagaacgggcccagggtgctgtggagatcaacttcaaaagagctaaccccttcccacactccacccacccacctacatttcctctgtgaaatctacctcagagttgtaccctcagaaggacgggtaagcaggaggccagggggtccccagggctgagatggggagccttctacggcgaaagcctgccaccccacaatgaatccaccccgctccactgcgcgcctctcccaggtctcagctccgggcggggagcagtggccgcnnnnnnnnnnnnnnnnnnnnnnnnnnnnnnnnnnnnnnnnnnnnnnnnnnnnnnnnnnnnnnncctccatagagcaggggagtgaaggggtgtgtcaggcggggaaggggccaaggacatgtctttgtaccctgagcatccccagggaggggaaatggggaagggggcctggagaggggaggtggggccccctgtgctctctaacaagtaaa

SEQ ID NO: 1443 - DNA, 751 bp, Macaca Fascicularis
tggggcttgccctgtgtgtgcacaagcatcatgtcttgcctgtatgaagccttttggccctctgtgtactaggtggaatcttctcaacactgtagggccatttcacctcatggtttcatggcagggacatttgcttccttcacaagcctgtgtgaacaagcaaaagtacccacctcttcggtcacccacagagccaccaaagattccatgtcccagagcttcccatagcagacctgaaaagtccttggcctgagctttggccatggtagtggagtggaacaggaaatagcccagcagaggagtgtgggggaagggggcaggagagattcaagaataagggagacctggactctgcctttttgggaaaaggaaccaagcccatatcaatttggctgataacacaatcagacttttccaggttaagcttcctttctgttatactttcatcattgtgatgctgtggtagaaagtaaacaacagtagtggctcagtcatttaatctttcccctctgtaatacaacttatttgaaatttaaatcaagaaaaaatttctgactctgagctcggttggtggcatgctatgccaggggtcagtgggggagcttgcttctgagccccctgttgtccacctggagtcctgcttgtcttccccagctgtgctgagtggctcttctgtctccctggggtccttggcacatctgctttcccagctctgtgaccttaccagttctctcctcagctacttggtggt

SEQ ID NO: 1444 - DNA, 694 bp, Macaca Fascicularis
gacccaacagaaggattaaggagtcagtgtgagtcctcaccatgctcgctggcttggtaggggctggttgcctctgctgtgttctccaaggcttcgctgccttttctctagcgagctagtttcttacgatgggtgatttgtactcacggaccgtgtggagcttctgaatttcctttctaggtgagagcaggtgatggggctcatcgtgagctgtgtacagtgactgttcccaggtgttcccatcagctccaaggtgtaaaatctcattttctcaggatgggtaaagcttctctcaggagaatgccacaaacctcaggcacagtctgatgctaacaatgacttagattttgaaggctgttattacagttagaggtaggactgtgggtccctcaagctttctttcagcatgaagacagtttgtccttctctgtgtactggccggtgtggtatcagctgtgtcttttgtaacccagccttgctgtgaagggggagaaaggatacaggagtcaggttctcagagaagcagaatttgttcatcattgttgttcatttcctttctgggcgttgtattccattaattcaggtagagcgaggtgcacatcaagaggcgttttccagaactgggtgtggcggctcacgcctgcgatcccggcacttgggagattgagacaggagtactgctgaagccaggagt

SEQ ID NO: 1445 - DNA, 728 bp, Macaca Fascicularis
  misc_feature (1)...(728): n = A,T,C or G
tccactccaaagacgcccagtcaggacgcctccagccggctgagccttcggaggaggaccagctacagcctggcgtaaagcttgagaggnnnnnnnnnnntggacacaggagccagcacccttggggtctgacattgccctcctccacccttcagcacccnnnnnnnnnnnnnnncactcggtctttttccctgggatgtggagtnnnnnnnnnnnnnnnnnnnnnnnnnnngcctgtgcttcaggaccccacttggcacttcttgtctgttgccttcagactatctcnnnnnnnnnnnnnnnnnnnnnnnnnnnnnnnnnnnnnnnctctagaaaaaggaggctcctgcccaacctggcttgtggaccctgtgggagccccaggcccaacaacctgcgtggacagcaaagctccctgacagaaggacagacacaaggactcctgtttgtcccagggctccagtggacatctgctgaggacacagagaggtgagannnnnnnnnnnnnnnnnnagagtgtggacaggcagacatgcccaagatgtatgattagggagacacagacagacccagggaggccaacgggccccagggagaacgggacagccgtggggatgggactgagcagggcgggcgctgaggtgctcctcaagccnnnnnnnnnnnnnnnnnnnnnnnnnnnctgtttctatcagggtcagaaatggctatcgagccagtaaagatcc

SEQ ID NO: 1446 - DNA, 441 bp, Macaca Fascicularis
  misc_feature (1)...(441): n = A,T,C or G
caccaccctccctctgcacctgtccgaggcatttgaaccagagcaactccattttgaataggggccggtaaaataaggctaagacctactgggnnnnnnnnnnnnnnngttaaggcattctaagtcacaggatgagatatgaggtcggcacaagatacaggtcataaagaccacgctgataaaacaggttgctgtagagaagctggctaaaacccaaaatggcaacaagatgtgtcctttggtcgtcctcactgctacactcccaccaccaccatgacagtttacaaannnnnnnnnnnnnnnnnnnngttaccctatatggtctgaaaaggggaggcatgaataatccacctcttgtttagtatatattcaagaaataaccattaaaatgggcaaacnnnnnnnnnnnnggctgctctgtctatggagtagccggtcttt

SEQ ID NO: 1447 - DNA, 474 bp, Macaca Fascicularis
  misc_feature (1)...(474): n = A,T,C or G
ggaattggaacttcagtagcctannnagggaactgannnnctccccaaattagctcatctaagacctttccctttccatggcctctactcctcnnnnnttcccttaacacctttgatcttcccttcagtttccttggatcctttgatgtgtccccattcatacacctacctcctccatctctctgtctacccctgccagacctttcccttctcaaaccagtacctcaactccctataggcattagagctttagtccttctgccaccactgagggactcagggactccaagagcaagcatcaaagactgaaaaagctaactggaaacatactggatattttagctactcagatggtctttggagataccnnnnnnnnnnnnnnntgtctgttcagtccctcaccaaacatttggtccacaacatccatcagattacacatcagtgcaaagaaaatcttaaaagtctcctccaggc

SEQ ID NO: 1448 - DNA, 666 bp, Macaca Fascicularis
  misc_feature (1)...(666): n = A,T,C or G
tagcagcccctttcttcccannntggacctgcttttcaccccctgggcacagnnnnnnnnnnaccattggtgtttggtttattccaggatccagggagctggttctgctggttggaccaaacctcatgagccagccacccctgacccaaatgaggagagctctgattctcccatctggnnnnnnnnnnnnnnnnnnnnnnnnnnnnnnnnaatctcatcagcagggaacctgtggaaaagggcttgtcagtaaaatctgggaatggctggatatggaaacatctgcccatnnnnnnnnnnnnnnnnnnnnnnnnnnncaagcgccttttgtttagggtaaaattaacaaacccgttctgttcctccgacccatgcttggtacatataaccttctttaacccttacatttatatgattctggggttgcttcagaagtattgtttcatgaatcattcatatgatttgatcccccaggattctattttgtttaatgggcttttctattaagagcataaaatactaggctgatttagtcagggcaaaaccatttacatattcattttaaatacttgctgttcatgttacacaagcttcttatggttttcttgtaacaataaatattttgagtaaataatgggtacattttaacaaactcatagtagtaca

SEQ ID NO: 1449 - DNA, 2452 bp, Macaca Fascicularis
  misc_feature (1)...(2452): n = A,T,C or G
taggttgagagagggagagaaaaaagagaagaaagacannnnnnnnnnnnnnnnnnnnnnnnnnnnnnnnnnnnnnnnnnnntgcagtggtggaagtagtggtagctaacatttattgaggccttatgtgccaaatgctgtcgtgagtgctttgtgagcatgatttcatttacccatcagaaaaagcctataaaaggctagttagtccccattttcatcaggaaactgagtctttaagaatgtaagtaacttgcccaagatcacaaacccaggtggatgttagggcctgtgctcctaacctctacactgtagaaagaaagaagaattaagtggcaaatttttagatcagccttccagcttcttttaaatagagccttcagatccagttcagctattgaagaagttcccacctttccaagagccttgttgtctatgatggcatccttttgagtgacaagttcaaaaccttcacagaattttccccagagggcatattttaaaggagcccacactgttgggggctttatttctttagtggtgttttttaggattaaagtagctttatttagcaagtttcaaattaatatacttgaattaagggaaggcagtaaaggagtagaaattatacttaaatacttagtacatgtcgtcagcccacagttcttatctctacagacttagagtatattttaccgaaaagttagtgcctaggtgttagggtagctctggaaaaggcatatctgaaccaaggactaaacaaaatggggaggacttacaatattttattaatttcctcttttgaagaatcataacaaatctgctgcattcccatccatctcaaataaagcaaatccagttaataagcactgtaagccccttgaggaagagcagaacaacccagacaccaaagattgtgctgataaatgtttaatgactggctttctgggagggaaaaagccctggtttgtggcatttgccaattcccatgatgataaaatccccacgaaggcctatttctagctatcaatgtgatatccctaaatgcggagttgggaagagatgtgcaagatcggctgtcatgaccagcaaacacactactccatcccttacggaggaggaatggaagacagtccgctctttcaatgcagtggctatcgtggagagctcctgcttctggaggcactcactgtgtgacaccgggcaagtcacttcacctctctgggcctttgtttcctcctctacaacagataatgtggaagatcccctgtacctctaacattttaaagttctagaaggcaatgcctcctgctttttccgacatccaaatgccttgaagcgcctttctggaaaaccaagttagcactgtgctgcatccaaaagtgcctccaatttcatctcctgagcataaggtttggaaaggagtgacttactcccttttgcctctttaaatgtgtagccaatggggcatcatacattttttacacttcttttgctagatgtgagatccaggaaggaaagcatggatgttccagggctttcttgttctcctggggtggcaggctgcgtgtgatgcactgagccattgctgtatgcaatttctacctctctaccctttcggcagccgagcaagattgttgatagtctcctacctttttatttttatttttattttttactatccggaagccatttacaagagtgggaactgcttacataaaatggaggggcggcggggggttgtgttattttttttttttcccctgaaaggtggcacgtctctcagcaaagagaaaaaggcatgttgcacaaggcttgctggcagtgatataagccagcgccggtttgcctgttgtcacagccaaagcaaaatgccacctctgcctagaagccagagtgccacactcctcttttgtgtccctgagatgtacccacgatgaggccctggaattgtaggtttggccaggagggtgccaggattgctcgaaggtcatcttccagtcccaggaggctgggggtaaggggaggttgatcatagttctcaaaatagatcttttgagccccccagattacatgtcagctacagctagtaaatgtggaatttgaggccttgggttagcacaagagagccccccaggtgtcaggagtgaggtagggctgcaggaataccagtgacccagtgatcaccctgtccctgggccgcttcttaacaaacccagatgcagtaacagcaaaagctccagaatcccaaggcaggaggtgccaaaaacaccccccaacaaccactaccaaaaaatttttttcagtaaaatgttctcacccctagaggggaaaacctgtccatgcctgaagcagcttgaccccagcaaacaccctgcctccctggagtgaactgcaaatctcaaaaaaaaaaaaaaaaaaaaaaaaaaaaaaaaaaaaccaaaaaaaggccaca

SEQ ID NO: 1450 - DNA, 728 bp, Macaca Fascicularis
  misc_feature (1)...(728): n = A,T,C or G
ccatcatacattatagtcaaggcctatatactatatataattttggatgtgtttaatcttnnnnnnnnntttccattgtatcatcaagtggaagttcaagacggcatcaaacaaaacaaggatgttnnnagacatatgcaaagggtcaggatatctatcatccagtatatgttaatgcttaataacaagtaatcctaacagcattaaaggccaaatctgtcctctttcccctgacttccttacagcatgtttatattacaagccattcagggacaaagaaaccttgactaccccactgtctactaggaacaaacaaacagcaannnnnnnnnnnnnnnnaagcaccagtggttccattacnnnnnnnnnnactaccaagattcagtagaaaataagtgctcaacaactaatccagattacaatatgatttagtgcatcataaaattccaacaattcagattatttttaatcatctcagccacaactgtaaagtggccacattactaaagacacacacatcgtccctgttttgtagaaatatcacaaagaccaagaggctacagaaggaggaaatttgcaactgtctttgcaacaataaatcaggtatctattctggtgtagagataggatgttgaaagctgccctgctatcaccagtgtagaaattaagagtagtacaatacatgtannnnnnnnnnnnnnnnnnngtgtttgtgtaaactcaatgtg

SEQ ID NO: 1451 - DNA, 635 bp, Macaca Fascicularis
  misc_feature (1)...(635): n = A,T,C or G
aaacattatntaagaattggttcataggtttcagcagactgccaaaggtacaaacaagcagctctcctctactgaggtactgaaacaaatgctactgggataagtgctgtgtgtgatagggctattggctaggagctgagagaacaaagcatgaagcgcctaacccagcttaggggtgtggaggtggggtcagcaagtaagggagatcttcctggagaatgaatatacctaagctgatttaagagagaccacttttggctaggtttattgtactggttgattttcaagtaattgggcttatttattctagagaaaaagtcttcagtctcttgcttctgcctgcagagcaaggcagggtcagcaacacgggcagtctctccactggagaacgctgagtcatgcatgggcttctccaagtttccatcatatgggacccagtgttgaatccagtgcaggactggagtctagctggcaaagggtaaatgccccaagcctttctgccatatggtttccacgaaggcctgagagtcaactgtaccactgtcttgtgttggccatgtccctgtttagtccctgccttgttctcttccctttctcaatttccaagctccacccactcctaaaaataccagtca

SEQ ID NO: 1452 - DNA, 783 bp, Macaca Fascicularis
  misc_feature (1)...(783): n = A,T,C or G
cagcagcagaagcgggccacataccgnnnnnnnnnnnnnnnnnnnnnnnnnnnnnnnnnnnnnnnnnnnnnnnnnnnnngtgtggctggggaagcccccaacaacccctctgtccnnnnnnnnnnnnnnnntgggccaggccggggagatgcnnnnnnnnnnnnnnnnnnnnnnnnnnnnnnnnnnnnnnnnnnnnnnnacaccacacacaatcgccgcagcagaggcatggtccagagcagctccccagtcatgcccacagtggggccctccactgtacccccagaagaacccccaggctccagtttacccagtgatacatcannnnnnnnnnnnnnnnnnnnnnnnnnnnnnnnnnnnnnnnnnnnnnnncgtgccttagctgctagggaacgcaagcgttnnnnnnnnnnnnnnnnnnnnnnnnngtaaccccccacaaccccgctgcccacctgaaccccatcaactccctccaaccctactgtgtccctgcagtgagacggacgttaaagagtgggctcggannnnnnnnnnnnnnnnnnntgggactaagcaagggtcctggcctggaggtgtgaannnnnnnnnnnnnnnnnnnnnnnnnnnnnnnnnnnnnnnnnnnnnnnnnnnnnnngaatgaggaaggcccagagnnnnnnnnnnnnnnnnnnnnnnnnnnnnnnnnnnnnnnnnccttaagcagtattagctgtgtgtgtgcatgtaagtgtgtgtgtgtacgtgcatgtgcatgtgtgtgagctcctgaactcacagagc

SEQ ID NO: 1453 - DNA, 670 bp, Macaca Fascicularis
  misc_feature (1)...(670): n = A,T,C or G
tgaaagtcntgagcctcagaacccacccaggccctagcaatgtgttcctcacagctccatctgtgacctgagcttcacaagacatctgcagagcacagagactttgccatgcttctcccatgataattattggcttgctttttttgtttttgtttttcttttttagnnnnnnnnnnnnnnnnnnnnnnnnnnnnnnnnnnnnnnnnnnnnnnnnnnnnnnnnnnnnnnnnnnnnnnnnnnnnnnnnnnnnnnnnnnnnnnnnnnnnnnnnnnnnnnnnnnnnnnnnnnnnnnnnnnnnnnnnnnnnnnnnnnnnnnnnnnnnnnnnnnnnnnnnnnnnnnnnncgaattcctgggctcaagtgatccaccctcctcgacctcccaaagtggtgggattacaggtgtgagccaccatgcctggccttggcttgcttttgatgctgacaggaactttcggtaaagctagaaacttctagaaaagccttggggaagctgttggggcaactacaacccaagttcctcatataccctggacatcatttactttagaattggttactgtcttcctccttccatccataagtgccttctcctgtagatgaagccgggaaataaactaggtacaggagtcttcagccgtctttgacttttatttatttatttctattt

SEQ ID NO: 1454 - DNA, 667 bp, Macaca Fascicularis
  misc_feature (1)...(667): n = A,T,C or G
gctcctatnnnnnnnnnnnnnaannnnnnnnnnngattgtggatggcattttcacaaggatgggtgctgcagacaatatatataaaggannnnnnnnnnttatggannnnnnnnnnnacacagcagaaataatcagaaaagcaacatcacagtccttggttatcttggatgaattgggaagagggacgagcacccatgatggaattgccnnnnnnnnnnnnnnnnnnnnnnnnnnnnnnnnnnnnnnnnnnnnnnnnnnnnnnnnnnnnnnnnnnnnnnnnnnnnnnnnnnnnnnnnnnnnnnattactcnnnnnnnnnnnnnnnnnnccacatgggattctnnnnnnnnnnnnnnnnnnnnnnnnnnnnnnnnnnnnnnnnnnnnnnnnnnnnntttgtcaccttcctttaccaaataactagaggaattgcagcaaggagttatggattaaatgtggnnnnnnnnnnnnnnattcctggagaaattttgaagaaagcagctcacaagtcaaaagagctggaaggattaataaatacgaaaaggaagnnnnnnnnnnnnnttgcaaagttatggacgatgcataatgcacaagacctgcagaagtggacagnnnnnnnnnnnnnnnnnnnnnnacagacttctcttcctcattaaaatacttacat

SEQ ID NO: 1455 - DNA, 716 bp, Macaca Fascicularis
  misc_feature (1)...(716): n = A,T,C or G
tcccaaaatctcagaaagccaaaactgatgagaacactccacaacaggnnnnnnnnnnnnnnnnnnnnnnnnnnnnnnnnnnnnnnnnnnnngtgagacgcctcccacctcacccacctccgccgtgcaacccattcctcctagctgcaccccagttctggctggggaagtggtatggtagagggccagagggcagaagcagaaggctatccatccgcaggggtgcatccttgcctgcggtgtgtttggccaaggacggctcaagctcccacagcccctggcacctgagatgtggccactgaagtcaggatagccacagtgggggctggggcttcctctgtccctttctcctgattatatgtgggagtcacgtcctcaccttgaagcagacctaaagccctgtgttcccagggctggtgctctagctagggaggagagttgggaagaacagggtagctacagatggccaactgtataaaagcagagcaacatcccttcccaccaggaaagccgttacaacttccccatatacaccagcctaaggcccagcgagtgggcgcgggccagctgaacgcatctggaagagcctccaacacacaggcttcccctcagtgggcacttcccaccaggactccctgaagagtccttagggtcctgctgggccctgccctggccaggcccggcctctcctgtcctcctggtcacttgcacagggc

SEQ ID NO: 1456 - DNA, 2842 bp, Macaca Fascicularis
aagaaaaattattgcagtggccacacttcataaaagcatggaagccccacatccttctctggtgctcaccagtcctggaggaggaacaaatgcaactccagtagtaccttctcgggcagcaactccaagatcagtaagaaataagtctcatgaaggaattacaaattctgtaatgcctgaatgtaagaatcctttcaagttaatgattggatcatcaaatgccgtgggaaggctatatgtacaagaactgcctggaagccaacaacaagaactccaccctgtctacccccgacagagattgggcagcagtgaacatggacagaaatctccattccgtggcagccatggaggcctgcctagcccagcgtcatcaggttcccagatatatggagatggttcaatctctccaaggactgacccacttggaagtcctgatgttttcacaagaaataatcctggttttcatggagctcccaattctagtcctattcacctgaataggactcctctttctccaccttcagtaatgctacatggttctcctgtacagtcatcctgtgcaatggctggaaggactaatatacctctttccccaaccttgactacaaagagtcagtaatgaaaaaaccaatgtgtaatttttcaactaatatggaaataccacgagcaatgttccaccacaaaccaccccaaggcccacctccccctcctccaccttcttgtgctcttcagaaaaagccattaacatctgagaaagatccacttggcattcttgaccctattcctagtaaaccagtgaatcagaaccccgttatcattaatccaaccagtttccattcaaatgtccactctcaggtacctatgatgaatgtaagcatgcctcctgctgctgttcctttgccaagtaatctcccattgccaactgtaaaacctggccacatgaatcatgggagtcatgtacaaagagttcagcattcagcttcaacctccctgtccccttctccagtgacatccccagtgcacatgatggggactggaattggaaggattgaggcatcgccccaaagatcacgctcatcttccacatcatcagatcatggaaatttcatgatgccacctgtaggaccccaggccacttgtagtggtattaaggttccacccaggtcaccaaggtcaacaatagggtccccaaggccatcaatgccatcaagcccttctaccaagtccgatggacatcatcagtacaaggatatccctaacccattaattgctggaataagtaatgtactaaataccccaagcagtgcagcttttcctactgcatctgccggaagtggttctgtaaagagtcagcctggtttgctgggaatgcctttaaatcagatcttgaaccagcacaatgctgcctcctttccagcaagtagtttactctcagcagcagccaaagcacagctagcaaatcaaaacaaacttgctggtaacaacagtagcagcagtagcaattctggagctgttgccggcagtggcaacactgaaggacatagcactttaaacaccatgttccctcctactgccaacatgcttctcccaacaggtgaagggcaaagtggtcgagcagcactaagagataagctgatgtctcagcaaaaagactcactgcggaaaagaaaacaaccacctacgacagtgttgagtttgctcagacagtctcaaatggatagttctgcagttcctaaacctggacctgacttgctaaggaagcagggtcagggttcatttcccatcagttcaatgtctcagttactacagtctatgagttgtcaaagctctcacttgagtagcaatagtaccccgggttgtggggcctcaaatactgctttgccttgctctgctaaccagctgcattttacagatcccagtatgaactctagtgttcttcagaattcactgacacagaacatacctttaagaggggaagccgtgcactgccacaatgcaaacactaactttgttcacagtaacagtccagtccccaaccaccatcttgcaggtttaataaatcagattcaggctagcgggaactgtgggatgctcagtcagtcgggcatggctttaggaaattccttacatcccaatccacctcagtcaagaatttcaacgtcctccactccagtgataccaaacagcattgttagcagctataatcaaacaagttctgaagcaggtatggttttattagaaaaaagtacccaaaggtactaaacttttctacttttttaaaaatttgtaccaaaatatttattatgataagaaatgatcctttccccattgtgaaattctcttcatttctttagtatttataatgttatttacagaatgctagggatttgtctatttgaaagattaacagctaagaggattccatgtgtttccattatttgttgtcaatctgtgtcattttgaatattgttcgactttcacttggttgtataaccagtggactccaaaatgcaaaataagccatacaaggcagggtttcctggttcgtgagacatgtccttggtctatgccaatataaaagccgtctccctagctttcgtttgtgttcaggtaaatgaagtttatcttggaaaatccaaaaaggcaaaaataaatggattttttttcttgctgctgaacagaagtaggtgaatgggtaggaaaaggtaactagaagttgtatgaagtagaaagctgtcttctaatgtgttttcttatcctagtttgctatcctttattattatttgtttgagaaaactcaaaaatggatattggctactccgtttaaaaaaaaaaaaaaaaa

SEQ ID NO: 1457 - DNA, 766 bp, Macaca Fascicularis
  misc_feature (1)...(766): n = A,T,C or G
agtagctggcctcagtgcctgccttggggtgaggaagacacctctgccccagtggattagcaagggtggcaggcgtaacacgtccaagttatccccaataacattgtccnnnnnnnnnnnnnnnnnnnnnnnnngggggagggtggcttggggagtgacttcttaatggataaggggtttacttctggggtattggaaatgtttggggactaggtagagnnnnnnnnnnnnnnnnnnnnnnnntttgtgtatactttagaatgtttcagttatgtgacttttacctcaactaaaaaaaaaaatgcccaggtactgcttgtgcaggtggatttgaggttaggcagannnnnnnnnnnnnnnnnnacaccagtgggaagaggttgaaggctgatccagagaccctgagcctacagcaaggctgtggtgagtgggatggtctttggatgtgtcggcttagctagactacagtnnnnnnnnnnnnnnnnnnncactaatctaggtattgctgtgaaggtattttgtagatatgacaaaagtccattcccagtcgactacgtaagtgagattatctcagataatctgggtcagcctgacctgatcagtcaaaaggcctaaagagcagagctaagggcttccctgaggaagaaannnnnnnnnnnnnnnnnagcccagcgcttggcgagagttcnnnnnnnnnnnnnnnnnctgatagcctgtcttacagagtatagacatgactagccacttctacaatcactgaagtcaa

SEQ ID NO: 1458 - DNA, 711 bp, Macaca Fascicularis
  misc_feature (1)...(711): n = A,T,C or G
tgtgcctacnnnatgtnntcattctgccaaaatctgtcnnncntccagagactcctacttcaatgcttcttgccggaaacacatccttttcctcacacatccagtcactcatcaagtgtaatctgtctcctaaatatctctggaacctatcttcttttctccaagctaccatcacctcttgtctaaactgctatggaaacttcctaacctgttctcccatttccacttctgccttccatgctgcagtaagagtcagctatgaaaaacaaacctaaacatcgaactttccttagcttcttcagtggcttccacctgcttttgggataacgtcctaaattcaaagaccttgtataaatcaggctcatctcgcaacactcctctttgttctctacggcccagacactggctttcagttcattacatgtcttgcaagccgcggagccctcacacactgtcctctctgcctgcaacacgcttcctttcactttctgcctagctgatcctaaatgttccttcctcagttcttttcttatttcttggtgggtcaagacttctgataaatcggttagcaccatgcattttccagagtttttgttacaattgtaaaattatggctgtaataggctggctgtnnnnnnagattgtaagctcatgagggcagagatcttgttcacatctcgctcactgctatattctcattgctgagcacac

SEQ ID NO: 1459 - DNA, 2348 bp, Macaca Fascicularis
  misc_feature (1)...(2348): n = A,T,C or G
agaagaacggcgggcggcgagggtcattcccagccgcagcctgactgggctgaacagagaagcgcaaaggggcaagttaccggtcctggggtttccgggaaggcggatggccacgcagccaccctggtgatgaagctgcagctgttcatccaagaggtgaaccacgccgtggaggaaacaagtcaccaagctctccagaacatgcccaaagtgctccgtgatgttgaagccctaaaacaggaggcatctttcctgaaggaacagatgattcttgtcaaggaggacattaaaaaatttgaacaggatacatctcaatccatgcaggtgttggtagaaattgaccaggtgaggtccagaatgcaacttgctgccgaatctcttcaggaagcagataagtggagcacgttgagcgctgatattgaggagacgtttaagactcaggacatagctgtgatttctgccaagctaacaggtatgcagaacagcttaatgatgcttgttgatacaccagactactcagaaaagtgtgtgcacttggaggcactgaagaacaggctggaggccctagccagtccgcagattgtagcagcattcacctctcaggctgtagatcagtccaaagtgtttgtgaaggtgtttactgaaattgaccggatgccccagctcctggcctactactacaagtgtcacaaggtgcagcttttagcagcctggcaagagctgtgtcaaagtgacctacccctggaccggcagcttgctggactctatgacgccttgcttggggcttggcacacacaaatccagtgggctacacaggttttccagaagccccacgaggtggtaatggtgctgctgattcagaccctgggggccctcatgccctcgctgccctcctgcctcagcaacggtgtggagagggcagggcccgagcaggagctcaccaggctgctggagttctacgacgccaccgcccacttcgccaagggcttggagatggcactgctcccccacctacatgaacacaatctggtaaaagtcacggagctggtggatgccgtgtatgatccatacaaaccctaccagctgaagtatggcaacatggaagagagcaacctcctcatccagatgagcgctgtgcctttggagcatggggaagtgattgactgtgtgcaggagctgagccactctgtgaacaagctgtttggtctggcatctgcagccgttgacagatgcatcagattcaccaatggcctggggacctgcggcctgctgtcagccctgaaatccctctttgccaagtatgtgtctgatttcaccagcactctccagtccgtacgaaagaagtgcaaactggacgacattcctcccgactccctcttccaggaagattggacggcttttcagaactccattaggataatagccacctgtggagagcttttgcggcattgtggggacttcgagcaacagctagccaacaggattttgtccaccgctgggaagtatctatctgattcctgcagcccccggagcctggctggttttcaggagagcatcctgacagacaagaagagctctgccaagaacccatggcaagaatataattacctccagaaagataaccctgctgaatatgccagtttaatggaaatactttataccctcaaggaaaaggggtcaagcaaccacaacctgctggctgcacctcgagcagcactgactcggcttaaccagcaggcccatcagctggctttcgattccgtgttcctgcgcatcaaacaacagctcttgctcatttccaagatggacagctggaacacggctggcatcggagaaaccctcacggatgacctgcctgcctttagtctcacccctctcgagtacatcaacgtgatggacgccctgggcctgcagccgtcccgcaccctccagcacatcgtgacactcctgaagaccaggcctgaggactatagacaggtcagcaaaggcctgccccgtcgcctggccaccactgtggccaccatgcggagtgtgaattactgaccccaccgcacacccgaccaccaagagagccaggggtgctgttctgtgactcgccagcacagatttgctcagaaactctgcccaatcttgggcaaagttacttgaaaaagacttaattcagccatgcacannnnnnnnnnnnnnnnnnnnnnnnnnnnnnnnnnnnnnnnnnnnnnnnnnnnnnnnnnnnnnnnnnnnnnnnnnnnnnnnnnnnnnnnnnnnnnnnnnnnnnnnnnnnnnnnnnnnnnnnnnnatgatagagtgagactctgtctcaaaaaaaaaaaaaaaaaaaaaaaaaaaaa

SEQ ID NO: 1460 - DNA, 610 bp, Macaca Fascicularis
  misc_feature (1)...(610): n = A,T,C or G
gagccctggaggggagagcgcggactctagccaggcannnnnnnnnnnnnnnnnnnnnnnnnnnnnnnnnnnnnnnnnnnnnnnnnnnnnnnnnnnnnnnnnnnnnnnnnnnnnnnnnnagcggcctgggtgcctggcggacagaacttcagagaccacgcagccttccttcnnnnnnnnnnnnnnnnnnnnnnnnnnnggggnnnnnnnnnnnnnnnnnnnngcggagacattgctnnnnnnnnnnnnnnnnnnccttgggggccggcaggcctcgacccccaccctagggaatgcagagcctctccgcatgtgtgcgcgtggccgtatctgtgtatttcnnnnnnnnnnnnnnnnnnnnnnnaacctagttcctggggcagctggactttgcatgttagagtgagcccccagccccctgcctgccgccccctccccagggccctgcctcccaccccacccnnnnnnnnnnnnnnnnnnnnnnnnnnnnnnnnnnnnnnnattgtgggaaactccaggactcttcccaccgcctcccagcgcctgcctgctggggctnnnnnnnnnnnnnnnnnnnnnnnnnnnnnnnnnnnnnnnnnctccttccccc

SEQ ID NO: 1461 - DNA, 590 bp, Macaca Fascicularis
cgataaggtgagctcattgcattaattcgggccctagaactcagtaaagttgcaggtgttgtgtcttggatccaccacagtcagctaacaccggcagctcaggacaagtggaccagccagcaggacacagatcatccaaccaggctgatcctgagacgagaccaagctgctgctgaggatgacagccctgctctggtcactctggatactgaccagtccacgcacggctgaagcttgaggagacaacaagccctgctctagtcacacaccggcagctgactagtctacacatggtcgaagcttgaggacttgtcaagcaagactcctgtctcgataaattggctctatctgggctacaggcaaggagaacctgttgaacagttacaaccggagaagagccaaggctactcatgagcacaggttggattcagttttgccatttgtagttttctggaatgggtgtagaagcaacagaattcttccctgaatttcctgcaaagatgatttggcatcatggagaacaggatgggcatactctgcggtcaaacaatgctacttttctttgttgaactagctctgtgaattctaac

SEQ ID NO: 1462 - DNA, 746 bp, Macaca Fascicularis
  misc_feature (1)...(746): n = A,T,C or G
gtatatgttannnnnnnnnnnnnnnnnnnnnntctataaagggcaatgattatagtagacaatattgtaactcagtagacttgttgaatatgcaaacttactgtcaagtgacctcaaaaaaaatgaaaagatagaatacactagtagttcttatcctcttttgtagtaaaccaataatagccattgtggcaataattcatcagttaattttaaagcttcatgttatgcaaaaaagaatcctgctgttatacatgtgacagtgactttgtgctgaaatttcagctattccagataaacattgtatatcttgtaaattaatgtttaaaggtagttttgttcttatagaaagtgttgattgccgggttgcttatagcactttaagttattctaaaaatgaaattataagccaaatattggcttaagtagatttagttgtatagcacttagatatttagttcttttgaaagtttagataattatttaaagaaagcataatgctaatggaaaagaaaatctgatgttctattataatannnnnnnnnnnnnnntgaatagaaannnnnnnnnnnnnnncctcgtctcattataagttagtaacaatatatagattaaatgtttacaatatagggaattgtaaataaatatatcagtttttttccctttggnnnnnnnnnnnnnnnnnnnnnnnnttgtggagttgactaatcataatnnnnnnnnnnnnnnnnnnnnnnnaactaaaataa

SEQ ID NO: 1463 - DNA, 760 bp, Macaca Fascicularis
  misc_feature (1)...(760): n = A,T,C or G
aggaagaatatgatgtgcatagtgccatcagaaattcaggatgctcaggatagctctacctctcatggnggagtgaaaaggagcattggatacgatgatactgatgagtcccactgtgctgagcacattgagtcacgtactcnnnnnnnnnnnnnnnnnnnnactcagcagctccagaccacgtgccacaacctgctgtccaacatccaaggtgtaccgcagaacatccaagatcaggccaagcacatgggggtgatggcaggcgacatctactcagtgttccgcagtgctgcctcctttaaggaagtgtctgacagcctcctcacttctagcaaggggcagctgcagaaaatgaaggaatctttagatgatgtgatggattatcttgttaacaacacgcccctnnnnnnnnnnnnacttgatttcaccaccatagacttgacatctgagacggatgagattccagatattatagctttggaagaggagaacggatcaaatcattcacatgctaatgaccctgtcctctcagggcaaaatgttgaataactaacaacaataaaatacccctttaggttgaatatgcaatttgcattacattaaacttcctgtttttattcccgtgactttgaagagtgttaatctagttttttggctatattggtcttaattgcaatgacactctcatctaaacttttgtaagagatcctagttctgtgtcatatatcatttaatataattatttaaagtttaattgctg

SEQ ID NO: 1464 - DNA, 1743 bp, Macaca Fascicularis
  misc_feature (1)...(1743): n = A,T,C or G
tgttgtgaccaagcagccctcnanctgnnnntgttccctngaggactttctctgtgattttggctactaccgtccagaaannnnnnnnnnnnnnnnnnnnnnnnnngaactgaagggccatgacctggagttttgtctgtacggaagagaagaacacctaacaacaaatgggtaccggaaaattccagggnnnnnnnnnnnnnnnggggtgaatccagttagagaagtaaaagatttgaaaaagaaatgcacaagcaactttttgagtccggaaaaacagaattccaagtcaaattctgttccaattatcctggccatcgtgggattgatgctggtcacagtcatagcaggagtgctcattgtgaagaaatatgtctgtgggggaaggttcctggtgcatcgatactctgtgctgcagcagcatgcagaggccaatggcatggatggtgtggatgctttggacacagcnnnnnnnnnnnnnnnnnnnnnnnnnnnngacgactcagatgaggacctcttggaatagctcttcagaggagctggacccagcgtgatggtggaaccacagtacctcttacactccctgtggctccaacttcgggaaataaatttcccattgcgagggacccagctctgtttctgctgcttccatcaaagccaaaaggacctacattaaagaaatgcagggtggggtggggaaccctgagcacttttttacaattggctctgagaagaagggggacattttaaattctttaacttcttatttcttgtcctgtctctttgcaaagtatgggcttttgttttttgttttttaagggaaatgaaatggaagtcgaagggaccttttcactaacctcacttctgtgtgttctgcatggcgcctgccccagggcatctgccaactccagcatcagctctcacagtgtacttggtaccatcccnnnnnnnnnnnnnnnnnnnnnnnnnnnnnnnnnnnnnnnnnnnnnnnnnnnnnnnnnnnnnngcctggccagcttttctccatctggggacagtcctactccaagaacactgcacaccagctcctcacacagatcccacttcctttttttgtgtttttcagagaccacagaccacagtgattttttttcccctgtttaattaggcaatacctttgttaattgccctttgacaannnnnnnnnnnnnnnnnnnnnnnnnnnnnnnatcaggaaaacttacagagcaatatttttaacttggggcaggaagaagggagcagcagagaattgactagatttagcacctattaaaagagaaactcttgcttcttctgagatctttcaagctgtgctttgtgtgtgtgccagtggacttactcaaggacagggtacagacttannnnnnnnnnnnnnnnnnnnnnnnnnnnnnnnnnnnnnnnnnnnnaacctcacagtcttccatgttccctttttaactgtcatgtggctcattgctgaatcatgtcaatggctgcctctctgctgcttcttaggttgctgttgtacatggaaccaggactagagattttttcagatgtatagacttaaaaaattagaatttcattaccaggctctccttctcaccacttttttctggcctcaccaagtaatttgttgatacgaaaattttggaggaaccagttgaaaacannnnnnnnnnnnagatgatgctttgtgtgatacattaatttcttattttgaattgaaannnngttttccca

SEQ ID NO: 1465 - DNA, 747 bp, Macaca Fascicularis
  misc_feature (1)...(747): n = A,T,C or G
cacagactcaagatggnntggtagatgcacccggcacgcgnnnnnnnnccgacgggaaccgaaggagacggtaggttnnnnnnnnnnnnnnnnnnnnnnnnnnnnnnnnnnnnnnnnnnnnnnnnnnnnnnnnggagcccgaggagcgcagcaaaggcacctaggcagcctgcgcggannnattggatcggcggggacggcctgtagctcctgcgcgcggggaaagggaagaagtcctcccctacaaagcgagttcacaaacttggaagaagccactttcacaggatgcacagatctcaacggaaggacacagaaaacatgaaaaagcaaggaaatgggcctcctccaaaggaacnnnnnnnnnnnnnnnnnnnnnntccccatccaaaagaaacacaagatattttggagagagaattgaacatagagattatacagttgatgggtataatgcaagcatcatttggaaaagaacagagaaaaaagatggaagtagttagcgttctacaggaaaaaatgatcaacttcagtgatattcctaaaagcaacctaaggatacttctgaaactgaannnnnnnnnnnnnnnnnnnnnnnnnnnnctcaaaagcttcaatgatagactagaccaagtagaagaaaaactctcaaaacttgaaatctgaagcatgtttcttaaagattnnnnnnnnnnnnnnnnnnnnnnnnnnnnnnnnnnnnnnnnntgggttaattcttatactggggtc

SEQ ID NO: 1466 - DNA, 772 bp, Macaca Fascicularis
  misc_feature (1)...(772): n = A,T,C or G
tacagcatgagtcatgcgctggcttactatnnnttctagtttagatatgtttacatacccaaataattagtgtgctacaaattgctacaatattcagtacaactgtaacatgctttacaggtttgtagcctaagagccataggctgtaccttatagcctaggtgtgtcataggctagaccatctagtgtactagtgtcagtacactctctgatattcgcacaacaatgaaatggtctaatgacacctttctcagaacacatccccgtggttaagtgacgtgtgactgtatgtacatatatatgaagtaaatatggcaaaatataaaaaaaatttgcatctctatagtgggtatatagatatgtattatacttgtgctatcctgtttacttttttgtatgcttgaagttttttataacaaacattttaaaataatagcatgggataatggccagccatttaacagaggggcctttcatatccattttctacttggatgattataatcatagctcatatttcctgaagacttagctttttgccaggtactgttttgagtgaatgttaacttaaaattttaagtctaagttgattagtcaaaagcttacaagagccctagaagtagctactgttaccataaatctactttacaaatggggaaacttaggtgtaggaccgttctgcatgcagggcacactggctcacgcctgtaatccctagcactttgggaggcccaggtagggggatcacttgaggccaggagtcgagaccagc

SEQ ID NO: 1467 - DNA, 771 bp, Macaca Fascicularis
  misc_feature (1)...(771): n = A,T,C or G
catgtatgagcacagannntnntttttttggcaaaactgtgcaaggagctggcatatacacttagtggtcaaacagaccagtatgttccctgttctcttgagcttcgacgcttctgtgctctatcgctgtgcactgctctttctacaagtattacatcaactctaaggggtcnnnnnnnnnnnnnnnnnnnnnnnnnnnnnnncccgaagacactaatttatcgaagacacacctcctnnnnnnnnnnnnnnnnnnnnnnnnnnnnnnnnnnnatatcccatcactgggaggactgatgttgacttacatcattttctttatcacaataaacatgtggctctattagctgcaagctttaccaaataattagcacgacatctgagcacagcacagaaattaaggcaaaaaaaccaaagcagaacaaggaaatggtgctgaaattaacctgatgccaagcccaagacagctgatttctgtgtatttgaacttagggcgaatccgagtctacacagactcctacagaaagcttaaggaagaggcaagatgcattcaatttgaaaggtatttatgggcaacaaagtaaggtcaggattagacttcagggagtcataaggcaggcagtatcagaaagtgtacaccaactaagagacccaccaagcaggcagaggtaatgcaaacatctgttttgttcccatgcaaatcaccactcaaggcctctgttcttaagattagtccnnnnnnnnnnnnnnnnnagatcaaagcactcttct

SEQ ID NO: 1468 - DNA, 750 bp, Macaca Fascicularis
  misc_feature (1)...(750): n = A,T,C or G
acacatacagcagaaangnntagnnncactagggactcttagtttaggaaataggttttgtnnnnttaaaaatattttgtgtataatgcaaactagtgaaaactatatatgttctccaattcctatagtaataatgtaactgttacaactgttacgccaactttcctcatatttgagagatgagtacgttggattgcagcatttcttcatgttaaaaacatggaatattactcaaatacactatttggggcctaaacaactaaaattagtcaccacataactagctgaaaatgacataggcataaaatgttaacaaagaatggcagtgatatttatgctcacttcctggaataactgagtaatattcagaaaggcacactgaggtagtttaagtgtannnnnnnnnnnnnnngtatctagcccagtattattccagnnnnnnnnnnnnnctatataaagggcatttgggaggaactcttctgggcagtatcttccccaatctcatcgaannnnnnnnnnnnnnnttccatagcagaccacccagctctgacagnnnnnnnntggtgatctttagtttgagatgtctatatggtacttttgcgttatatcaattaagatacaagctatagatatggtaaaaatacgaaatcaagatatagctcagtgggactggattaagacataataatagttctaagaattcacttttgattgtatgtttcaccnnattcaataactccactaatcaag

SEQ ID NO: 1469 - DNA, 730 bp, Macaca Fascicularis
  misc_feature (1)...(730): n = A,T,C or G
gaagaactgccaaaggctcaacacagctggtaagactctgcccggaacaccccgtctgtcctcaggtgatgacatagccacaccaggcaggacgggtcctccagcatagctcctcagcctctgcccggaacaccccgtctgtcctcaggtgatgacatagccacaccaggcaggacgggtcctcttcagcatagctcctcagcctctgcccggaacaccccgtcacagacgtaccaatgttatttttataatttcatggatttagttctacataccttaatagttttataaagttgttgacattttaggcaaatttggccaatattagcattaaattttatatgttggatttcctctagggtttcgccagttcctacaacgtgcaatagggtggtggtagctcttgtgtctgtggactctgctcagctgtgtccgtaggggccggatgtgtctgtgctttactatggccttgtttatatannnnnnnggtatactatgctatgtaaatagactctatattttttataatctttacatgctggtttaaattcagaaggaatagatcaaggaaatatatatattttcttctaaaacttannnnnnnnnnnnnnnnnataatcattttcatctttgcggcaaaaagttctcagtgacctattttgtggtgtttctttttaaaaacaaaagctgaaagattattaaatgttagtnnnnnnnnnnnnnnnntgaa

SEQ ID NO: 1470 - DNA, 1564 bp, Macaca Fascicularis
  misc_feature (1)...(1564): n = A,T,C or G
atttgagtccttcatttaataggttgtcaggaaatacctggtaaataaaagaatgaacaaagaaatcctacctggcaaggtcacagttaacctcagagccagggccttgtctcagctctgtgttagctcagtttgtatccacatttccagacatgggagatatgacagattcattactgcatggatttgggcatccagccaactcgagtttatatccccacttgctcatttattaactgtgtgcacttacaatggtctcttggcctctctaagccttagttttttcatctttaaaatggagaaaatagttgtgaaagttttcctggctggcatattgtgaggattgaacaatatagtgtacttgaaagtgcttgatacagaacttgacatgtagaacacatctgagaaacatctgctagtatttctgtttgtgtgttgggtagtccagaataatgtgcaggtttttaagaaaaatgctgatgcttatcaggagccctattactgcaggaatataagaacattatcaataaaattctctcaggttcaaaacaggataaatattctttattgaaaacgacataagttgcttacattgatgtatctatttgatagttcgggtttagttcagagtaaaaaatttaaaatttggtgataacaatgtatttttaccttgagaatgaaaatcctcttaaaaaccaaagaagttgtcataatactctcattggcaacttagaagaaactgaaaaagaaagagtttataaagggactccagaatcaaagtctcctttggactaaagtgtgacatgccattactctccttatcgtactacatgacctcctcaacttgcttggaaaaaaaaaaaaaaaatgagaataaacacccaatcagaaatccagaagagctagaaggtagaaccagccattgaccattgctctaaattatgctggtgaaatggtttaatgcacatatgcttctccttgtgcgtgttgcacaaaatccatcatctgccaggctaaaaagtgcacccttccatgtcagggtcagaagggagaacttctcagaaggatgtccataatgatgtctctatatggcagatacatatccctggggttttttatttaccttgctaactttgatttgcagaataaacatatgacatcgttcactgagaaagagtgagagaagtgtgaggggacggaagcagtttgaggtaacattttggaggaaagccatggtatttggccacttgactgaaactagagcaatagtaaatggggactttctagttacaaaatgaattacctcaagtggccaggatctagaaaagtaaagcagcaatctgaaagtactaagcttcagttcagtaaatatttactccgtgcctaatttgcatcagggactgcagaaaatactgagatacagataatgagtcatggttttgcctctcagcattcccactatgagtagagaggaacaataagaaaacagaccgatccgnnnnnnnnnnnnnnnnnnnnnnnnnnnnnnnnnnnnnnnnnncaaaaaaaaaaaaaaaaggccaca

SEQ ID NO: 1471 - DNA, 732 bp, Macaca Fascicularis
  misc_feature (1)...(732): n = A,T,C or G
gcaggcagaatnnntcnnnnnattcaaagttgaattttaatccagacaacccacctacctacccccacttgcacccctagcttaaaacacttgagtggctttttattgtccttaatgatggaaatattttatgtgaccaaatatatttgacatatgaggtcagatatattagggccactatctaaagcatagttccaagcattaaaatagttactgtcnnnnnnnnnnnnnnnnnnnnnnnnatcacctaaaaaacactcaatnnnnnnnnnnnnntcttgttgccacttagcctcatatgtaccatgttttactcaataccttctttgtcctttaagtatttggaatgagaattacagtgcttcatccagcataagacttttnnnnnnnnnnnnnnnnnnnnnnnnnnnnnnnnnnnnnnnnnnnnnnnnnnnnnnnnnnnatttgtctttcagatcttagttcatcacttcctcagggaaacattccctaatttctgtcacagagtaagacccgctgttatacatctcacctgaccacatacctctacttagcatttaacacgtgtaattttgtatgtattggttnnnnnnnnnnnnnnntagattgtaaactccatgaggacaggaattttgtttctgtcattgtcattgttcaattttgtattctttatgcctcatacannnnnnnnnnnnnnnnnnnnnnnnaataannnttatgaaagaataaaat

SEQ ID NO: 1472 - DNA, 164 bp, Macaca Fascicularis
agcgccggggggaggagacccacaatcgagagagatatgcacaatatcacagtggggtccccacaagaggagaaaagaaagacaccccataataatatgggatagggggtgcacaagaaaaagcgcgcaaaacgagagagatggggaggagaaaaaacacaaaa

SEQ ID NO: 1473 - DNA, 658 bp, Macaca Fascicularis
  misc_feature (1)...(658): n = A,T,C or G
gaaagcaaacaaatgccctgagtggtaacttctgtgnnactttactcttaaaaccaaatctaccttttcttcttctttttttttttttttgttaccttnnnnnnnnnnnnnnnnnnnnnnnnnnnnnnnnnnnnnnnnnnnnnnnnnnnnnnnnnnnnnnnnnnnnnnnnnnnnnnnnnnntctcatgggcccacatgggcccaaggcacagccagggcnnnnnnnnnnnnnnncgtttgcctggtctatgagatgccgagggtcctgtttccttacaggggattccagggctgggggttcagggagcatttccttctcctgggagttatgatcatgannnnnnnnnnnnnnnnnnncttctctttttctgtgcatgatatttctggtgaccctgtgtgaactggcctttgggaaagatcagagagggcagaggtggcacaggagggtaaaggagatgctgtgctggccctcagcccggacagggtctctgctgactgccaggctgggggcaggggctccgcatagccaggatnnnnnnnnnnnnnnnnnnnnnnnnnnttgtgctgtgtattttgatttcctnnnnnnnnnnnnnngtgtatttaccattgtgaagggggctgtgtcggaccttggtgttcaaaacagaactgtatt

SEQ ID NO: 1474 - DNA, 767 bp, Macaca Fascicularis
  misc_feature (1)...(767): n = A,T,C or G
aggcagtgctgtagccctnnnnnnnnnnnnnnnnnnnnnnnnnnnnnnnnnnnnnnnnnnnnnnnnnnnnnnnnnnnnnnnnnnnnnnnnnnnnnnnnnnnnnntgnnnntcctcaggctgtgnnnnnnnnnnnnnnnnnnnnnnnnnnnnnnnnnnnnnnnnnnnnnnnnnnnnnnnnnnnntccccgtgtgctaccagtgnnnnnnnnnnnnnnnnnnnnnnnnnnnnnnnntggtcctacagatctgggcctccaggaatnnnnnnnnnnnnnnnnnnnnnnnnnnnnnnnnntctctgagcctgtcctcctctggactaaggcagcctagtgttcagggctcagtactcagccgctnnnnnnnnnnnnnnnnnngggcttccggcgtgcnnnnnnnnnnnnnnnnattctcccggaatccccttttcctttcctgacctcaccacttcaaccttctnnnnnnnnnnnnnnnnnnnnnncctggnnnnnnnnnnnnnnnnnnnnnnnnnnnnnnnnnnnnnnnnnnnnnnnnnnnnnnnnnnnnnnnnnnnnnnnnnnnnnnnnntcctgtctcctccacccttcgtcttcatcctgcctgagctgccagagctccaattgcttttggagttgatctggaggactcagnnnnnnnnnnnnnnnnnggatcctctcctgaggaggaggggtgcccagtctcctcttctacctccgacctggcctggtttctttgccccnnnggcttnnnnnnnnnnnnnntgggc

SEQ ID NO: 1475 - DNA, 696 bp, Macaca Fascicularis
  misc_feature (1)...(696): n = A,T,C or G
agcccgnnnnnnnccagcacgcaccgggtgnntgatcccaagttccaccccgtccattcaaagataatcatcatcaagaaaggnnnnnnnnnnnnnnnnnnnnnnnnnnnnnnnnactatgagtctcagagcacagannnnnnnnnnnnnnnnnccgagtccaagcgggagacagaatacggtccctgccggagagaaatggaagacacactgaatcaccnnnnnnnnnnnnacgtgctgagtcccaggggtgnnnnnnnnnnnnnnnnnnncaagaagggattnnnnnnnnnnnnnnnnnnnnnnccttccaaaggcaggaagcggggcttctgctggtgtgtggataagtacgggcagcctctcccaggctacaccaccaaggggaaggaggacgtgcactgctacagcatgcagannnnnnnnnnnnnnnnnnnnnnnnnnnntctnnnnnnnnnnnnnnnnnnnnnnncacatgcaaagtgaagattnnnnnnnnnnnnnnnnnnnnnnnnnnnnnnnnnnnnnnnnnnnnnnnnnnnnnnnnnnnnnnnnnnnnnnnngaacctgctacagatacgtgtnnnnnnnnnnnnnnnnnnnntgtgagacagctgannnnnnnnnnnnnngagagcatcagtctgaagatgcggcttttttttctgtaaaatatattatgaatgttctgttagt

SEQ ID NO: 1476 - DNA, 646 bp, Macaca Fascicularis
  misc_feature (1)...(646): n = A,T,C or G
atgtgcctggccgagctgtggccggggtgaggatgaggatgcttggtgcttagcatgcagccctggatgcccggcctccagggcgtcgtagccagcaccgtgtgtgtgacgtcggtcacgttgggctcttactgccttggtttccccacctgctggtctgaaataggactccttgctgagtcttccagggttttagtatgacagggcttggcaggcacttgggcaccaggcaaggttgtttgtcacgggttcttgaagaggtggagggacaggcaggccccgtgccagcatggaaccaacactcttctctcaccagctcttctaggatcaggatcaagtgtggcttctttaaatggactcaccccgggggccagatcccaggagcgctgtcttctgtgattatgcagctgttgctagggaaggctctgtacctggcctcatgggatgagctgtggnnnnnnnnnnnnnnntggnnnnnnnnnnnnnnncagcagccaccagaaaaatacccctctgtgctcgggtcctcatcctaaatgaggacaaggctggcttnnnnnnnnnnnnnnnttttaacaggcaatggtatgggtgggagtgggggttggggattgggaggtggagtggaaattaagagagtaaagcg

SEQ ID NO: 1477 - DNA, 646 bp, Macaca Fascicularis
  misc_feature (1)...(646): n = A,T,C or G
gaataatcggaacgtnnnnntcgtccagtttcacnntctgagcagttctgtgtcccgagaaaagtgcagtcagcctcaaactggtatttgtcagatgatacatttnnnnnnnnnnnnnnnnnnnnngaacaatactcgtataaagtctgagatgagaaatagtgattattagctcaagaactgcaaatgagataggaagctgttcactgtgaaacagtctcttgcttgtgtattttttgagtacttctnnnnnnnnnnnnnnnnnnnnnnnnnnnnnnttatttgtacaaatacactttgataattttttatattttcataaagttacttttacagatataaaattaaagaacttcacttgtcctttggagtctgttattccattgtacgtcactacagatttttcactttatagcacagatttcttaagttaagaaaacattgagaacgtatcagtttgagatgtttggtgttgaaagccaagtgtccataggttnnnnnnnnnnnnnnnnnntgtcactttccaacatctagtacgatgtgaagggtttttttgtttgtttgtttaacatataaagcaaatttttctaatttaaatacacaaatgtaaaaatcaagtgtgtttctttagtttacttgatagaga

SEQ ID NO: 1478 - DNA, 741 bp, Macaca Fascicularis
  misc_feature (1)...(741): n = A,T,C or G
acatgtgaannnnnnnnnnnnnnnnnnnnnnnnnnnnnnnnttgtttctgtttctacatagcaaaaatggttttttgtgttttttttaggggaacctatataattatgacccagtgatgtcttttggtgatttaagcttacggattcaggttacaattgagttggattctagatggttactaccttgaaaaggatgtttgtgccttatgtgacacgagccagagcctgctgggaataagcaaagcagattcatgccaacaccaactcgtagctttagtgggggatgggagtggtcacagacttccaaaatgtggggctttggatttccataccaccccacgtgtgtgtcatcttcctctcacactcttgatgataatttgaaaatggtgaaatcacctctgaatttgcctgtagcatgagtacattcttatgacaacataacaaatagttcaaaatgtgaatattagaagctgttacagcctacaattgccgtaattttccacatttgtggaattgatattgaaatagcggggctaaggaattactggcaagttttagcctgtgggtaataccttagggttgtttaaatatttgtaattttatttaaatgttcatgaatgtttgaaaggaacaaaattatcagggatggctctttgccatgggtcttatttttaccctcttttctgtaagaaaaaagaacaatgtcttatgtatttttaaagtttttggtatagtttctaa

SEQ ID NO: 1479 - DNA, 1989 bp, Macaca Fascicularis
ccttctgccgcgatgtgaaggtgctggcctcagttatggcgctggcaggcttggccatgggctgcatcgacaccgtggccaacatgcagctggtgaggatgtaccagaaggactcagccgtcttcctccaggtgctccatttcttcgtgggctttggcgctctgctgagcccccttattgctgaccctttcctgtctgaggccaactgcttgcctgccaatagcacagccaacaccacctcccgaggccacctgttccatgtctccagggtgctggcccagcaccacgtagaggccaagccttggtccaaccagacgttcccggggctgactccaaaggatggggcagggacccgagtgtcctatgccttctggatcatggccctcatcaatcttccagtgcccatggctgtgctgatgctgctgtccaaggagcggctgctgacctgctgcccccggaggaggcccctgcttctgtctgctgatgagcttgccttggagacacagcctcctgagaaggaagatgcctcctcactgcccccaaagtttcagtcacacccagggcatgaggacctgttcagctgctgccaaaggaagaacctcagaggagccccttattccttctttgccatccacatcacggccgccctggtcctgttcatgacggatgggttgacgggtgcctattctgccttcgtgtacagctatgctgtggagaagcccctgtctgtgggacacaaggtggccggctacctccccagcctcttctggggcttcatcacactgggccggctcctctccattcccatctcctcaagaatgaagccagccaccatggttttcatcaacgtggtcggcgtggtggtgacgttcctggtgctgcttattttctcctacaacgtcgtctttctgttcgtggggacggcaagcctgggcctgtttctcagcagcaccttccccagcatgctggcctacaccgaggactcgctgcagtacaaaggctgtgcaaccacagtgctggtgacaggggcaggagttggcgagatggtgctacagatgctggttggttcgatattccaggctcagggcagctatagtttcctggtctgtggcgtgatctttggttgcctggcttttaccttctatatcttgctcctgtttttccacaggatgcaccctggactcccatcagttcctacccaagacagatcaattgcaatggaaaactctgagtgctaccagaggtaaaactgggtgaaggaggcaagagaagactttcagcctcttgatcaccagcacgaccatactgtttcagaaagctgggtggtggtggaggcgctctcaatgaccgttagtcttctccactaaaacttggttgggtagaggaaattaaattgggtcctggtacctggtcaaaatcattagaaatttacctggcttctcaagttaccttcttccctggttcagactgttggtaagagctgtccagatacccagatgggaaggaaggagacagccgtgtgcttcactccatttgtcacctcatgcatggaccatactctgggtttgagatcattcttcattgaagtttgtaaaaataggttgaaattgtaaagctccacgatcattgctatatgtagatatatttcaatttaagcaaaacaagctgcaagttattctctggcatgctcaaaggatttttgtgcttttcacttaatagtccaaagtcccttaaattcccgctgcagacatcaatagcttatctatattctcagacactaaaaggagaagttgaatcttgctctctttggtatactaatgtagtggtatgctaagctagctcataccagcttagaaaagctgattgtaaaattttcatgttgacagctggttattaaatgcagccattattaaaaatcaaatcatacaaacttataattaaatcaattacatttaaaacaaaggtaataaatattcaaagcatatcact

SEQ ID NO: 1480 - DNA, 731 bp, Macaca Fascicularis
  misc_feature (1)...(731): n = A,T,C or G
tcatgcnntgtgtaccaaaaagagcagctctacttaatgcaattcttcattcagcatatagcgaaacannnnttctgcctcatttgaaagacatcccagcacagcatatcacactgtttctcaagtatttgtatttcctgtatctgaagtgtagcgaaaatgctactatgactcttcctggaatacacccacctaccttgaaccagattatggattggatatgtctacttctggatgcaaattttactgttnnnnnnnnnnnnnnnnnnnnnaagaggctactgataaatctttacaagcttgtaaaatctcagatatctgtttattccgagctcaacaagattgaagtaagttttcgggagctacagaaattaaatcaagaaaagaataatagaggattatattcaattgaagtgctggagctcttctgatattaccaactctccttcatagacattttataaagctctttnnnnnnnnnnnnnnnnnnnnnnnnnnnngaacggtgttttgtttgcgaccatctcggtgtcaggagaaacgtgtcagtgagtacctgnnnnnnnnnnnnnnnnnnnnnnnnnnnnnnnnnnnnnnnnnnnnnnnnnnnnnnnntaggttgtggacattggtgcggagaggttctgcaattttttaaaaatatgtagctgggttgattttaagtaaaattatttgtgtattgataaaagtctaatttcttatgtgttttg

SEQ ID NO: 1481 - DNA, 2122 bp, Macaca Fascicularis
acgcttagcaacatccacaatagtgcaatgcacatggattctggctctggtaatggacagggagcagtccccggagagagggccacacttaccctaatgacagtctctagggtctccgtccagcctgagcaccctgcatggagcctggcctgaagtgctccagctcagaggaggaagagggggaagcaggcaccttctgtccaaaaggaagaaggaacccaagactgaagacccacagctaaagatatgtgtgaggcaggtataagttctgttctatggatgaacaattggtcttcaggtaaagcacaacttgtctaaggtcaaatagctggatggctcaggggactgagctggaaaaaaaaaaaaaaaaaaaaaaaaaaaaaaaaggcctcagaagggaaatggaggcccagaaagctttggtgagcagctcaagattacacgggacatggacaccagaattcatgtttcctcaaatagttcatttccagaggccttttaggctattctatcatctgccctctgtctgcctcaggggctctcccctccatcccccatttggaccatcaactgatgccaatggcaccaaggaagcatcaactgatactgggcagaagggcagagcagtggcccctgggagtcttcatggctcctctggcagaaagtacctggaggcatcagctcacggacctggagcatatcagcaagggtgcaggtaggaacagggataaaccgtaccagatcatcaccctggcactactcatgagaaactttcccagccattctacttggttgacttggccaggaaggagttaacacacaacatgtgaggagtacactgagtagggagctatgttctggggtgaactgtgggtatctgggtccatttaatgcaccaagtcttcaaatagtggcagccatcacaggctctcttgtctgcttgtgcctgcacatggggatctttcacttggtggcttctccctagcaaacatttttagcccatcctggtttctcctccctgccctctctaccgtgggaaatgcaaccacattgtccacgtcagacctaattagaccagcaaatcggtggcactcaagtcatcacagcacactccaagcacaagaggaaatgctgtgtaggttatcctgtgagctgcttgtgtgtctgtttgtgtttccttggattatccattctctgctccctgccttccatcacctcactaatggagaggcaggttgcagtcccccacaggccagcattcatcttcccagtctgaccctctcggaggctattacgctgctgttgcaagatcgacgaggggagaaaaatgaaaacagcgcacagggagcaatggagggcaaatgggactcttttagaactggatccattgatacgtcaggccaaggagaaatgaccacaagctctgaaaaatggagagctccctcagacagcaaagccagcggagtgggcttccccgctgggctgcccacaggaagcggccaggctggtgggggaagtagagtgtttctctgcagaagactgggcagcctaggtcctacaaaatgaggtgaaggttactgaggtcattgctgcccctgcctcaaataaaaaattagaaatcctccccacccagctctgttcctctccccgcaaagcattgcggaagacaacactgaagccgccagccctattatgcattcatgattccagcttcaaccaatcctctctgctgcaatccctttattcctcccctgcagctgccccggcacctctgcacagtcctttttctggatctgcccctcaccgtgctcccatctgcactccgtcctcagaacagattgccttgcctgacctcctgaggccgatggagatggagatcgtgatgtaaccccctttgccctccatcactgtgcctcccacacctctgcgcagctcgttcactctctctcccttcactctgacttaagggaagaggaatttttaaaaccaacctcatcccttcccacctcctcaggaaactcactcctttgcttaccctctctccacctttaaaaataacaataaaaacgcctctttcacctgtgaaaaaaaaaaaaaaaaaaaaaaaaaaaaaaaaaaaaaa

SEQ ID NO: 1482 - DNA, 779 bp, Macaca Fascicularis
  misc_feature (1)...(779): n = A,T,C or G
taaagcaagagnnnnnntgctgtagcagaaggaagtcaggagatgtgagcatgagagggtcagagagggtcctnaaaagcagccccggctgacagccagcagggaaacagtcctacagccacaaggaactgaattccaccagcaacaagaatgcacgtggacgcagcctctcccagagccatcagcaaagagcccaggctggcaacacctggatttcagctttgtgggaccctaagcagagaaccgagctgagcctgctcagactgctgtcctacagcactgtgagatcataagtgggtgttggtttaaggggcagagtttgtgataatctgttatgcagcagtaggaaacagactcacagggcctagcggaagggagtcttaggaagctcctaggaggtgagcaggggatgaagttgggagagggctgggtgctctatcctaatgctatccctccgctatactcccacatggcagtaactgactggaccggaagtcctcaccattccctactgctgtacctgggaccgaaccctgtaagcatttacatttgtgactcttgcccaggtggagtctgggcccctgcgtggtgagcagcagtgagcttccctctcacaggagtgggttcttgacaagaggagtttctgtggcattggctcaggcagagccttctaggttatgggcactccagacaggctgatctgatgccctttcaaaccagagttcccttcctcctcccaaaccagagtttttcaaatgtatgtattcgtggtgcctgga

SEQ ID NO: 1483 - DNA, 718 bp, Macaca Fascicularis
  misc_feature (1)...(718): n = A,T,C or G
gctcggcagggtaggtggtggtttcaggtcttgtcacccttgcttggtggagctgnnnctgggagcttcggcgtctgtgactgaagggatgctggnnnnnnnnnnnnnnntgctcagggctcccaggctaggtgtgccttagccacaggcagggctgtcaataacccccttcctcactggccagtacctgacatcagcaccagtgacaggctggtcagagggcagggctggtgagggtttgtcctaagaggaccaccaccatctctgggtctccaggggtagagcctggccctgtcctgtgctacccggggctgcccccagacccgtgaggccaannnnnnnnnnnnnnnnnnnnnnnnnnnnnntgtccctgtcccgtcttccnnnnnnnnnnnnnnnnnnnnnagctccaccttgaaggagcccctcagatcctcccctacatcnnnnnnnnnnnnnnnnnnnnnnntccacaatgtgctcctgcctacctgggtcctgcactgtctgacccctgcacaccacactcatgtcaccacggcgtgcatcatgttcatccccatctatttatttaagcctttctttgcttgtagggcattttgtatgtagagcagttgaaaacagaacctcagaactnnnnnnnnnnnnnnnnnnnnnnnngcttttcatgaccaccccgttatctatgtatatgtaaagttaaggatgagatcttaag

SEQ ID NO: 1484 - DNA, 717 bp, Macaca Fascicularis
  misc_feature (1)...(717): n = A,T,C or G
atcatctgtannnnngaatttccgctcactnnnnngagcccccacatttgtcccaggcctcagagtctctataaagagagattcccaactcagtatcagcacaggacacagctgggttctgaagcttctgcgttctgtagcctcacctctgagaaaacctgtcttccaccaacaccatgaagctgcgcgtgacggtcctgtctctcctcgcgctagcagctgccttctgctctccagcactctcagcaccaatgggctcagaccctcccacctcctgctgcttttcttacaccgtgaggaagcttcctcgcaactttgtggtagattactacgagaccagcagcctctgctcccagccagctgtggtattccagaccaaaagaggcaagcaagtctgcgctgaccccagtgagacctgggtccaggagtacgtgtatgacctggaactgaactgagctgcccagagacaggaagtcttcagggaaggtcacctgagcctggacgcttctccatgagacgcatcttctccacactcaggactcctctccgcagttcctgtcccttctcttaatttaatcttttttttttatgtgctgtattattgtattaggtgttatttccattatttatatttgtttagccaaaggatacgtgtcccctgtggggatggtnnnnnnncactgtttctnnnnnnnnnnnnnnnnnnnnnnnnnnntg

SEQ ID NO: 1485 - DNA, 669 bp, Macaca Fascicularis
  misc_feature (1)...(669): n = A,T,C or G
caggnnnnnnnctcagtttattatctcaatttnnnnnnnnnnnnnnnnnnnnnnnnnnnnnnnctgtacagagctgccacgcctaacctcataacaatcgcatnnnnnnnnnnnnnnnnnnnnnnnnnnnnnngtcagaaacattgggaaaagccacagtcgcacgcacatctctcaaggaaacaaannnnnnnnnnnnnnnnnnnnnnnnnacacagcaagtgtgcagtaggcaaagttctgttcttttgacagtagccaaatgcttnnnnnnnnnnnnnnnnnnnnnnnnnnnnnnnnnnaggttagtacgaaggccaacaatgttgtgagcaggattcaatttctacagggtcatggggcatcatccaccatgtgaaggggnnnnnnnnnnnnnnnnnnnnnnnnnacccatccagattaggatcctgatgccctcgccagagctcgagctcggnnnnnnnnnnnnnnnnnnnnnnnnnnnnnnnnnnnnnnnnnnnnnnnnnnnnnntagatagtgtaaccatctggggaggtaggttcaggaaaccacacggactatgcacattcccctttcctagatttgctctaccacgcttgttaccttcccaaatcagtgattccggcttcccaccgctgctgtttctaagccctgaaccccaactccgt

SEQ ID NO: 1486 - DNA, 742 bp, Macaca Fascicularis
  misc_feature (1)...(742): n = A,T,C or G
ggtaaaggaaagtgnnntaatttctatttacttnnnnnnnnnnnnnnnnnagctcgccccatgtaagttctcattccatatcagtggataccaagctctgtatccatttgtcccctgccctccacgatgtgtgacatagaacacggactttggtcctgggaaagcaaaagctcgcagtaaggaatcctgtgccaaaccatgtacaacaattccaaacctccaggaatgtttgtatcacagagcaaattacttcctgccttttcattagcgcctatcannnnnnnnnnnnagtcttacttgcttataagtgccctggaatcatccaggtaggagcttaatttttttcaattgcatgagcaaagtgcttcttagtagtatgaaattacaacaattttagtttaagactttccagattcaagctcccactgttggaaaaaaccagcctttctaatctcttctgctattggagtaagcccttaagaattgcgtgatagccaggcacagtggctcacgcctgtgatcccagcacttagggaggctgaggtgggtggannnnnnnnnnnnnnnnnnnnnnnnnnnnnnnnnnnnnnnnnnnnnnaccctgtgtctctataaaaaattaaaaattagccagttgtagtgacacacacctgtagtcctagctactcaggaggctgaggcagaaggatcacttgagcccagaaggtaagactgcagtgagctgtgactatgccactacact

SEQ ID NO: 1487 - DNA, 744 bp, Macaca Fascicularis
  misc_feature (1)...(744): n = A,T,C or G
ccctctgtgctgnnnctggcataggaagtgtcaggaaggagtcttgggttgagactcaggaagcccagatgtgagtcctgggtcctctgccaacttgtgtgtgagcttgggaaagctgctgtcctctctgagctgagctttctctccatggaagatttggccagtctcacggcagagctggaggacagcccagtccttgcctatgcctgcctcgcccaacgcccagtcctggagtgggagtcggggtagggacgggaggatcaggaaactgggtcctagtaggagcagggcagaggggaggcacgccttnnnnnnnnnnnnnnnnnnnnnnnnccctcacctctgtgactgttggccttatgggaacagcttctgtctctgtcctgggtgataatctgagatggactcacccaggataattcccagatccagagaagtggggccagaaggtaggaggccatccaccttgtcccaaaggtctccctttgccacttgcctcaacctgtcacagcccccttgttccatgttatggccattcttttgctattctaaggcttcaccaagtaccactggggaagactcatcttaaannnnnnnnnnntcttctcacctcattgggtttaggatgcagacagcagcagagggaagaggcctgggggtgggggagcagcagctttgctacaggcctatccctgcctttctgtgtgtctgagacaagtcacctcccctctcagggctcaacta

SEQ ID NO: 1488 - DNA, 710 bp, Macaca Fascicularis
gggtaaagtaagaaccaaacactgcttccactccccctatcctcactccactttgggggctttaaaaagtgactaacagttgataatcgtaaggattcccaagactgcagaatttagttgtagagcataactgtgcatttgatctctgaaagaaaataagagaccctctaagaggtggtgaccttagaatgaggaggggtcagggggtcttttatcccagatcggcctcacaccagcctaggagatttccccacctgcaacgtaaagcagcctgtaaattacatatagccacaatgcacttaaattgagtcaatcaccatggaaaatgggaactaaatacatcatcaggtcttcattgaaaaaacttgagtggtcacctgtgattagctcttctcctaaactaaggctgctgtgacccttaagctggcttttaaaaatgtattcaacatacctcttagaaaacttaggctgaaatattctttaaatgactgatgcaaacaacttcacaaatacgcatacaaatgtctgaataatgtcactaagtaacatggtatataaatatgtattcagagtaacatttacatattggccataatagcaagcataccattaacaaaaaaaaaaaaaaaatcatggagacttcacctgttcatgtcagaatcccaaggcaaggaggcacacctaggcaagaagggccactcaacttgcag

SEQ ID NO: 1489 - DNA, 746 bp, Macaca Fascicularis
  misc_feature (1)...(746): n = A,T,C or G
tgaaaattccaaccatgaggatgggcgcattggggaaaggtgagaaggagagcctgcctattcagggacctaggctcaaagagcccctccctgcccgtcacccagagatgcttcaccaacacctgcctctgagacctcgctgtctgttccagcaaccctggtggggggtcagacttnnnnnnnnnnnnnnnnnnnagtggacccaccccagggcctgctgaggacagagcagccaggccgtcccgggccgcttcgagctcactttgcagttggcactgggttggggaggaagagagctgatgagtgtggcttccctgagcgtggggttcccctgcttgtccagttccagttgtgagctgtcctcggtgttactgaggctgtgcctggagagtagagatttttgatgaaaggtgtgctcactctctgcgttctattttctctctcctccctgttcctgcaaatcacaagaaaaggtagtggtgtgtcttgaccccatcagcctctcacccactcccagacacacaagtcctcaaaggtttcagctccgtgtgtgggatgtgcagggtttttctagggggtagggagagaccaaaatgaatataacttaaaatgaaagtatactttttataatttttctttttaaaactttgtgaaattatttcagatacatattttagtgtcaaggcagattagttatttagccacccaaaaaaaagtattgtgtacaattggggcagtcaccacaa

SEQ ID NO: 1490 - DNA, 1699 bp, Macaca Fascicularis
  misc_feature (1)...(1699): n = A,T,C or G
aaaatccttaacttattatatatttacctctttcttaataaaagcatatggggaggggttctgattagtggattctgttttatcagtgtttcaaattttaaagagacttcttagtcgttgattttacagtgtttttgctgcttaacattacagctgtgaatgttaaggagctgttagttgccatattccaaaaggatgttctcgggagctttgtttctattgttcatcttcataaaccttttttaaaaatattaagaataatttttgataaacatttacatttccaaatatgagttatttctctcccgtcctattttttgtttgttctttttggcttataagcagctagaccattaaaagataaaataagtacttcttgtggagaccttatgaacatttgttttctgtgaatgacctagaagacaggaccatttatctgacaaggatgcaggtggagtatcagatgtcagtgttcattttctcctgtggggtatgccacaagatgggattgtattagacaagcagaatttttgcctagtcatgatattggaatcttttttttttttttttgagatggagtctnnnnnnnnnnnnnnnnnnnnnnnnnnnnnnnnnnnnnnnnnnnnnnnnnnnnnnnnnnnnnnnnnnnnnnnnnnnnnnnnnnnnnnnnnnnnnnnnnnnnnnnnnnnnnnnnnnnnnnnnnnnnnnnnnnnnnnnnnnnnnnnnnnnnnnnnncagtagacttaaatttttgctaattttgctaatttttgctaattttgtattttaagtagagacggggtttcatcatgttggccaggctggtcttgaactcctgacctcaagtgatctgcccaccttggcctcccaaagtattgggattacaggcgtgagccaccgtgcccagcctggaatctctttataatatcagatgtctcactttaaagcacatggctcacatacatttaatagaatttggttttttgagtgggacgtgatttttgatgacttgttctgatgcattaaagtctcttttccccatcttttcagtttataatcaagaagaagactctttttatgtacaccatgatatactcttgtctgcatatcctctgagtgtggaatggctgaattttgatcctagcccagatgattctaccggtaattagaaaacttaaggttgttcagtgatttccagtcttatgtattttctcctagctccataaattatgtattctcttgaatgttttcagaatcgttgctgatattttctgaagttactgttgttttatgaagttagagttcttaacacaccatcactttattgtttggggtccataaatccccagactttagacaggtaaggaggtagctgctctactacaggctgaaggacgggggcctgaagccttttggactgtagaactgtaaaggtcccatacagactctgtataaatggcctgatgtgtgagatgttaccagctagatttcagtggcataacctgttttagaaaacataaggtaaaaccgaaatgaagaggcttgtcacaagtaattaggttcccatgttagtctttgtaaccacatctgcacactcttagttgcccctgtccgtactttttaataaaggtaaacactgattatactgtcagtgcttaataaacactgattatactcttaaaaaaaaaaaaaaaaaaaa

SEQ ID NO: 1491 - DNA, 644 bp, Macaca Fascicularis
  misc_feature (1)...(644): n = A,T,C or G
tcnnnnnnnnnnnnnnnnnnnnnnnnnnnnnnnnnnnnnnnnnnnnnnnnnnnnnnnnnnnnnnnnnnnnnnnnnnnnnnnnnnnnnnnnnnnnnnnnnnnnnnnnnnnnnnnnnnnnnnnnnnnnnnnnnnnnnnnnnnnnnnnnnnnnnnnnnnnngttnnnnnnnnnnnnnnnnnnnnnnnnnnnnnnnnnnnnnnnnnnnnnnnnnnnnnnnncagtgagnnnagatcacaccaatgcactccagtctgggtgatagagtgggactctgtctcaagagaaaaagaaaaagaaaaagaaagcaagattaaatacactagagaaaggaaggagggcaatcaatgttggaagggctactctgcctccataagcattttcaaatttcaggctcccgcctttcacggaacgcactgcccaccagtcctgtttacactgccaggttccactaggagcttccccacctctgcaggtgcaggcctcgctgcttcttaaggcctttctctggggtgggggaaaacagcaactatatgattgtctttcatattcacttttatagacctagaatgtctacaatgtctgagagtggcgtttgcggcatgactnnnnnnnnnnnnnnnnntggtattggaccctttctgtgtt

SEQ ID NO: 1492 - DNA, 1899 bp, Macaca Fascicularis
ttaaaaacccaccgtgttttgtatatttttacacactatactagaatgtaagctttctgagagaggacctctggccatgtagtggatggccagaaaatggaaagaagcagataacagaatttcctctctgggcaaagaattgtcaggacctaagaaacatgtaaagattagaaaatccaagaataaatcgaggatgatttttatttttataagcttgaaagcaagagagaggaagtagaaaataagattccttagaatccaggtgcacactgttaaaattgtcaatgtggatgattctttaaaacataatttgggccaaaagctgagcatcacgccaagaaaatacctctgcttctagacatcaagagaggtggagataaaggaaaaagcttaatgccaaattgatagcagtgagaggcaacaaaccttaggacagggaattcttaacttgtggcagagcaaacagaaactcatgagacatgttatccagtaatagaaaataggaacatgagatttattccactggacagtactaggattctatatgtatattcatgggaattgaaataaagttctccggtgtaattggaacaagatagactgaggagagagtaaaccacgaatgctggctcaagacaaaaaacccagcagagatgaattgcagacatacccatgacggaaaaacttacacaagatcactctaaaggaaagacattgttaagccctttgaaatgatggggtggagaggaaagtgaactgaaaaaatgaaaaacacccacaggaagaaatcgaagacgattgggtcaaccccagggctaccgaagtgaggaagaaagttggctgtttccagacagtgactttcttaatttgttgagcatacatgtccttcgcaggacatgctttttctatggtcgctggttgcatcaaatagaaatgagttattggaatgttacctccaaatccttacatgaagagtaagcaaaagatgaaagcttctgattcctttacaaaataattgcttttgggactttactatagctagaaaaaaaaaaaaaacctatcacgcgaggaagtaacacatcaagctttctggcccggtaaggcagaaggtaattcaaaatcggcatgttcaccacttttggcacgttcagcagaaaaatgtttagctttttctctgccagaatttgttcctagcatttatttccagttgccttaacaaaaaataaaatcatcccatgtatataagtacttgcttagaaatcatggtgaattagtccgtaggctatgctgagaataataattggaaactgaaaaacaaagattgactatagtaattaaatggaaactttaaaaaccatcatttaaaatgtgaatctcttctccaataagtgtattcggtcctttgaaagaaattcctttgcaatcactctctgaagaatatagattgtaaagaatcctggctgtgagaaaggaagctgaaaagggtttgtttttccctctgacactttgcagcagagacatctcagaattgcctaagtgtgaatatctaaaattacaaactagtgttctctagaaatcttaggatacatgtgtgatggtatagaaagctacagctgtactcattaccagtgaaataactcatgaaaaagttttgggccaactttcaatagcatgttgaaagtcattgcattttctttgtctctacttgcttattgttcattttagcttcattacctgtagtgacttctatgtatcccattgtaagagtagggcctggacaaggtttgtaatcctatcacatttccaaaattattgaataaagtaatagatgccttctaaaaaaaaaaaaaaaaaaaaaaaaaaaaaaaaaaaaaaaaaaaaaaaaaaaaaaaaaaaaaa

SEQ ID NO: 1493 - DNA, 2153 bp, Macaca Fascicularis
gtgatgcacttatctttttcttttttctaactaaaattgtgatgttacagaaagtcattttatcttcctttatatttcctgaactttttgtaattggtgataattctttttctttcttccttctattaaaagctcatttgacagcatcagacattgggggagagatttcccccaaagtatgtattctaatttcattagccctatccattaaacaccattgccaaagtagtattttcataactttgttgatttgggccttggtgtgaagtatatttacctgagagttcacttttacttttcttaaacttaggtttcatttacaaaatgttttatttaagcaaggaacaatgtaatactcaataatgacctaaaacacctttttgaaagggtttgcacttggaagagtttatgttctgttgaaaccaactttgatagggtcctcacctttctgtgaaggaggtgccgcactacaagtttcaaattatatggaaaaacttaaaattaatcctctgttggtgatctcataaaatggttttgaccttttggtatcttaatttctatctaaactcttatcagaaaattttctttgactatatcaattagttggctgtgggaattttccctttccacattaataaatgcctttctgtgtttctgaatcagaagcaaatgattagggaaaaatatatgtccaaacaagacaagattagtttaaacagttaagaacatttagtccacattgtcttgtcagccagcaattgtcacggaaactatcatttttaagagtgccactgtgtggattttttttttcaagtggttattacattaaaattacctcatactgaggtttttgcactgaaatatcacagcttcagatttcatggttaatgttgtgcgtatgtttgtatgtttttaaaggaaacttgcattttcaatagttgatcctaaatttcataaactgcacttctttactctggtaaagctgatgtttttgtgcttattgtgaattgccgtagtacctttgaatgtcaaactttatttagaaatataaaacttatcctttatgatataaatggttgagtgtatgtacccagtatttcaaattaaatttcacattgctaaattaatgaaagtaacaagattgtgattttttaaagtcagttggttaaatgcaataaatattggttgctcaaatatgccacaagtaactcaaaatttttcatttactttcaatagcataagattgcttaatatttaggattgactgttgtttccagttaagcactacaggattatgccttgtagcttccccaagagaaggggggaaaaagcactgtgttgataatacagaactattttgaacaattttggtagtaacttttaccatactgtttgctttttgacttgggtaaatatcttaagagaaaagaaaacaatacaccaaatgaaaatgctttgaaagtaaatgaaaacagcacttttgaaaggctggtgtagtatgaccctggagtcagcctttgtgttatagctaaaatgttggtgctataaattctgattgtttacagatgttgattctgcttatgctccaaagtgtgcatgatgtattttacgtagtactctgaggaagtctctttataaaacctactaccacttagtataaatttgtttgaatttatatcatttgttactgtaaattcagcttattcaaattaggttggcacagatttaaactgatatacattccaccaaagccaattcagtgtataagtattgaagtataagcagtcattgcagcttgatgccagatcatgtatgtaataacaagtggaagttaatagggccttctaatactgtatgggtactcctaagaattatttcattttggatataaagaagttataaggcctcctgtcacattcacagcaggttctccaaaataatttggttgtttcaaaaacaaatggtaatcatttggttggattcttcaggatcatgactagatcatatggttttaccatagttgccaagtggtgggaggtagcatacctgaaaatgtacgtgtgtgtttgttgtattttttcacattttgtgaacaaagcacatttattaaaaattttaaattttctagtaaaaaaaaaaaaaaaaaaaaaaaa

SEQ ID NO: 1494 - DNA, 719 bp, Macaca Fascicularis
  misc_feature (1)...(719): n = A,T,C or G
aacagtnnnnnnnnnnnnnnnnnnnngggctaaagccagacacnnnnnnnnnnnnnnnnnnnnnnnnnnnnnnnnnnnnnnnnnnnnncggggctatnnnnnnnnnnnnnnnnnnnnnnnnnccctcttatgtgggtattacaggaatccttctacaggaaacaaagcacattttcaaaannnnnnnnnnnnnnnaccgcctgaaagnnnnnnnnnnnnnnnnnnnnnnnnnnnnnnnnnnnnnnnnnnnnnttatttcctacatttacgggagcaaattccagcttcggtcaagtgaacggtctgcgaagaagttcaaagcaaagggaacgattgacctnnnnnnnnnnnnnnntctaacgcagttgtttatgacagctgaaaactggacactcctaaatgccaacctttcagtgaagagatggttaagccaattctgcttatagaccacctcnnnnnnnnnnnnnnnnnnnnnnaggatgctcaacaacatgggnnnnnnnnnnnnnnnnnnnnnnnnnnnnnnnnnnnnnnnnnnnnnnnnnnnnnnnnnnnnnnnnnnnnntgtgtgactcccatggagaggagcagactggcaggaagcacaccggggttaactctggttgacttgactagtatcactcagattttaaaaaatacttttccatgttttctcagnnnnnnnnnnnnnnnnnnnnnnnnnnnnnnnaatacagtcc

SEQ ID NO: 1495 - DNA, 747 bp, Macaca Fascicularis
  misc_feature (1)...(747): n = A,T,C or G
gaaccnnntcttcccaggaatagtacttaatagattttaatgttaatttatattcattgtagaaatgaatttccagtgacctataatttcattacatatattttaaaatttaatttattttagannnnnnnnnnnnnnnnnnnnnnnnnnnnttaacgttttaaagacttagtcctatacatttagaagatgagtcagttgaattagtactggacaaacagttggagattagtttgcacataagcacatcatatcaaatacaatattccagccaactagttaattatcttcctgattacattcattgggtctgtttgcctaatgttgacaattaaattcttggatcaagtggaggtatgctgtgatccacaaagctcttttatannnnnnnnnnngtgtgtgtgtgtgtgtgtgtgtgtgtgtgtgtgtgtgtgtgtgtgtttgcatattatagctctctttaagacagacatctaacaagattttgttattctgggctgccaagagtacttgggaaaggtggaatgtgcaataggaaccgatctgtgcattttttgacatcgtccttcctgctgcgcacatcagctctgttgacatttcgaagggtagttttaatttagctctgttctcttgttggtgccagtattacattgaagactctcacctatgatagaggcaatgttgctttgaaaatnnnncttcaggtggagcttgcagtaagctgagatcgcaccattgcactccagc

SEQ ID NO: 1496 - DNA, 815 bp, Macaca Fascicularis
gttgaccagtaactgaattaacagaattcagggttatccgctaggctctctcaacaactctggcccaagggtagaatcaacccacaatttgtctcccttgtggtcatctgaaccccaggactgctgtgccagcctgagagtcacagccttggcgggacgggaagagccatgtgtctgggcctgcgcgtcacctcggcgagcaacgcgttgcatttgacgcccggatgagggggaggccctgctcgtggagctccttgaagcagctcctcggctcccccaggctgaggaaccccaaccaccccccacctgcgtcagaagctgcagttcaggaagcagaggcaggtcagagcaggcccaggactcatggccgcgtccactcacgggaaaagcatcgccaagcacgccgggcggggaagatgctattctctagaatacctgcatgctgtccaaggtgttctgcgcgaagagcaaagcaagacagttacagaaagacgccgtaaataaaagacgacacaattcccagcacatctgaattgccttctctgtttttcgaaccaaagcacgctgcgttgcgaccgtcaccatgtttgaaagcatgcaccaccagcagcacggggtgacaggtgacggcgggatcatggaggaccggtccctcagaggcggattgaagccacacagggtcacgtcaatgggctccggggcaactggggagagggaactaccttttctgctaggagatgatgcagattaaagtgcagtggataactcaaaaaaaaaaaaaaaaaaaaaaaaaaaaaaaaaaaaaaaaaaaaaaa

SEQ ID NO: 1497 - DNA, 743 bp, Macaca Fascicularis
  misc_feature (1)...(743): n = A,T,C or G
tgctgtgtgtgctcgggccacgggagtnnngagggttctgtgggcctgcgcgcttccctctcccatcgtcgggggaggctccnnnnnnnnnnnnnnnnnnnnnnnnggttgatnnnnnnnnnnnnnnnnnnnnnnnnntacactccnnnnnnnnnnnnnnncggtgttcccagtgtatatttnnnnnnnnnnnnnnnnnnnnnnnnnnnnnnnnnnnnnnnnnnnnnnnnnnnnnnnaacctcctcccgccagtgctaaccccgtgttnnnnnnnnnnnnnnnnnnnnnnnnnnnnnnnnnnnnnngaagtgctagtttgaaatatatccattactgtcatttccttttgagcttgtggnnnnnnnnnnnnnnnnnnnnnacttctccagctcccagccctgcgggggtgtccttggcatcctgtcagcagaggagatgcatccctgttgcattttggcatttggggttttgggtttatccacacgagctctgaacgtccgttatagttagggtgattggagggtctctnnnnnnnnnnnnnnnnnnnnnnnnnnnnnnnnnnnnnnnnnnnnnnnnnnnnnnnnnnnnnnnnaccgatccgagtgctnnnnnnnnnnnnnnntgctatttcaatgggcctgaacgactacaaagccagctcggtctggaaggggaagccagctctggccacgacacctggtcggagggacgtggggatnnnnnnnnnnnnnnnnnnnnnncc

SEQ ID NO: 1498 - DNA, 739 bp, Macaca Fascicularis
  misc_feature (1)...(739): n = A,T,C or G
cggccggtggtgtgggagtgttgcgggtcaggaaccagagggctaccagagcagccacccccgatttagnnnnnnnnnnnnnnngccactgcgacggccactggggcgccccttccatcctggttaaattctcattgtgatccccagcccccgcctcggttcctgacatccagggggccggttctccgcggttcaggctgggagaggtcaccgctccgggcagggcggacccccagctccatctcggaggacctttcgaccgaggagagcaggaaggggttaaccatgagcctcccaccctcatctcccagcccctggtgccgggcgaaggccgccgcttccctcccgaggtctcattagggtaaccctcaccgctattnnnnnnnnnnnnnnnnnnnnntgcctttaaatagagctgcacaaacagattggcggcaaaagcgtagatcnnnnnnnnnnnnnnnccaatccaatatttcagctttgtttgctttgcaattacgggttggcttgtggctacggtgccactggggcaaatctgcaaccgctcgctttctcctctgcactcggggctggtggaggaagcgacccgcggagtcactgcagggaggagagggggacgcgcgcggggggaagcggcggagggtggaggagcctcgcttgcaccccagggccgcgggcacgcagagctgtgttgaaggacacatttttcagttcctgacagtcactgagctatacg

SEQ ID NO: 1499 - DNA, 747 bp, Macaca Fascicularis
  misc_feature (1)...(747): n = A,T,C or G
gacactccactnnntgacaaacacaagttcagcagctcgcagcgcctgtgggagaatatgcattcaccctnnaaaatgagcagaggatgtcgtggaggcacaatttaccaactgggtgcagcagacaccgggctggctcctgaacttctctcctccaattaagctgcacaacctgnnnnnnnnnnnnnnnnnnattctatttacttaggttctgcataacttgccaagtgctcactctgtggaattcccagcaaagagaaaggaacaattgggggaaatttttgttaacatcctttcttttaactttccatagcagaggggaatgcatcaacatggagcagatgcgctgagaccaaatgctctcttcctcatgattacagttggttatacctgtggataggcaagctaattnnnnnnnnnnnnnnnnagagagggtagtactaacgtacaatgtgtggtcctggaggctttgttcccacgtaatacggtgcttcatttcacaagacctggcacacagagaagaacactgaagcagacagcctcgtgcagttgaaactgtggtctctctctgtatnnnnnnnnnnnnnnnnnnnnnntcagcattgttgacacaaatattgtggaatgtctttgttggagttggaaagtaatgattctttctgcttaatgtgttcagtgactnnnnnnnnnnnnnnnnnnnnnnnnnnnnnnnnnnnnnnnnnnnnnnnnnnnntacacgtatcaata

SEQ ID NO: 1500 - DNA, 693 bp, Macaca Fascicularis
  misc_feature (1)...(693): n = A,T,C or G
gtttcactgcttaggacatggtggccgtcaggagggtgaaggaggtttttggggcaggggccatgagacatgtggtcatcctcttcacccacaaagaggacttaggggccaggccctggatgactatgtagcaaacatggacaaccatagcctgaaggacctggtgcaggagtgtgtgaggagatactacagcttcaacaaccgggccaccgtggaggagcagaggcagcagcgggcagagctcgtggctgcgatcaagaggctggggagggagtgagagggctccttccacagcaacgacctcttcctggatgcccagctgctccagagaggcaggctggggcctgccaagaagactatgggcagtacctggccagtgtggaatggcaggtggagaagcagaggtgagagctgagggaggatgagagtaactggccatgcaaagtgctctccagannnnnnnnnnnnnnnctttcttaggttctcatgtctgcctttttatcacatgtggtttgatttttcttgccattttaatgaacttgtgtatcacttgtggacactgagcattttaggtgatttctacagcctgcgttttttctttcccagagttgccatctctgtttatgtgtctacagccctttgcttgctttttacagaatttcactcccannnttatcttccttgcaacagaca

SEQ ID NO: 1501 - DNA, 652 bp, Macaca Fascicularis
  misc_feature (1)...(652): n = A,T,C or G
tttgnnngagtcacccnnnaagnnnnnnnnnnnnnnnnnnnnnnctgttccccagttttggggggtccagggtccccccttctggtacctcccttacccctctttttcttcttccatctgtgcctgttccttccacagcccaggcacatagaagcccaccttcttccccttaggaggggggatagnnnnnnnnnnnngtgtctctgtcactcacacactgatttatggggtctgagctgggctgttcctgcaggatggacaggacccagcgccctcttctccccacaggttgtaaatagatttccaatcaccaggccagcccnnnnnnnnnnnnnnnnnnnnnnnnnnnnnnnnnnnnnnnnnnnnnnnnnnnnnnnnnnnnnnnnnnnnnnnnnnnnnnnnnnnagatttactgtaaagtagatttctttctctccctcccccatccttttattgtaaatattgtctctaaatgtgtaacatattataaagaatttataaggatttttaaagatgttttgctcatttacaaaagtgttgnnnnnnnnnnnnnnnnagccttccaccccacgtccgcatggctcctttcactgtgtccttgacacacctctctggcaacaactaaaatttcctgcttctgaaaagtcctgtc

SEQ ID NO: 1502 - DNA, 721 bp, Macaca Fascicularis
  misc_feature (1)...(721): n = A,T,C or G
gcgagagcggttggtggttctgtcagatgaaagcaaagcgaggctggatcccagcatccttcctcgagcccctggacagtcccgacgagacggaagaccctgagcccaactatgcaggcgagccgtacgttgccatcaaggcctacgctgctgtggaggaggacgaggtgtccctgctcgagnnnnnnnnnnnnnnnnnnnnnnnnnnnnnnnnnnnnnnnnnnnnngtcatcaggaaagatgacgtcacaggctacttcccgtccatgtacctgcaaaagtcggggcaagacgtgtcccaggcccaacgccagatcaagcgcggggcgccgccccgcaggtcgtccatccgcaacgcgcacagcatccaccagcggtcgcggaagcgcctcagccaggacgcctatcgccgcaacagcgtccgttttctgcagcagcgacgccgccaggcgcggccgggaccgcagagccccgggagccctctcgaggaggagccgcagacccagcgctctaaaccgcagccggcggtgcccccgcnnnnnnnnnnnnnnnnnnnnnnnaaccgctgcagcgagagcaccaagcggaagctggcgtctgccgtctgagggtacagcgcagtccccagctagcgtctcggcccctcccgccccgtccctgtatatacgtgttctatagaacctgttgtctggacgccgaggccagccccggccccttccag

SEQ ID NO: 1503 - DNA, 741 bp, Macaca Fascicularis
  misc_feature (1)...(741): n = A,T,C or G
agatggaattttgctnnnnnnnnnnnnnnnnnnnnnnnnnnnnnnnnnnnnnnnnnnnnnnnnnnnnnnnnnnnnnnnnnnnnnnnnnnnnnnnnnnnnnnnnnnnnnnntannnnngatnnnnnnnnnnnnnnnnnnnnnnnnnnnnnnnnnnnnnnnnnnnnnnnnnnnnnnnnnnnnnnnnnnnnnnnnnnnnnnnnnnnnnnnnnnnnnnnnnnnnnnnnnnnnnnnnnnnnnnnnnnnnnnnnnnnnnnnnnnnnnnnnnnnnnnnnnnnntagccgtcacatttccaaacaagcnnnnnnnnnnnnnnnnnnnnnnttccnnnnnnnnnnnnnnnnnnnagnnnnnnnnnnnnnnnngcttatgcctctggtgcccaatgccttgcactgtgcccttcaacactatgaagagaaacaagtagccacacctcaaaataannnnnnnnnnnnnnnacctaaataaacctacacaaaccagtacttgcctnnnnnnnnnnnnnnngattatgtgctcctcatgtagtagaaagtggtatcctgattagtctaacagttgtgttagactttagggccagtattgtcagcatttatttatttatgnnnnnnnnnnnnnatgggattacatttttcatttgaaacttgttcacaaaaatgtcaatgacattggtgactgatttgtacatatttttcatatagttttgtttaaaaaataattcacacaaaaccttgaagtca

SEQ ID NO: 1504 - DNA, 741 bp, Macaca Fascicularis
  misc_feature (1)...(741): n = A,T,C or G
ttctttttcctaccgaaagttacaacatgcatcgttgtttatacagtaataggaacaagaaaaaaagccacctgagttcaccctcaccaattgtggagttcatgcatatcccttcttctctctacacacgtgcgcaacagtgttacagctcttttagaatttgtctannnnnnnnnnnnnnnnnnnnnnnnnagcccctttcacatagcttgttcataacaatagaatctgtttagtgcgcgcaatttccgtgaagttcttttagtaggtagttttcccggtgcaaacgatgttagaaggtttggatgcgaaggttcggaccacgcctgggggcttccggctacaccggatgttgcttcctttccgcccccactggtcttgggaagtgttagtaggacgtggctctttcttcctgagctttccatttatctccgctgcacttgcagcttcagacgccgtatggcgtccgccgcgtcccaacccgcggccnnnnnnnnnnnnnnngcaaagggtgagaataatcgtagtcaacgcatgggttgccggtccggggaggatgcgggcagaggatgtggggcgacaaacctggcttcgtccgccgggaaaacagggtaggggacgccgggtcccgtcgttctaagtggggcgcttgcccccaagactcgggatcttattgggttacctatagcctcaatccactaattccctgcgctctccactnnnnncgctctccgttctccg

SEQ ID NO: 1505 - DNA, 703 bp, Macaca Fascicularis
  misc_feature (1)...(703): n = A,T,C or G
aactaccccaatgggttgtcaagagatcaaatgaaaaatatgtagcaaagttcttgatatacagtaaatgttaaatgaataatagttcttattactatgttcataccttcatccctgaaggtagttattcaaactcgaaactagtttagcgatatattcagtgttttggggttggtactgtttttcccacttaaccaacgtctaaaaagccgaacaaaacctcgcttggagttttaggaattggggactgaaatctgccagactttttttttttttaattattgaagaaaagctattgctgacttgggcaattgatttctttgctctttttctttaagcacaaatttattgtcgttttaattttgctgctgaacttgggagttgaagtaaatgcatcatcagcagttggctgcagnnnnnnnnnnnnnnnnnnnnttagcaaactaaagcaggaacagaaaaccaaataccacctgttctcacttataagtgggagctaagtgatgagaacacacagacacaaagaggggaacaacagacatggaaacttgttgggggtggagagtgggaggcaggagaggatcagaaaaaaattactaatgggtactgggcttaatacctgggtgatgagataatctgtacaacaaacccccatgacacaagtttacctgtataatgaacctgcacatgtacccatgaacat

SEQ ID NO: 1506 - DNA, 746 bp, Macaca Fascicularis
  misc_feature (1)...(746): n = A,T,C or G
gcatgcagtgtttgtggagctgccctctcacctttggcacagggccannnnnnnnnnnnnnnnnnnnnnnnnnncaaatgccatttgacaccggagccatcgatgagagctcccacttgggcaggcaagggctcnnnnnnnnnnnnnnnngccttttccacggtcaatggaggcacagcccgtggtgcaggtgtgcatggaggacacccaatgatccttatacagaaacgcccgacacaccgggatggtgtgggcagctcctgcactcagtctcttcccctcgaggacttaatggnnnnnnnnnnagcagaggcctgctgggggtagcagggggagacgggnnnnnnnntggcctcccgggagcacttggctcttccagttggtagggtctgagggaggggggctcagggaagctgtttctgtgggctctgcaccagaagacatttgannnnnnnnnnnnnnnnnnnnnaagtagccaaagactcagcgcattaaggaggaccctggcgtggggttggcagggagtgcatgtgggcagcctcccaccaggcggtctgggagcgtcctggcctcaggcggcgcctgcactctccctcctctgcttatccgtcttgccatggagccctnnnnnnnnnnnnnnnnnnnnnnnnnnnnnnnnnnnnnnnnnnnnntatctagaatcagcgagttggaaagcttcaaggaaagtgagatagcagttaagtgagaacgtcaaggaagcatat

SEQ ID NO: 1507 - DNA, 1426 bp, Macaca Fascicularis
aggtagttggttgctatagttgtcaaaaacataactgaggctgctgcagagaccaaagaaaaccagagggacttttcccagttggtgatatggagcaagtgccatcaacaggcagactcgtgcagatcgccgtgacagagggatatgatttgaaaggttttaaaggagatactccagttacctttattcgggcagaattcaatcaagtggttctgggagactctgcaaaaattactgtttctccagaaggaagtgcaaaatacaacttcactagcagttttgagtttaatcctgaaggaggaatcactttagatgacctcgctcacaaacctgtgttcttaactgtgactgaagttttaccaaaggaaaagaaacagaaagaagagaagaccttaattcttggtcaggcggtggtggaccttcttcccttactggaaggacagagttcatttcaaacaacagttccattgcaccctgtgcaaggctcacccttagaaactcctagatcaagtgctaagcagtgcagtcttgaagttaaagtattagtggcagagcctttactgaccacagcccagatctcagggggcaatctactaaaggtcacgctggaggctgcttactctgtgcctgaatccttcattccaacaggtcctgggcagaactacatggtcggtctgcaagttccatcacttggagagaaggactatcccattttatttaagaatggaactctgaatggaaatcattctgaggccaaagcatgctatgaacgaaccattagctttgtagtggatgcttctgagatgcacttcatcttcctgcggctggggctcatctatctggaagagaaagagtatgaaaaggcaaagaaaacctacatgcaagcctgtaagagatcaccttcatgccttacctggctaggactgggaatcgcctgctatcggctggaggagctcacagaggctgaggatgctctctctgaagccaatgcactgaacaactacaatgctgaagtatgggcatatctggctctggtctgcctgaaagttgggcggcaattagaagctgagcaggcctacaagtacatgattaagctgaaattgaaagatgaggctctgcttgcagagatccacacactacaggaaacagttggctttggaaatccatctttctgatacccctccagctgaacaattttccgtatgggactcttgagttcctttccttcccagagagtttcaccatatcaagtctgcagctggagaacgaaagaatcttcaccataaacagagacccattcatttatttccattggctgtgttactggatgttttactggttgacaagaaactgggtcacaataaaaaatgaagatatgaaactcaaaaaaaaaaaaaaaaaaaaaaaaaaaaaaaaaaaaaaaaaa

SEQ ID NO: 1508 - DNA, 644 bp, Macaca Fascicularis
atacttcagagagcaattctcaaacaacttcttcaaactgacagccttcaaggaattgtgcaggatagatgggtggccaaaaggcaagcttggaaagctacaggggaacgctacctgctcctctccatccattcctggctctctactcttaactccatatcttccaccaaggttcacttcaccactgtgtcattaaaatgttcagtaccaagaaggagactgttcgcaatgataggtataaactgttcaagaagacacccaatactagcaaatttttctgactccttttaaaataaaaactggccttcttacagtaatttcaaacttataaaaggcacggattaatccaaaatgcctatatatattcaggatagctttcctaagctgattggcctttgactgtgaaattttacttaaaaaaatcaagttaataaatcatatgtgtatgaacaaagacattcactgccaactgacctgtgaaaacataaattatattaccagtttggggattattattataaaataaatctttaatttatgtagagaagagttactaatgagtcaaagcaaactctcgcctttaatgaacaattcctgaaatgtttcataatgcaggaaaaattctactctgtctacaacccttt

SEQ ID NO: 1509 - DNA, 747 bp, Macaca Fascicularis
gtttcacacacaaaattgaactgtaagaaactgtgtttgtaatacttgtgtatattaaactttgttatattaaacaaactatgctttttccccctttcctgtcttctccttcccccatttaattgccttaggtacttaaacttcacccttgtttagcccctattaaggttgctttggatgtaggaagaggccccacattggaactaagacaggtgagttaaatgagtttaaatgtcatgattttaattacaggttgagtattacccaaaacactttggaccaggaccgttttggatctcggatttttttggtatatttgcatctctaatccaaaaatccaaaatcttaaatgttctgatgagcatttcctttgaactcaaggtttcaggttttggagcattttggattttgggttttctgattagggatgctcaacctaaccattactctaaacttgatagcttgccatttaaaattttattttgattcatttgctttttaaaatttttaggccgcgtgcagtggcttacgcctgtaatcccagcacctggggaggccaaagcaggcggatcacgaggtcaggagatggagaccatcctggccaaggtggtgaaaccccatctactaaaaatacaaaaattagctgggtgtagtggcgctcacctgtaatcccagctactcaggaggctaaggcaggagaatcacttgaacccgggtggcagaggatgcagtaagctgagatcacac

SEQ ID NO: 1510 - DNA, 740 bp, Macaca Fascicularis
  misc_feature (1)...(740): n = A,T,C or G
tttgcatacacaagcaccaaacctannaggtcttctcattatccatgtaaaccacatgttagataaatttttgcaagtagaggaaagaaggaagtaaaacatcacattttggtgtctctcaggctttcccccccaactatagtttctttgcattttgttttaacatagttttgctgctgtcttctgtaataatacagttctgtgcagctattttagcatatcgggggcatctccccttctgattactaaatattttattttggagtggctatgtactcctccatcgactagatggaccattgtgccagttgccgatcactaatgctgttactgatttttcatttataaattgatgaatatctgtgcacaggctgtttcccaacgtcaagttatttttttggggtagactcccagaggtgggattcttgaactgaagaatatgaaaaccttnnnnnnnnnnnnnnnnnattgacaaaatggattccagaaacatttgtatccccttacactgccaccagcaaggataaacatgtccatcttgcccgtattgggcattatcatctggctaaatatttgctaatttgataatgaaaacatagcattgtgtttcagttggcattttactgatttctnnnnnnnnnnnnnnnnnnnnnnnnnnnnnnnnnnnntttcctcttttgtggattgtcagtgtcctttgctctatcttctggggtctgataaatttctatgagctcgga

SEQ ID NO: 1511 - DNA, 592 bp, Macaca Fascicularis
  misc_feature (1)...(592): n = A,T,C or G
gaactatatttgacaacataaaatctctnnnnnnnnnnnnnnnngaattnnnnnnnnnnnnnnnnnnnnntgctcctgtctgtgtcttgcgtctgtggccttcctgttgtgtcttgtgttttggtggatgtgacagggctggggccacagtctactctgtccctgctgctagaggagccacctgtggaggagtgggctgtggttgggcctgaggcctgtggaggaggtaagcgtagccagcagcagccctctactcctnnnnnnnnctgagaccaccagtgtgggtcacgaggnnnnnnnnnnnnnnnnnnnnnnnnnctctctttcgggggttctcctggggcctttgatgggcttttcttgtcagtggaggaagcagctccccacnnnnnnnnnngacaggccnnnnnnnnnnnnnnnncggtggcccnnnnnnnnnnnnnnnnnnnnngtgtgtgtgctcagatcccgcatctatgcaannnnnnnnnnnnnnnnnnnnnnnnnnnnnnnnnnnnnnnnnnnnnnnnnnnnnnnggcgccatgccctgaagaggcagggtacagatggggctgggagggcaaagatggg

SEQ ID NO: 1512 - DNA, 751 bp, Macaca Fascicularis
  misc_feature (1)...(751): n = A,T,C or G
ctattgagcagaagagaagtataaatgtnnnnactagatgacccatcgccatgccggtctcccagacatctcccannnnctgaattcctcgggtgtcagttggcccaatgannnnnnnnnnnnnnnnntcaaatggcttcagttcaaggtggtccttgaaaggaaagtgttagaactcaggaaatccagcctccgcagtgggctccaggccttccctcccagannnnnnnnnnnnnnngctcttggtgctggctgggccgagtggtcacctcgtgtgcccctgtcttccnnnnnnnnnnnnnnnnnnnnnnnnnnnnnngaggcgcccaccagaacaggggtctggggtccgcnnnnnnnnnnnnnnnnnnnnnnnnnnnnnnnnnnnnnnnnnnnntggatctttctcagcctgnnnnnnnnnnnnnnnnnnnnnnnntaaaatatgaactggagatgtatgaagagggcctgtctgagaggccccacgcaatcatcgcaaataannnnnnnnnnnnnnnnnnnnnnnnnnnnnnnnnnnnnnnnnnnnnnnnnnnnnnnnnnnnnnnnnnnnnnnnnnnnnnnnnnnnnnnnnnnnnnnnnnnnnnnnnnnnnnnnnnnnnnnnnnnnnnnnnnnnnnnnnnnntggaggctgagctgggcaagggccgccagccgcnnnnnnnnnagccatgccagagcggggtcgcctctgggcctcccnnnnnnnnnnnnnctgggtgtgaacgag

SEQ ID NO: 1513 - DNA, 1842 bp, Macaca Fascicularis
  misc_feature (1)...(1842): n = A,T,C or G
atgttttcctaaggtccttccagacctctggagtcagaccctgccccaacctgagcttgagtggcacgtgctcgtccccattgtcactttgggcatcccctttagggctgcattcctcagtgtggcccccccaactccttggggcatgggcgatgagtgtggtgaggatcaacaggcggcactttaagtattcacgccatcaaacctctgtttgggacaaggctgggcaatgtggtatcaacttaaggttgtcttgaagatatgaaataaattttgagtgcaggtgcagatttcccagaaactgtggagatggtcctcagatgacagaaaattaagaagcagtgttctagataatggcgcttgtcctagggccagagatgtttggggctcaggaagcagctcttagcgactgtcataggctagtttgctgtgatctggccccttgcgggggcaggcagacgcaggccgggaaaagccagtcatcctaaaggttctggaaaggtggttgtcgtttctcaggctttgctcctggtgtgctctgggccatctgggctctccctggaccgttgttgctgttccctagggtgcggctgagtcctggttgtccagagctgactttcccacccttttccagtgtcaggatttgatgagacctggagaggagttcctcctcccgtgatgctgtggaggaagagtggacggattgctttggccgtgacccagtagagcgggctcgtgtgcgcgcaggagtggggaaggcccaccaggctggcctggccagattcccagcctggccgtctcctttgaggtcccagcgatgctcttcccggggcaccgagcactgggctttgagatgggagcttaggttccacaggttttgggagctgcgatatccttaatttggtttgctgacaccttctttcctcaataatgctgactgtagaggggaggccattgcccctcggtatctgcagggattgcctctaggactccatgtggatacaaaatccatggatgtttaagtctcttatgtaagatgatgtagtgtttgcaggtaacctacacacatccttctgtatactttaaaccatttctagactacttagaatatacctagcacctagggatgcggtgggagcttggggaatacgggtaagcaaacctgtacgctccgcatggacgccgttccccctgagtgtgttttgatctgcagtgagttcagtctgcagatgcagtgcccgctgatgcgaagggctggctgagcttccattttgggaggtggatgcttctgggattgctgagacttggggcagcctgtgggtttggaagcacagaggtgctttcttggcaggctgacgtcatgggagcgccagccttttcgagagccctcctgtgtggggtcaccgcctgggcgtcagtctggccgtggccaggcagtagtttggtgcttgctggcgagctccagagaaggtgccctgcctgctgctgaaagaagtctcttcatataagaagcttttggggttaaaaatgtagtcgtcggccgggcgcggtggctcacgcctgtaatccctgcactttgggaggccgaggtgggcggatcacgaggtcagnnnnnnnnnnnnnnnnnnnnnnnnnnnnnnnnnnnnnnnnnnnnnnnnnnnnnnnnnnnnnnnnnnnnnnnnnnnnnnnnnnnnnnnnnnnnnnnnnnnnnnnnnnnnnnnnnnnnnnnnnnnnnnnnnnnnnnnnnnnnnnnnnnnnnnnnnnnnnnnnnnnnnnnnnnnnnnnnnnnnnnnnnnnnnnnnnnnnnnnnnnnnncctcaaaaaaaaaaaaaaaaaaaaaaa

SEQ ID NO: 1514 - DNA, 712 bp, Macaca Fascicularis
  misc_feature (1)...(712): n = A,T,C or G
agacaaaagaaaaaatattaaaaaaaaatgcataagcttannnnnnnnatgagttaattgttttatttttaaactctttttgggtccagtcgattgtacatagccacagaagccctgctatgaaaggagtaaaccctacacacaaggttggagatttgcaattgtttttggannnnnnnnnnnnnnnnnnngccctagtatgnnnnnnnnnnnnnnnnnnnnnnnnnnnnnnnnnnnnnnnnnnnnnnnnnnnnnnnnnnnnnnnggcctggcagggggtgaaggcaggagtcgggggtaggtcaggaccaggacccagggagaggctgtgtccctgctggggtcccaggtccagctttgctgtggctgtctggatccttcctaaggtacagctgtatataaatgtgtcccgagcttagattctgnnnnnnnnnnnnnnntgcgaggggcccctggcccaggaggaggattgtgctgatgtagtgaccaagtgcaatatggatgggcagtcgctgcggggagcaccaaggccagaagtaacttattctgtactagtgtccgcataagaaaaagaatcggcagtattttctgtttttatgttttatttggcttgttttattttggattagtgaactaagttattgttaattatgtacaacatttatatattgtctgtaaannaatgtatgctatcctcttattcctttaaagc

SEQ ID NO: 1515 - DNA, 774 bp, Macaca Fascicularis
  misc_feature (1)...(774): n = A,T,C or G
agtcccagctctatacctggtttcctgtcatgcttatgaccnnnnngagatnnctttgcttaactataannnacaacaagcatagaactaataagtgggttcagcaaggtcacaggatgtgatatcaatacacaaaaagtaattatatctctacatgctaacagtgaacaatatggaaactgaaatttaaaatacaataccatttacaagtgttccaaataaagtgaagtaatacatagctgacaaaacatgtataagatttgtatgatgaaaactacaaaactacaaaataagttgaagaagatgtaaataattgaagannnnnnnnnnnnnnnnnnnntggaaggctcagcatagtaaagttgtcacttctccccaaattgttctgtaaattcaacataactcctataaaaatcccagaaaggttcnnnnnnnnnnnnnnnngcttattctaaaatttagatggaaaggcacaannnnnnnnnnnnntagaaagaataaagtggaaagaatcattttctctgggccgggtacagtgcttcatgcctgtaatctcagcactgtgggaggccaaggcaggcagatcacttaagatcannnnnnnnnnnnnnnnnnnnnnnnnnnnnnnnnnccccatctctactaaaaacacaaaaattagcgggatgtggtggtgcacacctgtaatcccagcaacttgggagnnnnnnnnnnnnnnnnnnnnnnaactccggaggcggaggttgcagnnnnnnnnnnnnnnnncactgcatc

SEQ ID NO: 1516 - DNA, 252 bp, Macaca Fascicularis
actaacgaaagtgaatgagagggagggagaagagaggggggaggagaaggagggggtagatcactctctatatcaattagtgagcgacggcgggcgagcgagagaggaagatatataggcgtgtctttttggtcgcacgctagtgatggatgtgaacgagcacgaccatcagtcacagacgggggatgcattcagtaagaaagtcagtcggattgcttttattgataggtatccagttatttatccgttggt

SEQ ID NO: 1517 - DNA, 691 bp, Macaca Fascicularis
agactgtcagaaaggatgtggggctctgaagcattgcccttcttgcctctgaaacttctttccactagcaattcaaaacaggcccacatacagagggctagcactctaatttgatgttgactcagtcattcagacctagctctcaggctgcagcttttcctagtgcagcaaattgcttcttaaaatctttagcttgatttctgtcatttgagcccagggatctacccacttactgaaatctaaatttttgaaaatcagtgatgcaaataattttcaggatttccctatttaaaagcatccatgaaacagttcctttatgccttctgtttaggatttccagaattaggaagggaaaccaggcttgtgccttggatccaaaagcagcaaaaatactacacttgccaaaagcaaactgaggaatcagcattggccagtcctagtatgcagtcaggaggtggacttttgttaagttagcccttatcatttagtacttactgagtgccaacaatgcacttagaaaaataagggagacgagaatttacagaccaataccgtaaactggaaggtacaggtaagacacatctcctagagctgagaatgtgtccctaacatttcaagaagcagcagaaagtaggagagatcacgatcccagtctttttaggattccaacacaaaatggaagggagccctc

SEQ ID NO: 1518 - DNA, 709 bp, Macaca Fascicularis
  misc_feature (1)...(709): n = A,T,C or G
cgaggcctggtgtncgcaacagctcggcacccgttacactgatgcttggtgaggcacccctgtaaccctggggactaggaggaaggggcagagagagttatgaccccgagagggcgcacagaccaagcgtgagctccacgcaggtcgacagacctccctgtgttccgttcctaattctcgcctcctgctcccagcttggagccccgcgcccacagctttggcctccgtttccatcgctgcccttgtgggaatcctcctcgctgtgggctctgtgtacctgtgcaagtgcctacctatgaaatcccaggcgtaaagggggatgttctatgccggctgagcaagacaaaagaggaatatggaaccatttggggaatcggccagacatgnnnnnnnnnnnnnnnnnnnnnnnnnnnnnnnnnnnnnnnnnnnnnnnnnnnnnnnnnnnnnnnnnnnnnnnnnnnnnnnnnnnnnnnnnnnnnnnnnnnnnnnnnnnnnnnnnnnnnnnnnnnnnnnnnnnnnnnnnnnnnnnnnnnnnnnnnnnnnnnnnnnnnnnnnnnnnnnnnnnnnnnnnnnnnnnnnnnnnnnnnnnnnnnnnnnnnnnnnnnnnnnnnnnnnnnnnnnnnnnnnnnnnnnnnnnnnnnnnnnnnnncctatctccaaaaataaaataaaaataaaaataaatannggcggggggaccctccagaat

SEQ ID NO: 1519 - DNA, 742 bp, Macaca Fascicularis
  misc_feature (1)...(742): n = A,T,C or G
tccagaatggtgtaataactttaattaagattagctttaattataaattaccnnnnnnnnnnnnnnnaggtatattcatcttattgatagaattgtagtgagctttgtttctcttagggagggataatnnnnnnnnnnnnnnnngttgctcacagttccactgtgtnnnnnnnnnannnnnnnnnnnnnnngctagattttggtctgaattggcagaggtagaagccatnnnnnnnnnnnnnnnnnnnnnnntaggaatttcccaagccttgtttttcaaagtcgagaagtagaaagtaataaattcaatcagggcccagacatgttttgtacctcctttaccctttggtctttcttccttttatcctattccactgagcttgttctttggggattgtggtgcctgacatccctgtcttccctcccctaggacgctgacctgagtggagagacctcggcaatacaaggctgtcctgcaactctctgttgcctcagcaatgtcaggacgactgtctctttcctaagtaacataattttaaagaacaatttgttccttagggannnnnnnnttggattgtgaggaatcctattaaaagtacaactattgcgatcatttgcttttacttttaccagcctcgctcataaaccctccatctgtttgttgctttaaatagaagcacattataagagattatcacttgatcaggctgcatgtctgagtgttgtgtgttttcacatactc

SEQ ID NO: 1520 - DNA, 750 bp, Macaca Fascicularis
  misc_feature (1)...(750): n = A,T,C or G
gcaggtatctgtgttcctaggtaagccagttttcnnnttccactcggactaatttcacctagattgtcacggtttccnnnnnnnnnnnnnnnnnnnnnnnnnnnnnnnntttactactatgtatgtaatatatatacatatatacgtacatatgctgtccaaatatatttgtatatatttgtatagcatttttacacctttattgnnnnnnnnnnnnnnnnnnnnnnnnnnnnnnnnnnnnnnnnnnnnnnnnnnnnnnnagctgtgtcctccgaatttcgacccttggagcctgagaaaaccgtgggaagatgatgtgaatttgctgttatttnnnnnnnnnnnnnnnnnnnnnnnnngaaacatgaaaaaagcagtgacttttaaggtgaaaagtttcaagcattccaaataaattctcaatgtttcataactttttattataaacccannnnnnnnnnnnnnnnnnnnnnnnnnnnnnnnnnnnnnnnnnnnnnnaactaccttgaattttttttaagacaacttatgaataatgcnnnnnnnnnnnnnnnnnatagctttaaactatggttgaatttgatacacacaggaaaagttttcttgaagaacaaatccttttcgcttttcttttttcttgagagatctaaagagacactgtagattgttttcctgacagcaaaagactaatgtgacaaaatgaagtcattgtaaagaagcgatgcaacttgtcaaatannnataaagaat

SEQ ID NO: 1521 - DNA, 2188 bp, Macaca Fascicularis
tgtttgaaaacattcattgtgttcatacctagtgccagttagtgagcacagtgtctttttggtttttgggtttcaagatgggaaagtagctacaggcttcaaatacaaaaatataatctctaggaagagaaggacaggaaacttgataaacttatcatccataagtgaaagagactgaggcatgtaaaacttgattggttgcaactttctacccaccctctgataagtctgctgcacacttgaattttaggatatagcacacaaccatgtagtgttcgccaaataaaataccttggaagacataattagcttagtccagaacgagtcattattattcttaaatatccacacttatgttacctctgcagatctgttatgtcatatttagaacttcattccttttttctggagctattttcaaccctagcttaaggaagtctatatttgattcagatacttggaccatctggttttattatcagctttaataaaatcaattccaactcatactatgactgtactatatctatccagattgtatagatataatatctatatacccttaagtatggcctaggtcctaatccctggaaccttgtgaacattgcaaaaaccaacattcataaccccagaaatctttgttaccgaggatcagtcgttattagttgaccaagtgaacgcaagcaatttctgttatttccagcatgattttcttccagaagatttctcaatttacattttccaaatttgcaaacgtacatttgaaattgaagctagccactgtgagacttcaacagtattccctacaatctacaaaacgctataacaggttgtgtaggcacagtttaggaatcagaggaatgtgttgagtttcttattcaaacggaaacatgacttggttgatttctgaggtggcagacgtgccaacgcaaccaagtaccaggatactatccaagacaggtttctggggaggaacaacccctgctgggaactcactgtcatctacagaaattggattgtgttctgaactccatgttctagtttttaagtcacaaatagcttatggtgacagtaaatccctactccaagcactatcttgttttcaacatggttaattcacataattagcattaggttggaaggttttcatattttttcttccatgttttcttattgtatttcttaagaatacatttataaagaatcaagcgacaagtcagaaagttgctgtgattatgtttgtgtatgatttagttccagaattccaggacttatgagaaccatagctagagtattttgctgcattaaatgttattgtatgagatgtgacttttcctctttatcagttaaaatttgtacttatctgagaagcagaagggtatatgttgagcttcctggtgcttatttggttggtgcttgtttggttggtgggttgattgatttaatcaatacagcagttcttcacagtgtaaaggttagccagaataaattcctgtaagaatactttctttgcaacattttcctttgtgctagaaattctgaataatgttgatggtatatacttatatatcactcaaaattttctatagagctttcctatttatttttagtttgtagtaacccagtatgaatctgtagggatttcacattatttatattttagtttatagcgacccactaagaataacttttattaaatacaaattccttggctcctcggtggaaagcctgattcagtatgtctgaaataatggtccaggaatctctattttaacaattatccagattattattttgaaacaggtaagttgcctgaagacttctctgaacaagaatgagggttattattatttctactggttgatgaagaaattgaggcaaaatcaataacttcctaagattgcaagtcaggtaacgtctggttttctatgcattatctgatacatgtattatcttgtattatattatcttggtacatgtatgcacaggtgtacacaggcctgtgagttctaggaagaaaatgaaaatatcttttctcctaaatgttttctgatacagttattacagtgctcgtagttataaattgacttataaacatacttttgccaaaggattattctttctataataaagcaaagaactagatgcctacaaaaagaattgtggttaaaaaaaaaaaaaaaaaaaa

SEQ ID NO: 1522 - DNA, 2086 bp, Macaca Fascicularis
ctaaagggactattgagtatactgtaagttatttgctttcaaaaaagctatttttctttgtaaaagtcttctttaagacattctctgtttatgctataaataagaaaagcattgttaattgccttatttttaaaaatctgtatttcactttggataattgttttagtaatacttaagtttttagttttttttttctttaaagataaattttactgagacacaaaggtagttatcctagaaaatttaatttaatatagatgataatttactgagagagttcccatgggccaataatttttattaggttaggcttttaggaaaatatttatcttttcagaaatgtgatcttcattatattcccagcagtgctagtgataattataatggcagatgggatacataaaagacaagttgatgttaatcttccagtgtaaccttccacattaaatcatttgtatttatttatagctaactgccctggtgtgtgtgagggagagagagggagggagggagagagagcgcgctagcgcgagagagcgagtgagcaagcgagcagaaaagaggtggaaagggggggaataagaaagagagagaaggaaaggagagaaggcaggaagaaggcaagggacgagacaaccatgctgtgctgtatgagaagaaccaaacaggttgaaaaaaatgatgaggaccaaaagattgaacaagatggtatcaaaccagaagataaagctcataaggccgcgaccaaaattcaggctagcttccgtggacacataacgaggaaaaagctcaaaggagagaagaaggatgatgctcaagctgctgaggctgaagccaataagaaggatgaagcccctgttgccgatggggtggagaagaagggagaaggcaccactgctaccgaagcagccccagccactggctccaagcctgatgaacccggcaaagcaggagaaactccttccgaggagaagaagggagagggtgatgctgccacagagcaggcagcccctcaggctcctgcatcctcagaggagaaggccggctcagctgagacagaaagtgccactaaagcttccactgataactcgccgtcctccaaggccgaagatgccccagccaaggaggagcctaaacaagccgatgtgcctgctgctgtcactgctgctgctgccaccacccctgctgcagaggatgctgctgccaaggcaacagcccagcctccaacggagactggggagagcagccaagccgaagagaacatagaagctgtagacgaaaccaaacctaaggaaagtgcccggcaggatgagggtaaagaagaggaacccgaggctgaccaagaacatgcctgaactctaagaaatggctttccacatccccaccctcccctctcctgagcctgtctctccctaccctcttctgagctccactctgaagtcccctcctgtcctgctcacgtctgtgagtctgtcctttcccacccactagccctctttctctctgtgtggcaaacatttaaaaaaaaaaaaaaaaaaaaaaaaaaaaaaaaaaaaaaaagagagagagcgcgtgctagagagagagagcgagcatgtgcgatgagcaatagctgtggaccttacagttgctgctaactgccctggtgtgtgtgagggagagagagggagggagggagagagagcgcgctagcgcgagagagcgagtgagcaagcgagcagaaaagaggtggagagggggggaataagaaagagagagaaggaaaggagagaaggcaggaagaaggcaagggacgagacaaccatgctgtgctgtatgagaagaaccaaacaggttgaaaaaaatgatgaggaccaaaagattgaacaagatggtatctttcagagtgtaaagtaatcttggaatataaagaatttcttcaggttggattacctagaagtttgtcactgactcctgaactatgacacatgaatatgtgggctaagaaatagttcctcttgataaataaacaattaccaaataaaaaaaaaaaaaaaaaaaaaaaaaaaaaaaaaaaaaaaaaaaaaaaaaaaaaaaaaaaaaaaaa

SEQ ID NO: 1523 - DNA, 721 bp, Macaca Fascicularis
  misc_feature (1)...(721): n = A,T,C or G
tggccctgcacagaggagggggcaccgaagactcactgacccactgctgtaccttctgcatctcactnnnnnnnnnnngcctttttctcttccttgcaggtgtctcctgcacgtgcgccggctcctgcaagtgcaaagagtgcaaatgcacctcctgcaagaagagtgagtgcggggccatctccaggaatctgggggctgtggctaagattgggagggaactcaaggttggccctgagtgcttccttctggggaactgggatttctttgcccctgttggccatgtcattccctctccagnnnnnnnnnnnnnnnnnnnnnnngggcagggaagcatttttatcttgggacacaaaccccaactgtaccccctatggtttcagaacatagctgtgccagacaaaaaaagcatcctctgggtctggcgtctgagctcgagccaggcttgctattggggcagggaggtgcctggtccagtctactgccacctctcactctccccttcttccccaggctgctgctcctgctgccccgtgggctgtgccaagtgtgcccagggctgtgtctgcaaaggggcgtcggagaagtgcagctgctgtgcctgatgtggggacagctctgctcccagatgtaaatacagcaacctgnnnnnnnnnnnnnnnnttttttaatacaaccctgnnnnnnnnnnnncatttctttttatattaaatatgtgatt

SEQ ID NO: 1524 - DNA, 765 bp, Macaca Fascicularis
  misc_feature (1)...(765): n = A,T,C or G
cnannngtgtatantnnnnntatagataactgttacacataattccagataatttggctataaaatttgtctgttttccacttggatttattttaaaattcaaagtaaatcactctattcttattttgaaaactcagagccattttcaaaatatcatatagaaacaaaacccataagagcacacagtaacaaagcaaacagatacaaaaatggctttttagttacccaaatattttagtcagttaccatttagatccttttggcaaattaaaatttgtgattagagtataaatggcaaaatgatcttttcctggcctttgaatccactagtactcaatggatatagctgaagcagagactgtctaagtataannnnnnnnnnnntcagtaaaatgtatcattttcatgttatagttatgcctgnnnnnnnnnnnnnnnnnnnattatcagtaaaagaggttaagcctatatatgaatgatggaccaaaatcttgaggttgtacattaactgaaatagtattttataaaatcttatggtgctgtggaaaatattatttcaccttttctgacacttcaccatggagactattttaagtcattgcagttaatactctggtnnnnnnnnnnnnnnnnnnnnnnnnnnnnnnnnnnnnnnnnnnaggtttatnnnnnnnnnnnnnnnnnnnaaagaagctaaggggattccccagagctaatagatttcattagtcatttgtgtcaagagtattctccntaaaataaagc

SEQ ID NO: 1525 - DNA, 767 bp, Macaca Fascicularis
  misc_feature (1)...(767): n = A,T,C or G
aaaccaaatgggggctggaaggcatcctttacaacttangnnnnncatatgcaagcaccctcannnnnnnnnnnnnncatcgagtggggataggtggaaataattcannnnnnnnnnnnnnnnnnnnnnnnnnnnnnnnnnnnntattttcttccccagtaaatgtagcttctgtctaccttccactggcannnnnnnnnnnnnnnnnnnnctgcatatactgaggggatctgcacagtgcagaaaggaagatgtcagatccaagtgaggcnnnnnnnntgtgaaatgtctagggtagaagaaagaccatcctccattatggctggcatgtggcagtcatccttaagattattttaaaatttcctaatacaggaaagtaaaaaacttagaaaatgaaagagaaggccaagcatggtggctcatgtctgtaatcccagcactttgggaggccaaggcgggcagatcatctgaggtcgggagtgtannnnnnnnnnnnnnnnnnnnnnnnnnnnnnnnnnnnnnnnnnnnnnnnnnnnnnnnnnnnnnnnnnnnnnnnnnnnnnnnnnnnnnnnnnnnnnnnnnnnnnnnnnnnnnnnnnnnnnnnnnnnnnnnnnnnnnnnnnnnnnnnnnnnnnnnnnnnnnnnnnnnnnnnnnnnnnnnnnnannnnnnnnatcaaaagtccatctcaaaaaaaaaacaaacacgaaaatgaaaagagcaaatgagtcacccaggatcccataacagaagctttctgtggggtcat

SEQ ID NO: 1526 - DNA, 3339 bp, Macaca Fascicularis
gattcagtccgttgctttccgccgctgccgtgtccgtctcagcccgccaggcgctccagaccgtcgcctcccccggacccaggtccccggcccctggtccccagccctcatcgcagccccggcggcccgccgccgccatgtccaaggaggagcgcgccgggcgggaagagattctggagtgccaggtgatgtgggagcctgacagtaagaagaacacgcagatggaccgcttccgggcggctgtgggcgccgcgtgcggcctggcgctggagaattacgatgacttgtaccgttggtccgttgagtcgtattcagacttttgggcagagttctggaagttcagtggaattgtcttctcacgcgcgtacgatgaggttgtggacacatcgaaagggattgcagatgtccccgagtggttcaaaggcagtcggcttaactatgcggaaaacctcctgcggcacaaagagaatgacagagttgccctttacgttgcaagggaaggcaaagaggaaattgtgaaggtgacttttgaagagctgaggcaagaagtggctttgtttgcagcagcaatgaggaaaatgggtgtgaagaaaggagatcgggtcgttggttatttacccaacagtgagcacgctgttgaggcgatgctggctgccgcaagcattggcgccatctggagctccacgtccccagacttcggtgtgaatggtgtgctggaccggttttctcaaattcagccgaagctcatcttctctgtggaggccgttgtctataacggcaaagagcacagccacatggaaaagctgcagcaggtggttaaaggcctaccagacttgaagaaagtggtagtgattccttacgtgtcctccagagagaagatagacctttcaaagattcccaacagtgtgtttctggacgactttcttgccaccggcaccagcgagcaggccccgcagctggagttcgagcagctgcccttcagccacccactgttcatcatgttttcatcgggcaccacgggtgcacccaaatgcatggtgcattccgctgggggcaccctcatccagcatctgaaggagcatctgctgcacggcaacatgaccagcagtgacatcctcctgtgctacaccacggccggctggatgatgtggaactggatggtgtccattctggccacaggagcggccatggtcttgtatgatggctccccgctggtgcccacgcccaacgtgctctgggacctggttgacaggataggtatcactgtcctggtaactggggccaagtggctgtcggtgctggaagagaaggccatgaagccggtggaaacccacggtcttcagatgctccacacgatcctgtccactggctccccactgaaagcccagagctacgagtatgtctacaggtgcatcaagagcagcatcctcctgggctccatctcaggaggcaccgacatcatctcctgcttcatgggccacaatttttctcttcctgtgtataaaggggagattcaggcccggaacctgggcatggccgtggaggcgtggaacgaggaaggaaaggcggtctggggagagagcggcgagctggtgtgtactaagccgatcccttgccagcccacacacttctggaatgatgagaacggcagcaagtacaggaaggcgtatttctccaaattcccaggcatctgggctcatggcgactactgcagaatcaaccccaagactgggggcatcatcatgcttggccggagtgacggtacactcaaccccaacggggtgcggtttggcagctcggaaatctataacatcgtggaatccttcgaggaggtggaggacagcctgtgtgtcccccagtataacaagttcagggaggagagggtgatcctcttcctgaagatggcctccgggcacgccttccagcctgacttggttaagaggatccgtgacgccatccgcgtgggcttgtctgcgcgacacgtgcccagcctcatcctggaaaccaagggcatcccgtatacgctcaatggcaagaaagtggaagttgccgtcaaacagatcatcgctggaaaagctgtggagcaaggaggtgctttctcgaaccctgagaccctggatctgtaccgggacatccctgagctgcagggcttctgagtcggactggctggcgtgtcactcagctgtacctgtgtgtactgttacttttgtgtgctcaagaaattacatagaaacctacagctgttgtaaaaggatgtttgcaccaagtgttctgtaggcttggggagggatcgtttctctgttttgtcgttaaatctggtgggtacggggatcttccgcacgctggagtgggattctggccttcagagacagggagtgtctgggccgcacgtgtggcaccgtggtgagagtgtgtgtctttgcacacacagtgcagtgggaacagtgtggctggttggtgctgaggacacacactcctgagccaaggtcttgtcttcagcctccccctcccgtcgtcccattttgctctgtgaaggtgcaaatccctttcttcccttcccgtctcaggctctcctgttttccctcagggtccagcatgcctttgggctttagctgttacaaaggaacccccgtgacttgacacaacttttcgcagctgctgttaggaccggtggtctgggtgctcgtgcgtctgtgtcacggatggaatgtaggccctggaggaccgtgcgtcactcttcaaccagagcgcgcttccgggccagcttccctccgaggagcgagtggatttcatacaggatctcttcattgcacagactttgaatggctttacatgtttctaatgtgacttaggcgtgtgaagcagcgggtgtccacctgtgtccctcatgggtgagccctccagccgtgagcccaggcagcgcggtcaccgagggtcctcctcaccaggaaccgcatccctgcgctgcctccgcctgagagtcgctagggggtccctgtcgagatcatgtcatcagcaccccacccctaagtcaagtcacgggtttccatagccaggcagttggtaggtaccattcagttcagcatatgaacttgtatctgtaatctgatgttcatttttatattttttgaaactgagcacaatgaaatcctttcttgaatcgttttccttttggattataaaaatatggggtaaagtgctatgatgaattttatgcaataaatatatacaggtgtgcgcgtgcacccacaatgaaaaaaaaaaaaaaaaaaaaaaaaaaaaaaaaaaaaaaaaaaaaaaaaaaaaaaaaaaaaaaaaaaaaaaaaaaaaaaaaaaaaa

SEQ ID NO: 1527 - DNA, 718 bp, Macaca Fascicularis
  misc_feature (1)...(718): n = A,T,C or G
agtgtttgtatggtagtatgctgnnnaagagcaaagcatnnnctgcacaaaagaaaattactgtagtggcttcgattttaattagaattttctccctggtgtttctttatagactaaaacaaaatcttttaagtttcttactacaggtaaaagctatgtgcaagaacctcaaaatgctaaaatctagcataatgccttagatctgtttttaagtcttgtatattcctacatagctgtccgatgtattatatttgtatagtgaattgtgtacaatttttgaataagtgcatcatcacttaacctttatgttgttgaatagtgatgatgatacatttcttcaaacatttaactgtcattttttttcctttgtcatttgtgagttttatttgtacagttcctcatgaagttgcatctgagatgtgtgtatatgaaaagattatacaagggtaaaattaagcaatatattaactatggttcttcaggagaaagcttacagtgtttcaggttgtgatttattttcaaaatggagttgactctgaacatcactttgttcacctgcattgatgtttgtatttctagtgnnnnnnnnnnnnnnnnaggtagatatattcagagaaattttaaatacatttatgcaagttaatattgctttgctgatgctatttgcttatttgatgttaaataatgctattgtaaataaagaattctgttgttattg

SEQ ID NO: 1528 - DNA, 1583 bp, Macaca Fascicularis
gattcaaaaatgaataccaggttgaaagatgttataacagtcccttgtttcaatgaaatctacctttgtgagcagaggtgaccaaaaagaccacactgcatgaccagcagcccacaaaccagactgggctaagttctgctgctatttctagaacttctgctgttcaaagcactccttgggtccagccagattgccatactttcttgatacatttcccacggttgcttcatttgttgttcatttctcttagggcttatagtaggttattgtttgaggtggcatatctgtacatcttaataaaatatttttggttccacattttccgctcaagttccctgtagccatgatgaacacctggcatcctttggacagctttccataactacataataatgagccagtttttaccatccatattagatatggctagagtgactattttctgaagcaaaattatgctgagcatttgccaaatatcagatgaacttaaagccctagaagtatctaagaaagtccaaggggagtgtcattgttctagacttagttcaaaagatgctggacaatggcgtacatgttcagcctttgtagacatatagagtgaacattacctttgctgttacaggttttattctctgctgagggccacagagcctcaccgttagtttgccccacacacaacagggtaaattcctactcctttgtcaattaggaattttccaggcaatgtgtttacatcttgggtaaatacattactttcatcagtgtaacttaactataaagtatttttagaggatcagattatttgagtatggctgtgataagtctctccttaaatggaccttaacaaagtaggaagaaaacgttagcagacatttcagactaatgatgttttctttttctcaagtgggttattcagagttgaatagcaattacttaaagctagtaacataggaacattttctgtaatactgtaataatgtttatttatgttttttcattctataacattcagcatgtgacaaaggaattagaaaaaagattagtcaaatttggagccatggaattaatgaaatccgtatgtttgaagaatcattttatataactccatgcttttgatatttcctagaacatcttagattgaggtcattgtgcattattaacagagtcctggttaataatgtacaatgaccttaattcaacatgctttcaatgaatgactgaccttcatgcttataacgtcttgactatgcttacaaatatttttctaaattgctggtctgtttgcagatgcattatcagtggcatgcaaaaataagattatgccttgtttaggattctctttcttgtaatgtcccatcattgctgcattaagataggaatgggaatgtgtaggcaaagtcacatatagtgacatgcattggataaaaattgtaaacttcagccacctgactctttcactcaaaaacataatgtggctctcctttatatctttttttaatgatttacatagctttccgttgtatgtatgtgctataatttattttaataaacctccactaattgacaaaaaaaaaaaaaaaaaa

SEQ ID NO: 1529 - DNA, 3049 bp, Macaca Fascicularis
gaggtcgggtctgggaaactaggccctggggttttccctgagcagcaggtacgcagaagggcggggagacagagggtcagcacctcctaagggcccgaacggcaggagagagagaggacttgtccccagaggcggagtccgtagtgggggcgccccagttgacccttcggaacagaacgtgacttcagccttaaggatctaaaaccggctgcagccaggtcaggtggccctcaacgctcaggttacaaaacttttaccgtctgcgccacggggactcctgggatgagggtttgacagccaggcacctgctccaggccctagcagcctctgtgctcttttgaatcaagcacggttccagcaggagggaagccctgagagctctttgtgccagtcactacctctgggccacagcttgctcacctgtaaaatggtgaggatggactgggacggaacccttcagtttacaggtgaagaaacgggggccagcaagggagaagtcgcttgtcctgttacaggcctaaaacctgactttcaatccgatgctctttccacttactgtagagtatactgtgcgtggcagaggctggtgctggaggagaggagagctaggtggcaggaacacctgtagcacctccgtttctctaccctcagggcctaacacagtgtcttgtgcaaatagtaatcactcaccaaatggtttttgaagggaagctttggcagatccagcatcactgtccccagaaaagtttaaggaaatgtgggtagggcaaatgtagaaatagtttgctttagcagacgagagtgaacctcagacaaactcttcgcatgtatctggtttaaatctcccgtaggcatcagtccaggccctgaatggctggtctccagcggttggcatcacatctgcctgtgggcgttatgcttccacataatacaacagaagctccagggccccactcagccaagcaagactcttacgaacaaagtgactcttcccagcagtccttgaaggggcacctgaggaacaatttccagaagcagcttttgagcaacaaagagttgactctggataaagtccacactcaccccaaatggaacacaaaagcccggagctactcctatccccactgtactggaatcagccaccaagatgcaggaagtgatttccagggccaaggaaatggtttgttttactcatcaggccctcaatcctggtatcccaaagccaataaccaggactttatcccctttacaaagaaacgagttggagtggaccgggcgtacccactgaaacccgtggtccacaggaagtcgtgcagtacaggtgagtctggcactgatggggaccagaatgtctacccaaggccccctgaactgagagagttttcatccaggaactttgatgtgaggaaccaggtcaacttttctgtggttgatcctgttcttgctgccatgcaggcggagaaggccttggcaaacttggacaggatggagtgggtgcagatccgaagactagaagctgcaggggagagcttagaggaggaaatccgaagaaagcagattctcctgagaggaaagctgaagaagacagaggaggaactcagaaggatccagacgcaaaaggagcaggccaaggaaaatgaaaacagagagctacagaaaattatattccccaggagcagagttaaaggtaataacagcaacaccacgcacaaagctgtcttctccccagaatttgattttgaggaagaatttagtagagacaagagagaggatgaaacttgggaacggtctcaacaaaattcgagtccattccagctctctgattatagaatccagagactcaaaagggaaaggctggtagcaagcaataacaaaattcgagaccgagtctcagagccgtcgatggagaagttctccccgccttcagaaacaccaggcggtgctttgcagggatctgccagaaattccagcctgtccatggcaccagactcctcaggttccagcggctccactgaagagccacagctgggtgagtgcagccactgtgggcgaaaattcctcttgttcaggctggagagacactccaacatctgcagcaggatgcagggttccaagaggaaagtgtttgactcctccagggcccgggctaagggcacagaactagagcaatacttgaactggaaggggccagcttcagccaaggctgaacctcctcggaagaacaactggagacagaagcacgaatcttttatccatacgctccgccaggctcgagaggtccagcaggtaactgccaaaggtgaaaaccgttcacacttgcctcccatcctgcctgcagaaaacccagactacattcagtgtcctcactgtagccaccactttgctcccaaggtggctgagcaacacattcccaagtgtaagaccatcaagaaccgtcctccacctccaaggaagcattatagttgagcagacaacaatggaaacttttggataggtcagaaagctctgcttctcttcagcagtaaatgggagtagaatttgatgcaaagcagagagaaatcaaacagctcccagatctgcctgcagagttaaagtctgtgaggagagagccactgctaagcagcaggaggcagaaggaagccccagcttcccactaaattacaaccttgggctggtaagctttatgttattgccctcagaattgacgggtgaagacactgaagagtcgtgagcaggctccattaaagctctcttcttgcatgcctgacttgtggtttgtgctagtggagtgcctgcatctggttgtgccttcctgtcactgcatgtatgttcagagttctgttaactcttgcttttgtagaagctggagttattaggatgtgttggagtcagaggggcatgatcacccagatggtaactcttatgaaagataatataattttgctgtaaggcattattaatggaaatctatccttggtctccctggtgcatgatcctggccaaaaaccaatacaagtatgtaaggttaaggcaaaaaaaaaaaaaaaaa

SEQ ID NO: 1530 - DNA, 3209 bp, Macaca Fascicularis
cagctttactaacacactttcctaagatagtgatgctctttcctctgtagctcagtgacttgacacaccaccatggtttttctccctttgtaaggaaaacacaaggctgtagttttcaaataatactcttaaaataaggaaaaacacagaaaggaacattatattccatccgactcacaagagggaacttgctctagaccttacagttacagttataatccagaaccaccacccaggagcacttgcctagacatcttgattccttgaagtttagattgaagagaatgagaacgcttcctgcctccccacccagagatgctgagctttcgcctccatgttcctcaacctattttcctgtcaaacaggcatcttcctcaagggactcatctcgcacaactctcctattacagtgatcttcccctgctaaaaccatactacatagtaaccccaacattcatacaggaggtccacaggccataccatggcaaaatcatttttgtacctttaatattttgatattaacctatatttagtatgttaaaaagaaaccttaccttagtgcatgtgagaagatatgtatgtccagggcggaagggtgtgagatgacacagcagtaagcaagtgtggtcggtctgtgtgttgagcagccacacattccattgcctccaggatcttatctgggtcctttcctgtcagtctgacctatcaaatagaaaattacatgtgatttacctttaataatttttcatataacaacaaatccaaaaaaacgctgtgatagtttttgtaatacggttttgtagccacgtgcagtgggaatttgtattacatcttataagactgttctggactattatgttcagaatacactcacattcaaaagcctgggggagaatttaggggtttttactgtaaaatgctttcaactttgctgtaggttattacatttttacattaaaatattacaaaaaaaaagtatttggggaagcttaaaaactgtcactaagcaagttgcaaatgcaccctacaaggcatgtcagccctttcttaagggtgggtactgtggagtcgcttgcacggggtctcttagcatactgtatttggacagagtgacagaggaagctacttgtgatttttctgcttctgtcagacatttcttattctgtttcttctgtagcaatgtgtacttctaaagcagataagcttcaggcaactcagaaatgctctgaattgctttataaatttttctaggggttaccgggtttccgttgaggtgggggacatttatactttgtaaaagtgtaactatgtttattcatacaagctttgtttggctagatcattctaatcatgcatacttacctttcattttagcttagtgttggaagttagggagtgaagtcatagggaaagcacatagggctcgattcctacgggcaaggcttccattgcccactgtgcagatccactgagaccctcagccttatctgtcggcactgggtacaatcagaccttactagctgaagaaaaacgttaaaattcattcgatagatcactcctggcctctcctactctctgatttgtcctgggtgctttttcagcagctctctgcttctaccagtccctgctgtctcaactctgtttctcttttccaaacttcgtagcctctctatcctctgttggatgctgaactgtccaggcctgtgccctcttttcagtaattttctttttagattgtcacttagtgccatgaagtgttctctttctcttaacttttaaccctttttctggtagcaaccttacctttaaagtttatcattcttttatttcaactatggaccaacatgaatttgtttcggagccaagaaatccaatctacttgatttgtatatcatgagagttggattacctgcctttcagaaacccgaggcttctgagttgtcctaatttagaaaagatgtgccccccgacaaaaaaacaattataatgcctttgtttcaaatattgttcttttaaccatatcacattcatattaggcaaaaatatttcttgttgttgacttgaacatcaaatatcaagaggccatgatgactttatgcatgcttttccttctgaactcttattcagaaggaagctgagtgctttcaggtgggaaagtatagtagcaatgaagaaggataatggaatagtgtttctctttggccaatatgtcaaaatcctgcagaaccataacaggatcttccagctaatgaatcgagccccctgtgcacaactgaacaccacattgtgttattttgttccagaatattttacagtttcttttcttttgttttgtctttttatttcaacaaaatgaaaatagagctcggaagtaagttgtgtgagccgctcctttcaacatttgcagaattttctactggctgcatgcacccagcggatcctttatttgtgaattttggtagtctgattgctgctatggaaatgttatccaaaatcatgatattttcctgtgataagtgaagttcacaaggaagaaatcaacatatgtttcttattcttcttttttgggggggaaagaagtgtaatacacatctgcatgttaccttttattctggcagctgcagcttaagcaggttttttctatcagctctcctacattacaggcagtgtaagaaacaaacaacaagacaagatgatttctggaagctaaaggaattccaatcgaatagggctactctatgtcagctttccagattcgtagaaaataaaatgggcaaaattctactgtcagacatagtatagtaatccaagagaagtaaattcggccccgttgtttccaagatgaagtacccacttaagctaagaaactgccactggctgttctaatctgacttgtagaattcaggactttctctgtactcattacttgctggaggcatctggtccagagcccaaacttccgtcatttctgtgccaccaatactacaacttaaatttgaaaatgaaactttatacaaattcctttatagaaattttaatccatttttatacaaatggattaaaaatattacgaagaaaggtaaaggtaattgtcaattgatagttggaatactggtattgaattctagccataggctgttgcctgcagaaagctctgagctgagattctgctctttttaaaaaaaaaaaaaaaaaaaaaaaaaaaaaaa

SEQ ID NO: 1531 - DNA, 742 bp, Macaca Fascicularis
  misc_feature (1)...(742): n = A,T,C or G
gaacaaggtcacnnnnctctgacctccaacctccagtgctgccttggggcgtaggtacccaaggtacctgagagcccctcgggggaggaggccaagtggctgtggctgaggcccccaccctcccccggagaacgcgccccatgagggagtgggtgcagcaggaacccacccaacgtctagactgtagcatcttcctcnnnnnnnnnnnnnnnnnnnnnngcaccagcaccagcaccagcaccagccccggccccagccccagctccctccggcggcagaaccagcatcgggtgttcactgtcgagtctcgagtgatttgaaaatgtgccttacgctgccacgctgggggcagctggcctccgcctccgcccacgcaccagcagccgcctccatgcccctgggttgggcccctggggatctgagggcctgtggcccccagggcaagctcccagatcctgcgtccgtctgtccacctcgggatgggaggaggagaaaaagcggtacaatgccttgctgacctcaccggcttcccaagggtgccggcactctgggtggactcggctgctgggccccacgtcaaaggtcgagtcgtaggtcaagtcctgcgtcggggcccagacatcctggggtcctggtctgtcagacaggctgccctaaagccccacccagtccagtgggactgggagcagttccaccaagaccaccctacccctttttgtaaatcttgttcatgaaatcaaaa

SEQ ID NO: 1532 - DNA, 563 bp, Macaca Fascicularis
  misc_feature (1)...(563): n = A,T,C or G
ttctgtgttttcccttcccctccctcctctccttctccgcccctcctttcccctttctccttcccctcccctcccttttttccttcccttcccttttccctgtcctttcctctctgtttcatccttccagatcaaaggatgaagataacccacagccatgtaatgtgtgggtatagaaattcatgttggcaagaacacttttctgcagggcatctaaaatgaggttgaatataaaccattggtttgtcagaccaactttatattctgatatttttatttattaaatatttcttcatcagccaggcgcatgnnnnnnnnnnnnnnnnnnnnnnnnnnnnnnnnnnnnnnnnnnnnnnnnnnnnnnnnnnnnnnnnnnnntgagaccagcctgggcaacatggtgataccccatctctaccaaaaatacaaataatcagccgggcatggtagtatgcacctgtggtcccaactaaatgggaggccgaggtgagagattacttgagcctgggaggaaaggggcagtgaaccaagattatgccactgtactctaacctgggcgacag

SEQ ID NO: 1533 - DNA, 653 bp, Macaca Fascicularis
  misc_feature (1)...(653): n = A,T,C or G
ggaacagaggggatgtggtgagagccannnnnnnnnnnnnnnnnnnnnnnnnnnnnnnnnnnnnnnnnnnnnnatcttctcctnntagctaatcaatcaatcttcttcccttgcctgtgggcagtggagagtgctgctgggtgtacgctgcacctgcccactgagttagtaaagaggataatcggtgagcactgttctgctcagagctcctgatctaccccaccccctaggatccaggactgggtcaaagctgcatgaaaccaggccctggcagcagcaacctnnnnnnnnnnnnnnnnnnnnnnnnnnnnnnnnnnnnnnnnnnnnnnnnnnnnnnnnnnnnnnnnnnnnnnnnnnnnnnnnnagatcttctgagcttgtttccctgctgggtgggacagaggacacaaggagaagggagggtctagaagaggcaacccttctttgtcctctgaggtaaatgagcttgacctagagcaaatggagagacnnnnnnnnnnnnnnnnttaatttccataaaatgttagaagtatatatatacatatatatatttctttaaatttttgagtctttgatatgtctaaacaaaaaatccattccctctgccctgaagcctgagtgannnncatgaaaaaaactgtgtttcattaaag

SEQ ID NO: 1534 - DNA, 687 bp, Macaca Fascicularis
  misc_feature (1)...(687): n = A,T,C or G
agaacacctctttcctgagtnnnccccatgcacctgcccaaagcggaggattggggtggcactctcggagaatgccaggctcctgaaatggagccgtcaccccttaggctgtacttggcgttgtctccaaggagcctggggaggtaaccagttggggactgattcacttgggagggagggagnnnnnnnnnnnnnnnnnnnnnnnnnnnnnnggccaagtcaacctggggaagggcaggtctgtgtctcaactggtttaggggtgggagagtgggatcagaacttttacaccttgcattcttaggacgtcacaatggttttcccaaggcctccttatctgagggtgtttacctattcaaccagcatacgcaggatcaggactcccactttgtccgggttctgtcctcacaggcacaggaagactaatgcgaacaacagggtctgacaaaccaaagctcacagataagagacttgggttattgnnnnnnnnnnnnnnnnnnnnnnnnnnnnnnnagggtggctgtaggctgagcaatctccctcgggatgtgaggggggggcatttgtgcgttnnnnnnnnnnnngaaattccctaatcttagagagaaaaggaatggaaccaagggcttgaatcggagtatacgtagttgacctaattataaggttgtccatccgtctgtttaataa

SEQ ID NO: 1535 - DNA, 782 bp, Macaca Fascicularis
  misc_feature (1)...(782): n = A,T,C or G
gtcaggagttgagaccagcnnggccaacatgacaaaaccccggnnnnnnnnnnnaaannnnnnnnnnnnnnnnnnnnnnnnnnnnnnnnnnnnnnnnnnnnnnnnnnnnnnnnnnnggcaggagaatcgctganaaannnnnnnnnnnnnnnnnnnnnnnnnnnnnnnnnnnnnnnnnnnnnnnnnnnnnnnnnnnnnnnnnnnnnnnnnnnnnnncagaaagaaattgtatatcaggctgggcacagtggctcatacttttctttttcaccatagccctctatgggcttccaaatatcactttgcatattccacaagaacagtcttagcgaacagcttcttgaggggaaagctgtacctctgtgagatgaattaacagaacacaaatcagtttctcagaaagcttctttccagtttttatctgaggatattttctttttcaccatagccctccaagggcttccaaatatcactttgcaaattccacaagaacagtcttagcgaaaggcttcttgagtgcaannnnnnnnnnnnnnnnnnnnnnnnnacagatcacaaggtgctgtaatcccagcactttgggaggcccaggccagggatcacttgagctcaggagttgaagannnnnnnnnnnnnnngagtgagacccctcctcttcaaaaaataaattagccaggcatggtggcatgtgcctgtaatctcagctacttgggaggctgagggaggatcgcctgagcccaagagtttgaggctgcagtgagctacagtcacaaccttgcact

SEQ ID NO: 1536 - DNA, 762 bp, Macaca Fascicularis
atggcgaaccttggctgctggatgctggttctctttgtggccacatggagtgacctgggcctctgcaagaagcgcccaaagcctggaggatggaacactggaggcagccgatacccggggcagggcagccctggaggcaaccgctacccaccccagggtggtggtggctgggggcagcctcatggtggtggctgggggcaaccccatggtggcggctggggacagcctcatggtggcggctggggacagcctcatggtggtggctggggtcaaggaggtggcacccacaatcagtggcacaagcccagtaagccaaaaaccagcatgaagcacatggctggtgctgcagcagctggggcagtggtggggggccttggcggctacatgctgggaagtgccatgagcaggcccctcatacattttggcaatgactatgaggaccgttactatcgtgaaaacatgtaccgttaccccaaccaagtgtactacaggcctgtggatcagtacagcaaccagaacaactttgtgcacgactgcgtcaatatcacgattaagcagcacacagtcaccaccaccaccaaaggggagaacttcaccgagaccgacgttaagatgatggagcgcgtggttgagcagatgtgtatcacccagtacgagaaggaatcacaggcctattatcagagaggatcgagcatggtcctcttctcctccccgcctgtgatcctcctgatttctttcctcatcttcctgatagtgggatga

SEQ ID NO: 1537 - DNA, 734 bp, Macaca Fascicularis
  misc_feature (1)...(734): n = A,T,C or G
caccacaggacttggacttgnnnnnnnnnnnnnnnnnnnnnnggnnnnnnnnnnnnnnnnnnnnnnnnnnnnnnnnnnngacaacggaatccccttccccagcggcagggccaacctgtnnnnnnnnnnnnnnnnnnnnnnnttactggtgtcctccccggagcacccaaagcgctggggccaagtcagcgaggcctacgtgagcctcctagacctcacgcccaccatcttggattggttctccatcccgtaccccagttacaccatctnnnnnnnnnnnnnnatccacctcactggccggtccctcctgccnnnnnnnnnnnnnnnnnncctctgggccaccgtctttgggagccagagccaccacgaggtcaccatgtcctaccccatgcgctccgtgcagcaccagaacttccgcctcgtgcacaacctcaacttcaagatgcccnnnnnnnnnnnnnnnnnnnnnnnnnnnnnnnncaccttccaggacctnnnnnnnngcaccacagnnnnnnnnnccacaggatggtacaaggacctccatcnnnnnnnnnnnnnngcgcgctgggagctctacgaccagagccgggacnnnnnnnnnnnnnnnnnnnnnnnnnnnnnnnnnnnnnnnnnnnnnnnnnnnnnnnnncttcgggcccagctgaccaagtggcaatgggagacccacgacccctgggtgtgtgcccccgacggcgtcctggaggagaagc

SEQ ID NO: 1538 - DNA, 1988 bp, Macaca Fascicularis
tggcgagatgagcttggtttctgtttagttgtgctgctggctttgtcttctccctaggtctagactcttaggctcatctctaaagaatattgtattttaaaaataaagtcttagtaaaacaggtttccctacaacagggcagtaagttgtattggctaatagctgtttcgtcttccccttcctgtcacagaagtgctgcatgtggggtttggcggcggtgcagggcggggaggattgtggggtttttttgtttttgtttttttttttaataatctcactgaccatctgcatatttccaactttcagtaaaggagagcttatacatgcagaaaaacccagaaccttagcaaacagacttatgagggaactctttggtgacattttaaaagaatatttcccttgacaaaaaagaagtctgtcaccaagttcttttaaacttcaggaactgggtttaacaagcagaggttcagcttgcatatactttcaggagcagaggaaagccacggtcctgtgttgagaaggaaagtcgtataccttgctgaacctcaagctggttggcaatgatgtcctcaggggggtcttgaatttatcttccccatcccttccaggtggtccacgtttgcaagctagggacttgcccacagaatctggatttgctgaaactggggtcttcccttgaagccaaaactagattgaggacagatgcaagaaaggatggcctactttgcacagcagggagtctgctcgggaacttgctctcctcagagaacgcgcagacgggaaagctgcctgccttacagggacttcagatgggagttcttaacctgggtgctggaatccatcaccccctgaaactgcttgcaaatattataaatgatgcggacattttctggagaaggagttcaaagctttctgcagattccccaatgggtccttgatccaaaataaattaagaacctttgctttacattcctcccgagatggcaagtcttggtgggggctctgagaggctgggggtgaccccggcctttttgtgctctgtgtggcttcctcagcgtgtctcaaggcggggcgtttctaatgttctggtgtccgtcttttctcctaggaggatgaagaaggttataatgatggagaggtagatgacgaggaagatgaagaagagcttggtgaagaagaaaggggtcagaagcgaaaacgagaacctgaagatgagggagaagatgatgactaagtggaataacctattttgaaaaattcctattgtgatttgactgtttttacccacatcccctccccctcctccaatcctgccccccgaaacttatttttttctgattgtaacgttgctgtgggaacgagaggggaaaagtgtactgggggttgcggggggagggagggcgggtgggggtggaataaaatactatttttactgccactctttattttttccccctactttttctttgtgtccggtttttgtccctgtaaatgcgatagctaagtacacactaagtgagcatttgttcctgactctcaaagaggatggtttggagttctcttacgtttcctggtatttcccaagtctcttgggttgggtggaaggctgtggctggtctcagtttggtttctcaatgcccaggaggggctgagcaccagccatgtttttttgctttggttcatgtgatacctgcttttctcgggcctgctagaggcatccaacgccctggtttgtaaatagcaacctaaaggcgtattttggcactggtctggggacattccccatctctcatcccttttcccccttcacagatggtggtgggctttgctctacaaagaggactctgatgttactcttgagagcttatgagccagagggctgaaaacggcaggcttgtaagttacaaggaaaatggatttggtaattaaaattaaaagagaagaaacacaccctcaaacttcaacttctttaaaaaaaaaaaaaaaaa

SEQ ID NO: 1539 - DNA, 448 bp, Macaca Fascicularis
gaatgtatccccaaaagcgtgagcttaaaatacaagattgccatattaaattttttgttgacattagtgtcagtgaagactatgaaaatgctggttatagatgtcttttcccatttatctcaatatggagtggtcaggaaaggagactttgcattacaagtatttttaattaattgggccagcttttaaaatgaagatgccacattcaaaatagggtgtattttcgtatattatggtttgcccctttataaatcgaagtagctagaaggaaagaagacactcaaactttgcatatcagtatgaattattcaattgatttgaatgatttttctttacaaaacaatctcattagtcattatttgctcagcagtttagggaacaatttggcaacttggtggttttttgagattattgttctcttacagtgccagtattttaaaatgagcgt

SEQ ID NO: 1540 - DNA, 658 bp, Macaca Fascicularis
aggattattgggaggaaaaatatacaacactgtaaatgaaaaccattttgaaaaccttataccactctccggatgctggggatcagctgcacatagttgctgataggtggcaattcagcctcttcaccctaatgcacacttcctcactttccaccgagactctttgtttgctgacagcatctggctatcctgggtacttgccgcagctggcacagttctctccaatccctagaagaaacagccttcacctacacaccagggatgaaataagatttcagctcaaagctagcaacctttctctgaaatggtgtcacacccagacagaaaaataaatgtgcatttcttcttagatgatgagaagtcagtctttcaggcagacttttgacccagggaggatcaaggtttgactgcctttgagtaatccttgcagaaaaaacagcacctaattggacaaaggaagaaaggaaccagctgctactgtcatgattatttaaacacccatccacagtcaaaaacactgcattgtttcattacaagtgaaatttgattgccactacatttcctgctggcctcccctctatgcaaattggggagaagaaagacattcataaggcatcagaacccatttggcttctaaatgtactgtttgcatatagac

SEQ ID NO: 1541 - DNA, 675 bp, Macaca Fascicularis
gaggagagagtggccagggtacgacctggagtagggaagggaaaaagttcccggaaagaagagaattggatgagaggtctcagtggaaataaaggttttctggcattggtcaaggaaactcacgttgtgttcctcttacctgtgttgtcccttagccgaattagttgatttgggctatgaagaaccacacacatctgaaaagttctgttacagtcactgtctcgtgtccctaaacattctctggacctaaatctagcctgtgtattgtgtcaagcacgtggagacgtgagacatgaaacgaggtcctgtccccgtggaactcacacgctaaatgtaagcaaatcatggcaagcctggagatgctccaagaggtgctggaggagttggagcaattccttccacttagggaatccggtaaggcctcacaaagatggcaatgtttgacctacgacctcggaagacgagtcctcagatgggaagggctcaataagcagagatgtcacaggcagcagcctggcaggagcaaagccacagaggacacgtggccccagtgggtctgagaaacccagaggacactggggtgagggagtgatgggtgtagaagctggaagatcagagttacattgtgaatttcaggggccctaggcactttcgccttcacggggctcttgctcc

SEQ ID NO: 1542 - DNA, 746 bp, Macaca Fascicularis
  misc_feature (1)...(746): n = A,T,C or G
cagagcaagattgaacttcttnntctccactttttaataagtgtatagaagcaatcagaggactcttagatcaaannnnnnnnnnnnnnnnnnnnnnnnnnnnngttgtcctnngcggagggtnnnnnnnnnnnnnnnnnnnnnnnnnnnngattaaagatcttttcccagctgttgagcttctcaattctatccctcctgatgaagtgatccctattggtgcagctatagaagcaggaattcttattgggaaagaaaacctgttggtggaagactctcttatgatagagtgttcagccagagatattttagttaagggtgtgnnnnnnnnnnnnnnnnnnnnnnnnnnnnnnctgtttccatcagnnnnnnnnnnnnnnnnnnnnnnncaacacannnnnnnnnnnnnnnnnnnnnnnnnnnnnnnnnnnnnnnnnnnctatgagtctgacgggnnnnnnnnnnnnaaagagnnnnnnnnnnnnnnnnnggttgtactccaggatttagataaaaaagaaaatggattacgtgatatattagctgttcttactatgaaaagggatggatctnnnnnnnnnnnntgcacagatcaagaaactggaaaannnnnnnnnnnnnnnnnnnaggtagcatcttagtgttctagagaaatcaagaatttttataaacaagaatatcaacatttggttttgcatataagtggcgtttgtattaaaatactttttcaatgaactgtataaact

SEQ ID NO: 1543 - DNA, 685 bp, Macaca Fascicularis
  misc_feature (1)...(685): n = A,T,C or G
aagaagggtaccaccatgacccctgtcagtgtccaatgtgtggtgggggctgacccctgcctttgattgtcattctcctgggaagcccagcctcaagtccctcccccaacactgtccacactgcccctccccactgtttatttattgcacggatctaagttattctccccagccagagcctgagctcctgttccctggggaaagtggcgtatggccctgagctggactttatattttatatctgcaaataaatcacattttatcttatatttagggaaagccggatagcaacaaaaaaaaaatgtttaagccaggcacgnnnnnnnnnnnnnnnnnnnnnnnnnnnnnnnnnnnnnnnnnnnnnnnnnnnnnnnnnnnnnnnnnnnnnnnnnnnnnnnnnnnnnnnnnnnnnnnnnnnnnnnnnnnnnnnnnnnnnnnnnnnnnnnnnnnnnnnnnnnnnnnnnnnnnnnnnnnnnnnnnnnnnnnnnnnnnnnnnnnnnnnnnnnnnnnnnnnnnnnnnnnnnnnnnnnnnnnnnnnnnnnnnnnnnnnnnnnnnnnnnnnnnnnnnnnnnnnncagcaaaaccctgtctcaaaaaaaaaaagtttaaaaatattgcccggctcctagaatttatttatttcctgacttacagcaagcgagttatcgccttctgtattttgtag

SEQ ID NO: 1544 - DNA, 734 bp, Macaca Fascicularis
  misc_feature (1)...(734): n = A,T,C or G
atctttgtaagctggcttttgtcttttaaaaaatatattgaatttgtggttgtgtccaatttgcaaacatttccaaaaatgtttgctttgcttacaaaccacgattttaatgttttttgtataccataatacctagccccaaacatttggttactacatgtgcatttnnnnnnnnnnnnnnnnnnnnnnnaatatttgatttctgtatcacctactgtcatttgttaaactgctggccaacatgaacaggaagtatagtttggggggttggggagaggttacataaggaagagaagaaactgagtggcatattgtaaatatcagatctataattgtaaatataaaacctgcctcagttagaatgaatggaaagcagatctacaatttgctaatataggaatatcaggttgactatatagccatacttgaaaatgcttctgagtggtgtcaactttacttgaatgaatttttcatcttgattgacgcacagtgatgtacagttcacttctannnnnnnnnnnnaacttgtgtaggaaannnnnnnngtttgacactaagataatgaacttctgtgtgcatttttctatgctttttttaaaactagtttcatttcattttcatgagatgtttgtttataagatctgaggatggttataaatactgtaagtattgtaatgttatgaatgcaggttatttgaaagctgtttattattatatcattcctgacaatgcta

SEQ ID NO: 1545 - DNA, 694 bp, Macaca Fascicularis
  misc_feature (1)...(694): n = A,T,C or G
ccccagctcctgggcccncactcctcggcagccttagcaccaggcccaagaaatctcggccagagaatgaggaccctgcccacccactgccttctgagaccaaccggccaatcctctgccttggctggagagactccgggctgtccctgtggttaaggtccccgtcagcatcagggaggcagtggcattcaaacagccctttccctcagctggtgctattgtggctgctgtggctctggaagcaaggcttggaccaaatgctaacacatggacacatatgcatagagacacacagatccacgcagacgtgcagagacgtgcacacacagatggacacagacatgcacagacacgcgcacacactgatgtggtttggattctttgttccctccaaatctcatgttggaatgtgattccgtgttggaagtggggtctggtgggaggtgttggatcatgagggtggatccgccgtgaatggcttagcaccatccccttggtgatgagtgagttcttgctcagttagctcactcaagagcggattgtttaaaagagtctgggaactccccttttccttcccctcctcccactcgctacgtgatgctggctccctgtcaccttccaccatgagtggaagcttcctgaggcctcacaggaacagatgcgggcaccatgcttcctgtacagcctgcagaac

SEQ ID NO: 1546 - DNA, 328 bp, Macaca Fascicularis
aaaaaatgttttttaccagaggtcattttgtcctcattggaaaaaaaaaaaaaaaaagcttaaatgatgttggtatgtacagtttaaaaatgtgaagtttgtagctttaactttttgtaagaaaatctaataacactggtttaagtgctgactctgaaatgctattttgtaaggtttggatgtaagtaatcaattgaggtcagcaatttgtataagtatgagaggtagcttcttcccttgtccccactcctttttttttttttttaagtttgaaatgcttcctgtgtttttatgttagaattgttctccttcctttcttcttcctata

SEQ ID NO: 1547 - DNA, 327 bp, Macaca Fascicularis
caggtggtgcggggccagcagagtgttatctgcgtgctcaaggagcatatcagcaacgagggggaagacaatatttttttaatcaacaagtttcactctatataagagaggaaggagagggaggagaggagcagggttgggacaacagaggagagtgcagcacccccccccgtgctcacagatgaacgggatgaatagggggacagagatgggcctcaggggcccgcccagccccgtgagaccacagtgtgcctcccagtgcccgtggtgggacatcaggacaaagaagatagtgtctcgtctctagaaagccgcaggtgcgcgtgg

SEQ ID NO: 1548 - DNA, 728 bp, Macaca Fascicularis
  misc_feature (1)...(728): n = A,T,C or G
taaggaaatgtnnctagttccaaagcaataggatgattggggccccgcctgttggaagggaacagccagggaagaaccacctgccaggcagggccttgcnnnnnnnnnnnnnnnnnnnnnnnnnnncacaaggggttgatctccgcccagaagccccaggggaagcccaggaaagcaggcgacggatgtggatcctgaccacctgagaggtggggtgcaggaagacccacctcttccctgacacccacgtacccctcacgaagtggctgcccagcgcctgcgtgtgctggacctgggagaggagctgtctgctggggctcacaggcagggagagnnnnnnnnnnnnnnnnnnngatgtgttagaggctgaacagctcctgtgctcagcttgctggctgtcagtgcttgatgtgcctgtcctcagctaaaacccagagctggcctgttggtcatccccacctcagacggggcacccagtcccagagctggtgagccctgggcnnnnnnnnnnnnnnnnnnnnnnnnnnnnnnnnnnnnnnnnncacctccctgggtggagggtcggggagggactggcnnnnnnnnnnggtccacagggctagccctgggtggtgggagaggggnnnnnnnnnnnnnnnnnnnnnnnnnnnnnnnnnnnnnnnnnnnnnnnnnnnnttagttgaggtgtggtagaagcactcttggtgggttttggtttccttttaaaa

SEQ ID NO: 1549 - DNA, 738 bp, Macaca Fascicularis
  misc_feature (1)...(738): n = A,T,C or G
gacgtccagaggacaaatcggcttcagattataccatcgttnnnnnnnnnnnnnnncggaggcttgccctacttaacnnnccgatgcaatccctgctgccagcttcatacagactccatccagtgcaaatggcttccttctgtgtgnnnnnnnnnnnnnnnagggaagagannnnnnnnnnnnnnnnnnnnnnnnnnngccaagtgaccccaannnnnnnnnnnnnnnnnnnnnnnnnnnnnnnnnnnnnnnnnnnngaagaacggcatcaccctacaaattcagactagacactttgcacatgaaacaagaatcccagaaatttcttgaagcaaatcttgcattcgtgaccgtcggactctatgggatgtgtaaggcacattcccagnnnnnnnnnnnnnnnnnnnnnnnnnnccgagtccagcagccgcggaggactctctgctgttcttcctctgcttcacttaacatatgagagtgaagagatgaagattgaggcgggccctgcaccaggagacatgtgtatctctctgaatgtccttgacagacagcagcagcccagcgacacccagcccccatcctgtccgtatgcaccctggtgagcattttctacagtctcctaaacgctcccattattctgttttgctggtgtgatgtgtgacnnnnnnnnnnnnnnntagcttctgcctcctccgtgtggagagagggcataaagacagagctgagatattatggcta

SEQ ID NO: 1550 - DNA, 2096 bp, Macaca Fascicularis
ataaacaggcagggttgcccctcaccaccccaccccataatgccaccaaccttcttttctattatacgacagtattggacttgtacctaagatttattttgaataaagaattctgctcctaacagaaggaaggaaagaagggaaggaagttgagaagaaggaaagaaggaaagaaaggagagagagagagagaaatattggcttggttcatttaaaatcatcttcagttgcaggaggaaacatttacctgcttgttttcaggagcccatcgattgcataaattgtggtctgtatctcagaattagaactaggaaagacctatggaaattatccagttactaggacggaactgtagctcagagaggtgaagtgccttttccgacagtactgaggtgatttgggggcacagccgggactagaactcaggtctcctaacccaagtcttgggtctttttactgcctccttactctagaactttatttatctttatagtgaagatgaacacagggacctacgatgccttagctaggtacattctgagtcattctgtgtattttccatggttttttcttgtcctcatttcaaggagaaaacttagtgtcctcacctctagagagagagagaaaaaaaatcccatttgaaatgctgcactcatgacaaatttctcatgcagtttcataacttagtcttgagaagcattgattgactcagtccccattagagccccatgaggtcaaggggaccttgataagtggatctggggtctttgttactgtggctgcgatggttttcaaaccagagcttgcaataccttactaaagtgatggctggcttttagatgggccctctcagaaagctctctctctctctgcatcctctgagcctgtggcctttgagcaagggaggaacagaacaagggtgagctctgccaccagctcagcgtgagaggggatgacgtgcactctgcagtaggtgagggtaacggattgggttaccctcacctacaggtcttctgtcctgaccctggaaagttgtcagcagctattcttggacacagaaaaatgaaatggcccgtcctgccaaactgggaaagctccttgaaggagaccaactctggggcagagggagtgggaagtctaaaccagaatcctttttccccccaggcagtttgggaagtgaagaaaggggaagcaattagaaattgcagaaggagagtggcaccttggtcagtgaaatggagcccctggtgccactggtgggactatcaaactgtcagatgacgaagctggaaggaacaattaagctctggtggcagaactgagtttccaaaataattacagtggctggcgttatgggctgggtctaagaagaagaaattgaataaagatcaatgtgaaggcctgtgcttaggtccaggaagaagtccattagacaccattgataaatgatccatggtttcaaaataatgtaaaaaaaaaaaaaaagaagaagaagtcttggttttagttttccataagttcactttgaaaagtcaacagtatcatgcaggtgtcccgaactccagtgaatacagaggctgcacacataggttcctggtgtgacagaaataagcactcctgctctgtgggtagtgccaagaagtgcagtggcagctgcctacaggtctgtgtttgcagaagggcatcccaaggatggctgaggcctgaagggagtcctatatggggaaaagccaaagtcacaggctagggggatggtgacagcagtggaagtgaagcagagggaggtgaggaggatgtagtctgtgggaggaagcacatagcagctgaatgactgaaacatggcaggacgccttagtcttcagccaggattccccttcttaaatgaacctggctgaacacacagatggggaaggccttctgcttgacatggacctgatgagcctttgagtagagttaaagatcacttattcaatacacagggagagtgggacatgtcccgaagagaatgattgggatggtaaagatgcttgaaagtcggtcctagaagaccaggtttaaggaacgtgattctgaaaaaaaaaaaaaaaaaggccaca

SEQ ID NO: 1551 - DNA, 690 bp, Macaca Fascicularis
tagtatagccaagagataaatgattatcatgtgtagttttattattattatgtagagtttaatgtcttaattactagttttcatatgaattggggttttttttactttgttttgaaggaaagttacccagtctctatgaagggagaccggcagtcgggttgaggggattcacaaacaaatactaaagataactaaaatgtatttattgcaacgcccccttcactaaagcttcattttttgcctatttaaggaaagaattcaaaaatgaaaactaaaaggaaggggaaaagtacaccaaaggaaagaccacagggttgaggattgcacagtttttttaggaaactaggtgaaaatgggtatctttttttcttcattgcattgctctcaaaactttattcgatttttaactagagttaaaatgttttatgtatttatgaaattacttggtatctttttagtaatttataaaattactcaatatctttttctgttaaaagtcaaaggtctgttttaggccatatataaattcatgtttgcttaggtagcatctgtctttgaaaacctgtgatataaattatttctgttttagagatcaaaaggcaaataacagatttgatattaacccaattacttacaatatcttttcattctttggtataaaaccaacctgctacccgcactaacattgta

SEQ ID NO: 1552 - DNA, 750 bp, Macaca Fascicularis
  misc_feature (1)...(750): n = A,T,C or G
tagacatgcacnnncnnggaacccactcacnnnnnncttttttctttttttaactttattccttgagggaagcgtcgtttttggagagattttctttctgtactttgttttactttttcttttttttaacttttactctcttgaagaggaggaccttcccacgtccgtgaggtgggttttgagcaagggaaggtggctgggtgagctgagtggagccaggctggccccgagctgagatgggagcgcggtacaatctggagcccgcagctgtcggtcagaacctcctgtgagacannnnnnnccttcacaagggcgcctttggttcttgaacatctcctttctcttcttgcttcaatttcatacccactgcctgcccggactttccatccagcctcactgagctgcccgccactggaacagaactgggcctccgtggccggggccgcgagctgcgaccacagcaccctcaagcgcacggcgctgttcctgccactgtcctgaagatgtgaatgggtggtacgacttcaacactggtgaatttcacactccatctccccgctttgtaaannnnnnnnnnnnagagacttcnnnnnnnnnnnnnnnnagcaataaactctggatgtttgtgtgcgtgtgtggacagtctcttcttacagcatgatacgatttgaccattttggtgtaaacatttgtgttttctaagatttaccttgtttttatttttctactttgaattgtatacattggaaa

SEQ ID NO: 1553 - DNA, 740 bp, Macaca Fascicularis
  misc_feature (1)...(740): n = A,T,C or G
caaaagggctccatcnnngctatctgttgatcactcttagaaaatctaattaagatcaataaattttaacagttgatggcatcctgtgtcagctggagtagttggttgtgaatattaaaacctagtactattttccctcagtaacatgtaattgctacattttttataagaaggtatggttagaaaaaaatgtgaaagatcacttaaaccaaagccagttacaaggagtaatctctcctgttggtttaccttcacctcagaactacaagaatattacaatacctagtgaatagttgtctgtaacatttctaccagttgtatcagtagcatattggtcttagcatttcttggcactatggttctgctgtattatttgtgatgtctcattgtttgtgaggttttgtttttttttttttttaaagaaaaaacaaaaacaaaaattaagtgggactatatatgtagatgtgtgtcagtaccaaaaagttattttttcagatccctaaatttctgatttccattcaagtcttttaaactctttcctgctgaatagcaaaggacttttattttccactttcctatattcctaaaaagtatgaacaatgcgtttcagttgactgtattgcatacttttttgctgaagactttttctgtaaacacaattgccttgttcagttttgttgtaaactgacttaccataagatgcactgtgnnnacgcacnnnnacatatatagtcccacta

SEQ ID NO: 1554 - DNA, 695 bp, Macaca Fascicularis
  misc_feature (1)...(695): n = A,T,C or G
tcccagaaattggaagctaaataaagcaactcaagtttcctttattttgcactcaattacagtgattattgatgaaagcgatgcatggatattttaatacttcctacatgtccnnnnnnnngaaggagagtaggtaacaggcatcccgagttcaggaactacctcagaannnnnnnnnnnnnnnnggtcataggctgtnnnnnnnnnnnnnnnnnnnnnnnnnnnnnnnnnnnnnnnnnnnnnnnnnnnnnnnnnnntgcaaggtaaggtgccacctggcagtggggcacacagagggaagaccagnnnnnnnnnnnnnnnnnnnnnnnnnnnnnnnnnnnnnnnnnnnnnnnnnnnnnnnnnnaggaaatgcttgtggtcactggttatttggtttgagagcccttgttcctccgtctagtggagtccttattaaatactagcaatgtggcaattgagtaccagtagcgtaatttcatgtttctaaatggacactgggtgcaaatcagcaaggtgattagattattagaaaaattgtgctcaatgagtacctctcacattnnnnnnncttaaatgtacaattacaatgttggatcttacggtcaaataacagacttgagaatattttataaactgccatnnnnnnnnaaaatctcattnnnnnnnnnnnnnnnnnnactgtgtctttctgtttt

SEQ ID NO: 1555 - DNA, 2042 bp, Macaca Fascicularis
ctgcatattccccaggcccggcctcgccaggccaggcctattcagccgctccccccgcctcctgcgccccctcctcctcctcttctgaatggcaggacccagccctggagcccttcgatccctttgagctggggcagggcagttctccagagcctgagctgctgcgttctcaggagcccagagcagtggggacacctgggcctggaccccgcctttccccacttggcccccccaaggcctttgagcctgaaggtttggtgctgcgccaggtccccaccccactgtcaccagctgctctgcagggacctgaggcaggaggaggacgactttttctaacccaagggcgcctggaagggcctccttccagtccccgggatggagccacaggctttggagtccgggatgcctcctcctggcagccccctgctgacctgtctgcgctctccctggaggaggtctctcgcagtctgcgtttcatcgggctctcagaggatgtcgtgagcttctttgcccgagaacgcatcgatggtagcatcttcgtgcagctcagtgaggacatcctggcagatgacttccacctcaccaagctgcaggtcaagaagatcatgcagttcatcaaaggctggaggcccaagatctgaactgcccagctggagctgcacagctggaatgctggcatgggggccccagggacagcacttgggaggagcaggtgctgcctgcagggaggatcgatgtcgagacagactgctcggcagccactgggtggatccaggggagatgcacgtggaaatgtgatcctctgggctcagacccctgcacgggacagcttgcctttgagtgtgcagaatacatgggaaaggggctgggggcaccactgtgtacctgagcccagtaaggcatttgctgtgattcccacaatggggtcaaaagctggccttcagggtgacctaacacctcctcatgccctgctatagaccttcacaaatgacttccactgctcaagcctgtaggctctgtttagagacaagatggccggtaatttaagcacaaatttcccaagtgcccactctcctttgtgctctgtgggcttttggcctaaagctgccccagagtgagggtgtagatgtctgtgtctctgggatgcctttcctttccccctctgctccactgcggttggggggcctggccctgcacacaggtgagttgtgtacaagccgaagccatggtacctcagaagctccacctgtgggtcctggttcatgggtgacggctttggaagagcacagctctgctattgacccgacccacttatctagttaggaagccagacactgcccagatggctctagcaccctggcttcccctctgactttactgcaactagttatccatccgtcaggtgggttcagtctcagaatactgtctccgtggaagagcaggtcgatttaggtcagcttctccttgattctagaaacaagtggtagtcaaccacccccaattctgccaatctcttgctcccatcatttggctctgacaatatgatttttggtgtttttccctgtcactggcacaggagggtacacttgggagagcgtggtcctggagctcagtcctgcacttgttcacgtgcttcagagcaggcctttgtgcccttgaatctcaaacatggggatctgcttggtacccagagctctagtcattgtgtccaaccacacaccccaccctacccctgtgccctccatctcacccagaaccatagggtgcccactagtgtcagggtccaaggtgccagccttctcttctgccttacctagtctacctatttatttcctctactttttatcttaagagtagctaagccatgctggtgcccatactccaagcaggctgcctcagctcagagaagtggtcagagagtagagcacaaaacctgtgatgtggggacatttggttttcttgcagatcatttaaagaatcctcaaggactagtgaaataaatgctagactgctgaagactaaaaaaaaaaaaaaaaaaaaaa

SEQ ID NO: 1556 - DNA, 726 bp, Macaca Fascicularis
  misc_feature (1)...(726): n = A,T,C or G
aatgacaaaaacttnnnttnnnagaactgttactgaatgtttcagtatttgttatgatttacagtcttcaagtaaaagatattttcatgtaagagaattttatgtattcttcttacttgattcatcaacagattatgaagcnnnnnnnnnnnnnnnnnnnacctttttaacttgtctagaacacagaaggggtgttgtcctttttaaggactgtagatcttttnnnnnnnnnnnnnnnnnattcttaaccctctacagttctgcaagctcacatgtggtgcaagaggaaaggctggtatgactctgtgcattttcttgcccctaaacaagaatagttgatttcatatgttaaatggaaggtagatatgactatgcaagagaagtatgcaggggtgttnnnnnnnnnnnnnnnnttttcataagttaaaaacccatcatggaataactgtttgttgtgatcagcatgtttttatcacacacgagcactggttttgtgagcacctggcttggtagtgatagggtggccaatgtgccagcnnnnnnnnnnnnnnnnnnnnnnnnnattggaaatcannnnnnnnnacagacacaccgaatcagctggtgcacggtcatgttctcaggtaaaacctgttcattatccatgtccagatttgtatagttatcactagactaaaatgaagatggaaataaatattttaccctgtgttcatgaaccaaatgtgt

SEQ ID NO: 1557 - DNA, 741 bp, Macaca Fascicularis
  misc_feature (1)...(741): n = A,T,C or G
gccannnnnnntttgatgtcgagtggtgcggggtcactgggactttgtgttttgagcacactctcctatgggctccgccttttgcagcattgcacagaggcatggaaagttatgttcatactgagcttggggtctgagtaggaaacaggcttgctcaagatcagttcatagattagtggattctaggtactgtgctttaaaaatattaagattgtagctattgtaatgatcatgatcgtccctatttgagggagtatgttaatccactttcacgctgctgatacaaagacatacctgaaactgggcaatttacaaagaaaaaggggtttaatggattcacagttccacatggctggggaggcctcacaatcatggtggaaggtgaaaggcacgtctgacatggcggaacacaagagaagatgagaaccaagtgaaaagggaaactgtcagtcctctgagcccaagcctgcgtgtatacatccagatggtctgaagtaactaaagaatcacaaaagaannnnnnnnnnnnnnnnnnnnnnnnnnnnnnnnnnnntacctcgtgaaattccttctgctggctcagaagctcccccacnnnnnnnnnnntgacccccacccctgccggccagaaaactaccccctttgactataattttccattacctatccaaatcctataaaatggccccaccccatctcctttcactgactctctttttgtactcagtccacctgcacgca

SEQ ID NO: 1558 - DNA, 709 bp, Macaca Fascicularis
  misc_feature (1)...(709): n = A,T,C or G
tgtggcagacgagtgggagactggttgcaaggtgtgaccgcaggaatcctggaggaacagagagtaaagcttctaggcatctgaaacttntgcttcatctccgatgctcgcaggactgaagatgggcaaattgtcagcgtttgcgctgagcagagttggagccagagatctacttgtgacttgttggccttcttcctacatctgcctgagactggggggctcagctcctggggtgatatctagcctgtttgaaacagcgggaataaggagagctgagattggagggaattaagttgctcctggagggagcccaggcatcattaaacaagccagtaggtcacctggcttccgtggaccaattcatctttcggacaagcatttgcagaaatggactcgggaaagagactcacatgctttggttaatatctgtgtttccggtgggtgtaataggggattagccccagaagggactgagctaaacagtgttattatgggaaaggaaatggcattgctgctttcaaccagcgactaatgcaatccattcctctcttgtttatactaatctaagggttgagcacttgaaacggcttcaggatggaaagctgtttcccacctctgtttgcttttaccattaaaaggaaaacgtgccgctgccccacggttagaggggggcacattcctcctggttcctttgcttgtgtttctgtac

SEQ ID NO: 1559 - DNA, 687 bp, Macaca Fascicularis
agggtgctccctaccctccgtgcgatggagtccacgtgcgctcggtgtgcatttttggagctggtgacttgaactggatgctgcgcaaacaccacttgtttgccaataagtttgacgtggatgttgacctctttgccatccagtgtttggatgagcatttgaggcataaagctttggagacattaaaacactgaccattacaggcaactttatgaataataagaaggatacacaaaacgtaccccttatctgtttccccttccttgtcagtgagcatgaggaagatggtatgagctcctctttggggcggggactctagatcttcttgtcagagaagctgcatggtttttgcagagcatcattagctagaaaggtgataacattaaatgttcatctagagttaatgatgagaggggtaaaggtagccttgaggccagagcaggtagcaaggcattctggaaaggggggaccagggtggatggggaagaggccgatgcataaagtcagcctgtgaaagtgctcagggacttagcaacatgagaagatgtgacttgtgccaaaactattttgagaattttaaatgtgaccatttttctggtatgaataaacttacagcaacaaataatcaaggatacagttaatctgatattatatttgttgaaacggaaatttgatttactctaagtg

SEQ ID NO: 1560 - DNA, 1902 bp, Macaca Fascicularis
tttactttacttatactgaaaatagctttggccagttttttgtttgttttttgtttttcttaaattagcatcaaagaatgaatatgagaaaagcagagatgaattgaagaaaaagaaagcgcctggtccaggcaaagtaagtatttcacttgtcttggagtaaaaatgaatccccttgtcatggaccacatccagaagagtgaatctttggagactgacttaacagagttcgcagcagccttatcccctctcctagaaatctagattctttgatttttatttttgaattttctgttgtctttatcactctcttccctataactgctcatatacaagcatctcttttattagtttatgaatctttctttatatcctattatgccatataaagacatttgaataacatactcttattttcctccttttattacacaaaaggtaggatgtaacgtactccactctacatctgttttttgtatgttttatttatttatttatttatttaaaccacccatggaaattattttgtatcagtatattgagagtttctcaccgtatggaggaccttatctaaccagttccttatagaaggacacttgggttgtttttagtcttttattacaatactactataatgaacagtcttgtatatatataattttgtgtggaaatagtaagctcccagaagtgccaggttgtgtcaggaggtccccaagaccactcacaggttaggtaattcataagaggactcagatctcagcgtatgattgtacttgcctctctgatatactacagcaaaagaataccaggcaccatcagcaaagggaaagggaacatggggcaaaatatggtggaaacctggcacaggcttccaaggatgtcttccagtagagtgacacaagacatgctttattcccctaagaacaagttgtggcaacacttgtgaaatgttgctaactagggaagctcattagagactcagtgcccagggtttttattggggactgatcgcgtaggcattccctgcctggcatctaccaaaattcagacttccagaaggaaagcaggtgttcagcatgaatcatgttgtttgcacaaacagtttaggcacagtaagtcattcttgtcagttaggatggtagaaaccttcccaaattccagattcccaaatgccagccaagggcaaaccctgcaaacaggttttcaaaggatagcagtcaggtttgctctgttaacttttctaaaccttggccaaaaggtaaatgccaaatttccctctctgggggctataccatttagcagtcatacctgcagtgtgttaactgccccttttaaagagtgtcacataactcactggctgaaaatcagcttgtgatgctttatggaaaaaaggttcagagaaaatattcccccaagtaggttacttatgtcaagatcattaatagaaactgttctctcttagtttttgtttgctaacaggcataaggacaataattcttagagttaaaattatacctgtatgtaatttttcaaaaatagcttttgggttacaagtggttctttggttacatagatgaatcatatagtgatggagtctgaaattttagtgcacctgtcacccaagtagtgtacattgtacccaatatgcaattttttattcctcatccccttcccagcctccttcctctgagtctccaaagtccatcataccactctgtatgcctttgcatactcatagcttagctcccacttataagtgagaacatatggtagttggttttccactcctaagttactttacttaaaataatggcctctagctccaagttgctgtaaaaaaaaaaaaaaaaaaaaaaaaaaaaaaaaaaaaaaaaaaaaaaaaaaaaaaaaaaaaaagccaca

SEQ ID NO: 1561 - DNA, 669 bp, Macaca Fascicularis
  misc_feature (1)...(669): n = A,T,C or G
ccttcccgagaccaccgtcaccctgcttaagggcagacgtactctggtgagccctgttccgcccccaccatccttgcagggtctcactgtgtgtcctggctgactcttccaggccctgaacccttccatggatgggattccacaagacagtggcctgcnnnnnnnnnnnnnnnnnnnnnnnnnnnnnnnnnnnnnnnnnnnnnnnnnnnnnnnnnnnnnnnnnnnnnnnnnnnnnnnnnnnnnnnnnnnnnnnnnnnnnnnnnnnnnnnnnnnnnnnnnnnnnnnnnnnnnnnnnnnnnnnnnnnnnnnnnnnnnnnnnnnnnnnnnnnnnnnnnnnnnnnnnnnnnnnnnnnnnnnnnnnnnnnnnnnnnnnnnnnnnnnnnnnnnnnnnnnnnnntagtaagacactgtctcttaaaaacaaaaacaaaacaatggtgaggaaactccagtccactcctggtggatgagattgttaggctgctgtggatggtgtcctgccttccagccatggaaatggaagtctgctggggtcgtccttgacccccagatctgtctctctgtctcttgcctctgccttgcctttccaggttgagggtcagcgagttactctcccagccataccctctaaaggcgtcttcctgggtgcaagcgggcgatttgtggagt

SEQ ID NO: 1562 - DNA, 441 bp, Macaca Fascicularis
  misc_feature (1)...(441): n = A,T,C or G
nnnnnnnnnnnnnnnnnnnnnnnnnnnnnnnnnnnnnnnnnnnnnnnnnnnnnnnnnnnnnnnnnnnnnnnnnnnnnnnnnnnnnnnnnnnnnnnnnnnnnnnnnnnnnnnnnnnnnnnnnnnnnnnnnnnnnnnnnnnnnnnnnnnnnnnnnnnnnnnnnnnnnnnnnnnnnnnnnnnnnnnnnnnnnnnnnnnnnnnnnnnnnnnnnnnnnnggccctgttcaaacctttcgaagaaacctggtaattcacgctgaagaggaaccttataaatgtaagttttgtgggaaggcttttgataatctacatttatatcttacccatgaaagaactcacactggagagaaaccgcacgaatgtaaactatgtggtaaatccgttggttatgccgctaccaagtgtgagtcctttcaggtgtaaacaatgtgggaaaacgtcca

SEQ ID NO: 1563 - DNA, 2593 bp, Macaca Fascicularis
ggagtgctgcagaatctctggggtggcaggtccgccagcgaggctggggatgggggcgccgctgctctctcccggttgggcagctggggctgccggtcggcgctcgtatgtgctgctggcgcccttcctgctgacgctgctgctagtgcggccctcgggggccctggtggaggggctctactgcggcacgcgggactgctacgaggtgctgggcgtgagccgctcggcgggcaaagcggagatcgcgcgggcctaccgccagctggcccggcgctaccaccccgaccgatatcggccggagcccgccgacgagggccccgggcggacgccgcagagcgccgaggaggctttcctgctggtggcaaccgcctatgagacgctcaagatattggtggttatgttccagtcctcctgcatatgcccaagaggattgggagtggaatggacaccagcagaagcactacagtttttcctgtagagattagaaacaaggagcttattgccctgcttgtcaaggctcaggacagacaggaggaagaaacaagtataaaggttttggttttggaaagaagttggactctccagaccctgggaccttaagatccacaaaattgctgaaagaaaaagtactaccttattgaaagattataaactaaggccatttaatggactgtcctgtgaagttggatatcttgtcattttacaggatgaggaaacacgaaaagattatgattacatgctggatcatccagaagagtactacagccattactaccactactatagcaggcgcttggcccctaaggtggatgttagagtcgtgattttggtcagtgtgtgtgctatttcagtgtttcagtttttcagctggtggaatagctacaataaagcaatcagctacctagccacagtgcccaagtaccgtatccaggctacagagattgccaagcagcagggactgctcaaaaaagccaaagaaaaaggcaaaaacaaaaagtccaaagaggaaattcgtgacgaggaggagaacatcataaagaacattatcaaaagtaaaatagatataaaggggggctatcagaaaccccaaatctgtgatcttctcctgtttcaaattatcttagctccatttcacctatgctcatacatagtttggtattgccggtggatctataattttaacattaaaggcaaagaatatggagaggaagagagattgtacattatacgtaaatctatgaagatgtcaaagtctcaatttgatagtctagaagatcatcagaaagaaacttttcttaaacgagagctctggatcaaggagaattatgaggtctacaagcaagaacaagaggaggaattaaagaaaaagttggcaaatgaccccagatggaagagatacaggagatggatgaagaatgaagggcctgggcggttaacatttgtggatgactgaagattgatggaatgctactatgccaaaccttaattgtgatattattttcataactgaattattttagaaatgtatcaattgactgctgctcagcagtaactaaaattcctcaagtatttgattaaacagaataatgtcgaaatttaaaccttcccttaaaactttatacataagacatttatgattgttcaacttttataatctatttgtggattttgttaaaagatttcacatgaagatttattagttgccatttaaaatttttatatgtttagttaaaagatttgacatgaaaatttattagataccatttgaacattttatgtgttatgtgtttattctttcgagagtgttccctctttgtaataatgctacatttttctgttttcatggcctctgtattttcacaaaacaccaaaaacagcatttaattatattatcatgagtgtttttctggacacaaacttcagtagaatgacctaacaagtcgttttcattacagtcattataggattgaaatacgttcaaagtaacctctaggaaagtcttctgctagaatatcccccctcgattcattataatagtctttgtttttaaagccaaatataatagtcttaataagatcagaaactctccaggagagtgagtctaccctcatgtccttgtaggatgatcttgattatagtctcatgatagggctataactgtattctcaacatttctccagaaaggaccttgtaaaaaggtcttttgtaccacagtattggtttttttcccctctcttcacttaaaaaaaaaaaaattgcaggcagaaatagcgtactgaaaagttgttcatctattatgaagtccttgagtggtgaaaaatccattgtacatgagaacatttctgtgcatttaaaccagaaacgaggtacatggctgtgtgctcttctatcaaccaatgaaatgtgtctttacatgtgtggcagtgcaagtaaataacacattatttgacttaatcaggcgtgatactgcaccagagtatcaaagtatcggtacatattcatggtagtaagtcagtacccctgttaaaggatttatcccattgcttcatattaataaaatggttacaatataaaaaaaaaaaaaaaaaaaaaa

SEQ ID NO: 1564 - DNA, 193 bp, Macaca Fascicularis
tgttttgtgacacgatttatgtgggggagagttatttcactaggagatagtaaaatcttattttttttctgtgtctaaacttattgtgaaaaatgagcggtgcggacactcttttgatttcacttgggaacacttggaagagcactagtgtttactttcccgtgcactatagagacacatgaatattcataac

SEQ ID NO: 1565 - DNA, 784 bp, Macaca Fascicularis
  misc_feature (1)...(784): n = A,T,C or G
caagtagctnngatgcaagcatgtgccaccatgcctggctaatttctgtatttagtagagacaaggtttcaccatgttggccaggccagtctcaaactcctggcctcaagtgatccatctgccttggcctcccaaagtgctctgattacaggtgtgagccagggcgcccagcccctcccttgtgtttcaaccaatcggaagtgaatttaactagatgtagtaaccttttttttctttgcttctaaaaaagttacagtttactgataannnnnnnnnnnnnnntatcctagatgaaataaattcaatattaattcatgtctaagttacttgnnnnnnnnnnnnnnnnnnnnnnnnnnnnnattaaagtggagcagtgaaggcccctggctgggagatggcctccagaggagcagctgcagggcatgttctaggcttagcgacagaggcaagcaagggactggtgtctccggtgagaggtgggtttgatgtgtctctgccctatgctggtctctcttctcctttataaaatcctctgtggtcaactgactcctgcgtatcgcagtagaataagactgcacagttgctggtaggtgagtttaaagtcttaatctatgcattcagagaaatatttttatatgctttgtgtaatttataacaaggattttttttttagctttgttaactgtgaattcacccctcctcctccactgcatatttaaagcatgtgttcacagtgtgtaaannnnnnnnnnnnnnnttttctttgtgcattgctgactgttca

SEQ ID NO: 1566 - DNA, 1883 bp, Macaca Fascicularis
attagaaattctccatccaaaactggagggttgcttgtcttggtccaaatgggaactctggggttgcctgggaattaccgcactaacccggcgtccggtcaggcgcagggctttcctccaggtctccagggcgcctggctcaccccggcgttgcgctgggagcgctggaaacttggcagcccctcgcgaccctaacctggagcaacctgcctcctccccaggcccggggactgcgctgtgccgggaggagctgaggtttaagctcgggttgtcccgggccgggcgggcgctgagccccgggtctcgtttttgcagagggtcgccgcttcatctccgaccagagccggaggaaggacctctccgatcggccactgccggaaagacgaagcccaagtccccgactactacctattccaaaggcagcaaccatcttactggcgtcccttcagaaatcaccagaagatgaagaaaaaaactttgatcagaccagattactggaagatagtctgcttaactggtgaaaatattatgtttaattatagttctattctctctgaaaacatgaaccatgtgaataaaacctttggacccttttattcatttgtaatcttaagaacacacacagatagttttattctttcagaaacaaaatatatatacatgcttagctgagaacatcatcttctttcattgcttcaggtcctgtttagatgaccaaaaatgtttttagatcaccttgtgtcttactcttgagtttcttagaatatttataattataaggttgaagactaaagtgttctttccttttaattatagccagtacttgtcttgatcttagttgttgttgttgttgttttcattttgttacccacttgcattttgttttcactcaacagaaattctccttctctgttttccttttatcccatccccaaggaggtgggaggaaggcaagaagcatggcaggatgggaaataggagagtatgactctctataactcatccaggagtgatcaattaagaagataaattggatgactggggagaagccctgtgacaggaacacttcagtgtggttgctgagaggagacagtcattgaggtagaaggtttgccaaagatctagagcttggagctccctttgtgctctttgggaattaccttgcattcagtttagaaacatggatctaaaagttactggaaaataagcagatggagacacactctgttgtttatgtattggaagaagggaacaagccagttttgttagaggtaactcattttccatgaccaaacaaactcaacagattcaagtactccgcttactctaattgactaggctctaggttttatttgacatcatagcattacataaatcactctgaaaacataagtgcacagtaatatgcctgatcgttctcctttttaaaagccaacttgagttcagtactatctgaatacacccgcacgcacatacacacacacacatacacacatactcctgtggcaaacataataatgtatttatttagaattataacatgaccgtcatgttaattttttttttacctaatcagagttgttattgacaaatgtcataagtggaaagcattgttaattcttattgtcatcagtatttaccattatttagtagctcaaggatatctttatgtgaatgtctctgtaacttggaattgcaatttaactgtgttaagtcatcagaactctgcttataagatttatctgtatcttgtttcatgatttaataatgaaactaaattcaagttaatgtaatgttgatctctgtcaaaaaataacttgtgagcattaaaatatctgtatggcattaaaaaaaaaaaaaaaaaaaaaaaaaaaaaaaaaaaa

SEQ ID NO: 1567 - DNA, 2386 bp, Macaca Fascicularis
  misc_feature (1)...(2386): n = A,T,C or G
aaaaaataggggccaggcacannnnnnnnnnnnnnnnnnnnnnnnnnnnnnnnnnnnnnnnnnnnnnnnnnnnnnnnnnnnnnnnnnnnnnnnnnnnnnnnnnnnnnnnnnnnnnnnnnnnnnnnnnnnnnnnnnnnnnnnnnnnnnnnnnnnnnnnnnnnnnnnnnnnnnggttnnnnnnnnnnnnnnnnnnnnnnnnnnnnnnnnnnnnnnnnnnnnnnnnnnnnnnnnnnnnnnnnnnnnnnnnnnnnnnnnnnnnnnnnnnnnnnnnnnnnnnnnnnnnnnnnnctgacttcatgatctgcccgcctcagcctcccaaagaacacctacctcttaacacaaaaacctgagtgatgtttcaacattaaagcttttttttttttttaaacttttgggccaggtcagatttatgggtaggttgttctcctggaccctctgaaggaaaagggaaggagcatgagggtcaattgtctgcttatccaagaaatccccttccctaaagttatatgtgtgtatgtgtgtgtgttgtggggtggtggtggtctgttatttcagttacagcaataacaactacccatttagtggacactagccatgtagcaggctccatgcttagccttttgcatgcattatttcatttaattcccaagaatcctgtgaaggaaggtgccttattgtccccagtttacagagggggatatggaggcatggtgatgtcacgtaactggcatgttgttttcctggggcaactagaaaaaaggaccacagactgactggtttagacaactggaatttactctcttaaattctggaggccagaagtgtgagatcagggtgcccacagggctgcattccctctgaagaagctggggaaggatctgttccaggcctctttcctggcttctggaagttccttgacttgtggtcacgtaaatccaatcttcacatagtgttctcctgtctgtcccctttttaaagacaccagtcgtattggattagggcccatgctgatgacctcatcttaacttgattacctctgtaaagagcccatctccaaataaggtcacattcggagggacctgggggttaccactccactagcttttttgggaggacacaattcaacccataacagcagataaatggcagaacccgggcatacgcaacagacccaaaggcttcaccctttgggaggaagattgtgtaaattaagagcccagactttccagccaggctacaagagtccaaattctgggtttgtcttaatttgggaatttggggatctaagaagcagcttattaggcaaggtgggcatggggatgagaaagggtgaggcatcaagcctctcatcactgtttgtgactgagcttaatcccatcgggaatgctgggggcagggccagacaattcctcacagcagctattgccccctttccctaggagaggaagtgtctacgcaccagtggagctattcgggcaccagtctccgtatggactgagggtttccggctgatttgggcctgggccctccttgtgtggcttccaaggcagccctcaggcagagagatgcagacactagcatttggaaatcagctggcggcaccgaaggtgtcaggtccgggtgcacctcacttaggagttggctggaccagaacggggaggcagaggaatagtttcagcagcacaaaggcagagggagcccaggtggaggcccttaatctcacctgaagaggtcaaggctggcgtcgcagaggaggcagtgctcatcttggagtctgaaggatgaactgaattttatcaggtttaagacttaccactatggaaaatgaggacttggttttcttttccacctgcctccatgccttttacaaaccctttctatgactcatcctcccagtgaagttatactataatgttgatcagatcaatagtcgatatgcatgtttaaatccaggtttccattcctggacttttccccatacctgttgagacgacactacatatggcttccttcaaaaactagaagcgtctgggaaatggagaattccagcattgcttctccttcttagggaggtggtggtatggataacagagagttaatagcacaagctttggtgtcagaaggactagagtgtaattcctggctttgctggtcctggctgcaagactcaagccaattgctctctctgccaactttggtttcttcacctataaagaggtatgaggttgtggctgggcacggtggctcacgtctgtcatcccagaactttgggaggtcaagccaggcagatcacctgaagtcaggagttcaagaccagcctgatcaatatggtgaaaccccatctctactaaaaaaaaaaaaaaaaaaaaaaaaaaaaaaaaaa

SEQ ID NO: 1568 - DNA, 764 bp, Macaca Fascicularis
  misc_feature (1)...(764): n = A,T,C or G
agttgacattggtctttaaatagatacatcctgnnnnnnnnnnnnnnnncttcatagtggtgttggccttgtatttaacttttttgggtttttttgagatgaagccacactnnnnnnnnnnnnnnnnnnnnnnnnnnnnnnnnnnnnnnnnnnnncaannnctgcnnnnnagttcaagcaattctnnngctncagnnncccaagtagctgnnnnnnnnnnnnnnnnnnnnnnnnnnnnnnnnnnnnnnnnnnnnnnnnnnnnnnnnnnnnnnnnnnnnnnnnnnnnnnnnnnnnnnnnnnnnnnnnnnnnnnnnnnnnnnnnnnnnnnnnnnnnnnnnnnnnnnnnnnnnnnnnnnnnnnnnnntgtgcccagcctttttaactttaaacatgttttagaatttgcctaaagatcaaaatgtcatggattgaagctcatcaattgatggcagtgagtgactgaagcttccaaatcaagaaaagccagcaccaagaacttccattctaatctagactgaccagtttgagctgattctccttgaagagtccttcttgattgcagtgcagtaccggcatttctgagtggatgtaagcggagtattttagtctaaaggcttttcaagttacttgaattttttaaaaaattgaggagctttatttctatttaccctttcatttttgtatatcaaatttccattgtcattaaaaactgtatcttgaaagtttgtgaactgacttgctgtatttgcactttgagctctgaa

SEQ ID NO: 1569 - DNA, 720 bp, Macaca Fascicularis
  misc_feature (1)...(720): n = A,T,C or G
tagttgaaatgaccaaatagcattcttagacttatgtattatgaatataattgatatttaaattaatgtcttgttcacatatgtgtattttcatatttgatttttaaatgtacattataacctgtatggtattttatttaaaggggataaacagccaaatagcaaatagnnnnnnnnnnnnnnnnntttgcaccttagaacaatagtcattttaaggataacaagtaaacgtctgaaagcacgaggggctttgtttgccttcacctcatagaagtctttgatcttgaacnnnnnnntttggatctcattgttgatatacctgaatttactctgtaggagactttaacttcacttcatgctgatgatgtatcaatttcattttatagaaagatttaaagtttttttctggtagtgatatatgtcacattacatttcctactgcagtatttgagcagggacagtcattttttaaatgtttttggctgggcgcggtggctcacgcctgtaatctcagcacgttgggaggccgaggcaggtggatcacctgaggtcaggagtttgaggccagcctggccaacatggtgaaaccctgtctgtactaaaaatacaaaaaattagccaggcgtggtggtgggtgcctgtaatccccgccattctagnnnnnnnnnnnnnnnnnnnnnnnnnnnnnnnnnnnnnnnnnnnnnnnnnnnnnnnnnncaa

SEQ ID NO: 1570 - DNA, 148 bp, Macaca Fascicularis
tcaagccatcatggaaagcaggtgttggacattcctcattatgccctattccattttagatttcaggaaaatctgtccaggatttaccatcaacagtgcccttaaatttgatctgaaacatttacaatgtattctatccgaagtctgg

SEQ ID NO: 1571 - DNA, 686 bp, Macaca Fascicularis
  misc_feature (1)...(686): n = A,T,C or G
gagagtagctggaatgtaagtgannnnnngctttgcctcagggcctttagcctatgtacccccccccccccaatagagagaggttctcagagcctgactgaagagctgacattttgctttttcacacaccaattaaacccgatctaaatccannnnnnnnnnnnnnnnnnnnnnagtgggtgtccttttcagtcttgtcttttatataggtagctgaggggggagatttagaagctttgcactcactaaatagattaaacagagnnnnnnnnnnnnnnnnnnnnnnnnnaagtccaacagacacannnnnnnnnnnnnnnttacattcacattccctttttgccccttaaatagaaagtgcaggtaaaggtttatacaacaagaaagcacattaaaaataatttcatactctaacagtccattaacatgtgtaggggttggggtgaggatcactgtgnnnnnnnnnnnnnnnnnnnngggagggatgcttaattggccctggtgcttgctatttttttctcatttcttcagaatgggaccctctttggcagcagcaaaatatatttcagtatggcagtctttcctctcttacattattggtaagattatactaacaaaatnnnnnnnnnnnnnnnnnnnnnnnnnnttttttaaaaacattgannntgtgtgtttttataaaagaa

SEQ ID NO: 1572 - DNA, 760 bp, Macaca Fascicularis
  misc_feature (1)...(760): n = A,T,C or G
tagagatgagannnnnaaatgcttatcatattttgtcataaaaatggattaatccaaccattttcaagtaaagnnnnnnnnnnnnnnntcccatttctagaatagcttctagaacagtgctatgcacatattagatcttaataaacatttgctgagtgaaagtaagataaactcaactatctcttgggaagaactggctttattcctagtannnnnnnnnnnnnnnnnctaatcttccagcagtacaaatattaacaattatattaacacctgcctcgtgtcactttgtgcttctagagcaatgtctagtgaaacttatctgatggcatttattgaaaactttctaaaaagtagactaaggaaaccataatcagaattactatgtcttttgattcccaatgagaagttctattttcatgttcttaatattacataaaagaaaatgcagttaggttatttcaattgacaattctgcctcctcttttgatttatcacttatccaaaattattaattttattaggcttttggaaaagaaaaaaacctttttgatgttttaggtgatttaaaaatatactgtgttggtggtgaatgattattgatgactgttaagtgcatctgtattgtaagtgaaacgtaattatttctgtgtaccatatggagtaactaaggtcattgtttttgacaattttgtttgaaattcatatatcttatttcaaaggatagcataatatctgcattatgctggaaaaaaatagacct

SEQ ID NO: 1573 - DNA, 845 bp, Macaca Fascicularis
  misc_feature (1)...(845): n = A,T,C or G
annnnnnnnnnnnnnnnnngtgatgtgcgaggcgggccaggtnnnnnnnnnnnnnnnnntgctcatagatgtaggacgcaaatcgaccctggtgtggagcaaaggctgcagcgctgttggggctcaaaattcccagaagacctccatccactcagcccctcctggggtgctcgtggcctcctatgcccacttctgctcctcagacctgtgcaatgnngcnnnnnnnnnnnnnnnnnngntgaactccctccctcctcaaggtgcccctgagccaggagaccagcagtgtcttacctgcgtgcagcccttgggaacctgctcaagtgactccccagtaaagacctgccccaggggcaccactcattgttatgatgggtacattagtctctcaggaggtggggtaaccaccacaatgggcattcagggctgtgtggcccaaccttccagctccttgttgaaccacaccagacnnnnnnnnnnnnnnnctgtgcgtgagaagggtgaagaggagcctcctgcccctcattctgagagaggtggggctgggggcctggagtctctcacttggggggtggggctggcactggccctggcgctttggtggggggctctttgcccttcctgctaactccatttcccccacgattcttcacccctgctgaccaccacactcaaccgtccctctgacctcataacttaatggccttggacactaaattcttttcccatcctgcccatgaattatcttccccacacacaatcattcatgtctactcacctaatagcgaccctggggagagcctggagcagctggacttgtcctatgggagaggggacgtggagga

SEQ ID NO: 1574 - DNA, 743 bp, Macaca Fascicularis
agtatgaagttaaagggtgtagacatgtaaagtgtgaagttaaagggtgtaatattctatacatgggactggctgcagaaacaggtgcaagccctttctacctttcatgagaaaggaaggatgactcagagcagaggggactccattgggcagagtcctgaaccacgtgatattcccatgtcttgactcccagtggcatttgccaaagtagatttcaaattttcttgggattagtggttccatttgtttgttttccccccttccatttcctccctttttgaaacaatgcatatacatataactattaccctaggtctttcccacccttttgtttgggagcagataactagttttctagttttacggatccagacgagacaggaatagcactgggtggtcacaggaggatggaaaatctcaacaccctggttttggtgcggctgaaaaaaaagaaaaaacccaaacaacagctaaaacaggaactaggcaaagaaagcatgggataatagaaaacccaaaacgaaagagaaaactgctagaaccccagtcagggtgacatgtccatgactcttccagtcaaatgcaaataagggaggaggggtggtaatcgggggtccctgaaattccctcctttcccagaatacctaatgattacccctgattagaggaacacccatacaattagaaacccaaacttcattttgcatgacttgctctcgaagagcactcccacacttctctct

SEQ ID NO: 1575 - DNA, 759 bp, Macaca Fascicularis
  misc_feature (1)...(759): n = A,T,C or G
ttacagaaaagacgcatttataggaaagacgtacgggcaggtccagcagagcnnntacaagcannnnagnnnnntagaaatcaggtttattgcacgtctgacatggatggacccagctagatatcttgccaacggctcctgtggccccactcagaagccatgcagcacaaaaggaccaaaaggacagctagatttcatcaatctttcaccaaccaatcagcactccccataccttagccccctgctcaccaaactatctttgaaaaacccctaacctgtgagccttcagttgtaacnnnnnnnnnnnnnnnctgtgaatccaaaatatctgagacaggtctccatcagtttagaaagtttattttgtcaaagttaaggatgagcccatgacatggcctcagggggtcctgacaacacgtgcccaaggtgactggggcacagcttgctttcagacatttttagggagacatgagacatcaatcaatatgtgcaagatggaaaaagaagagaaaaagaaaatatgtatnnnnnnnnnnnnnnnnnnnnnnggaaaggcaggacaacttgaaggctggcgggggcagggggagcttcccgcttccaggtcatcggtagataagaaacaaaagattgcattcttggccnnnnnnnnnnnnnnnnnnnnnnnnnnnnnnnnnnnnnnnnnnnnnnnnnnnnnnnncacgaggtcaggagatcgagaccatcctggctaatacggtaaaaccccatctctaccag

SEQ ID NO: 1576 - DNA, 695 bp, Macaca Fascicularis
  misc_feature (1)...(695): n = A,T,C or G
agtcccagagtcannnctgnnnnnnnnnnnnnnnntgcgtgttcacatgcactgcccagcatgccgnnnnnnnnnnnnnnnnnnnnnnnnnnnnnnnnnnnnnnnnnnnnnnnnnnnnnnnnnnnnnnatgcctccacccaccaccaaggaagacgtnnnnnnnnnnnnnnnnnnnnnnnnnnnnnctgatgtccagcaggcctgtcttcaaatggccatnnnnnnnnnnnnnnnnnnnnnnnnnnnnnnnnnnnnnnnnnnnnnnnnncacaaagaaaaatatttctcaggccccaagcccaaagcggtgctaaaccaattccnnnnnnnnnnnnnnnnnnnngaaaaggagattannnnnnnnnnnnnnnnnnnnnnnnggccctatgaatacccgaagcccagccgcatagagaacagtgtcaccatctgagccctagagtgactccacccgcaagatttcacatccgctttaagactgacatttctatcttgaatttcatgctttactaaagtctctgctgctaaggctctatttcctcccccagtgaaactacattagtatcccactagcccaggggagcagtaaactttctctgcaaannnnnnnnnnnnnnnnnnnnnnnnnnnnnnnnnnnnnnnnnnnnnnnnnnnnnnnnnnnncccnctacagcacgaaggcagccacagacaa

SEQ ID NO: 1577 - DNA, 759 bp, Macaca Fascicularis
taggagtggcagtaatctactgtgtcaggagagagggcaattaccaatctgaaagagaaggaggccctctgtgtattccatcccctcctccttaatgcctccaagggtccctgcatccctggcccattcccaacttcctaaactctagctctgattctccatcatcccatggagctattccaaggcccccgttacccatcacctacacaccaggtcaagttttgtctcagccccagaagcactgacatttctagtttgccccctctgcccttaccccaacagcatgcctgtctcagctccctgtccctcggcacttccccaggctcatttgagcaggtgtgccttcgcagtgcccctaaacttcccaggtgcctcatccataatgagataatgaatgtaggggaaagtttctcaggaaggtggaagaggcagcaggacttggagaaggagtacctgctggtcagccttgagatgcacaggtgaaggtgagggtgtgatgagagcatgctatacctggtgctgaatccctgaggggccagcttcccaggcttaagccaaatctgccttaaattgggggtggggaggggttagtaaggaattggggtttgtttgtttgtttttgtgttgttttcatcttcatctttgtattactagcatccagcagagtgcctagcacatactggatgctcaataaacttttgatgaaatgaaatgacaactttattccacgtaaacaagggtaacaaaacaagctgctaa

SEQ ID NO: 1578 - DNA, 724 bp, Macaca Fascicularis
  misc_feature (1)...(724): n = A,T,C or G
ttgtgcttatatcnttttgcgggganngnntttgcaagaaaactgcatacaaggctttgtaatgatcaagtgctaatcgatggaaatgttaaggtagannnnnnnnnnnnnnnnnnnnntgatcacattggtccaaccagtccttttttgaagtaaggaacaaggagtattttttaagttttnnnnnnnnnnnnnnnnnnnnntnnnnnnnnnnngtaatttaatggtatagcttaattctagacaatgtttaagttggtctgcctttaataaaaataagannnnnnnnnnnnnnnnnnnnnnnnnnnnnnnnnnnnnngacaaagcatgttttggtgtgtagtcttactttttagaaatagctatgcatcgttctacacaggtttaaaacaactttttgggggatttagggctattatagaaatagtttgttgtcagaagcactttctcttgaagaacctaaaataattgactcattcatagtaaatatgggcatgtaaactaataaatatgcactggatacatatatggatttatgaagaaggaaattnnnnnnnnnnnnnnnnnnntgtaattaaaatatgtggtctctaaaatattccagttatgagatattttgctttattaatattnnnnnnnnnnnnnnnaatgtggtttttatatatttttgtagtgtgttgggaagagcaaaagctttataaatatacctgatgcgctgtagact

SEQ ID NO: 1579 - DNA, 275 bp, Macaca Fascicularis
tccctaatcatatccatatagatgtgcccgtggcccccgcggtgtgtcttcttcaggggagagttttaggacggacgccgcagccctctgtcagtgactcagtttttcttctcgagaacgctgcaggcatctcttgggctctggggacccaggtctgcatccagccagcacgccaactgggtctgggacagacagggaggggcctgtccagaaacatcacactattaaatcacaatgatttttattaaccacgtgtatatatgtatatgtgccac

SEQ ID NO: 1580 - DNA, 742 bp, Macaca Fascicularis
  misc_feature (1)...(742): n = A,T,C or G
atttcacttactgattcataaagtgaatttatttaaagctatgccgcacatgcatgttcaaatgnnnnnnactgattcgatttttcattcatttaatgcaaactcattctggatattgtgcttatttgagaaaacacatttcaaaaccaaaacagccaaaaacactccaaaaacagtcaaaacaattgggagctttctaaaggaaaaactcccagttggtaaagtttatctttacttaggatttgtggctcacacctaaacaaagggggtcagggagtgtgtacagatttgagaaaatagaagggtaagggaagggccagtggtggggttcgaagagaggagatagctctattaatacacatgtttaaaagatagaaagtttgatgtgattgcagtatgagattaaagccacagctattgtttattttgaggactctaggccactaagtattagcacacatacttatattttctctttactaatctggtataggtcctcatggaccacaggacaaagctttcattttcattcattcttctattgaaattataccaaaatcagctgaggaacatggaagtaactttagacttaaacaagacaaaagcnnnnnnnnnnnnnnnnnnnnnnnnnnnnnnnccttaaaacaatcctgattactgaatgtggattcctgctgagggagtgtatcccataatatggcaatgattttcactttctcgaatgaaaagacaggaaggaata

SEQ ID NO: 1581 - DNA, 761 bp, Macaca Fascicularis
  misc_feature (1)...(761): n = A,T,C or G
tcagtagccatcatgnnnaatggagatcannnagtntccgcttcaagggataaaaccataaaaatgtgggaagtgcaaactggctactgtgtgaagacattcacaggacacagagaatgggtacgtatggtacgaccaaatcaagatggcactctgatagccagnnnnnnnnnnnnnnnnnnnnnnnnnnnnngggtcgtagcaacaaaggaatgcaaggctgagctccgagagcatgagcatgtggtagaatgcatttcctgggctccagaaagctcatattcnnnnnnnnnnnnnncaacaggatctgagactaaaaaaagtggtaaacctgggccattcttgcnnnnnnnnnnnnnnnacaagactattaagatgtgggatgtcannnnnnnnnnnnnnnnnnnnnnnnnnntgggtcatgataactgggtacgtggagttctgttccattctggggggaagtttattttgagttgtgctgatgacaagaccctgcgcgtgtgggattacaagaacaagcgatgcatgaagannnnnnnnnnnnnnnnnnnnnnngttacctccttggatttccacaagacggcaccatatgtcgtcnnnnnnnnnnnnnnnnnnnnnnnnnnnntgtgggagtgccgttgattgcgtctccttcggcccctcctccctcttttcctctggatgcactctgatgataccatggttacccnnnnnnnnnnnnnnnnnnnnnnnnnnngtcctttcatgtaaattattct

SEQ ID NO: 1582 - DNA, 689 bp, Macaca Fascicularis
atcaagaaattacagtggtcacatattagtaactatcacataaatactgtttgcttgtgaatacatgaacatccccctctgaatttttagtgtagaaatacaaaataaactgcagggtttggccacatactcctggaatcgagaaatatgtgagaggaaaatttgataaattattttatgcaagcaaaataaaagcgctggttgttccagaatacattagatgtcgcaaaaggaacaaagaatgttctgtcaatttgtaggaccataattttgcaatcttttataaggaaaaatgttgcaatgagatataatgtttgtgtgaataaagtagtgaatgtgtgtttatgttttgacagcgtaagaagtatataataacctaatgcacagatacacatgaatgtaaggttcttttacattatgtttaagatggggaactcatagaaggagcttacagtgaatccttctaaagatttattgagtactctgtgaaaacacttgtaaaaatgtggaatgattaactgtagaactacaatgagttttgcccttttgccttgcttatatggagatttatttgtcattgggattctatttctaaagctggcactttgctactaaaatgggatattacaaacatatttttaaatttaatatcaaagcctgttaattctcatgagactcttaaaattatt

SEQ ID NO: 1583 - DNA, 2257 bp, Macaca Fascicularis
  misc_feature (1)...(2257): n = A,T,C or G
tgttgcggcttccgccgcgggtggaggaagatggcgtcgggtggtggtggctgtagcgcttcggagagactccctccgcctttccccggcctggagccggagtccgagggggcggccggggggtcagaacccgaggctggggacagcgacaccgagggggaggacattttcaccggcgccgcggtggtcagtaagcaccagtctccaaagagaactacatcccttcttcccatcaacaatggctccaaagaaaatgggatccatgaagagcaagaccaagagccacaggatctctttgcagatgccacagtggagctatccttggacaacacacaaaataatcagaagaaggtgccagccaaaacactcatttctcttcctccgcaggaagccccaaattcttcaaagcaccagccaacctatgaggagctagaggaagaagaacaggaggatcaatttgatttgacagtcggtataactgatcctgagaagataggggacggtatgaatgcatatgtagcctacaaagttacaacacaggtgagtccaggtggccctgctgaagaccatcttcatagacttgggtgcttgtaccaacgtcatcattcagattatttctgggtatctcctttgtttctttgccaacatcttcatgtttactcaagatggagcaagcctgcatccccttggagatctcatctgggtgctccagactgagtctttttaatactcttctagaaagctaacatttcggtgtgattctgtgaagtcgtgtggtatatctgatacagctcttttagagaaccatgtggtgtggagctagattcacagattgccttaaactatcttttaaaatcttcaatgcttttgaggtttcagagagcttcttgtaatacttaaccttttgcctctctggtcgggtcttctttcgtatataatattaatgcatagaaaatgtacacaatgtggtatacaagttatgaagcataatgaatgaagctctaaacttaccactagtcttgagtaccactgaatccacttacgtgtttttccatcatatcccctgcctcacaccttagaggcgccctttctcctgagttgtctctcatttcttttataagaaatctttacacacacacatatatatatatgactgttttgctttgttttgagtttcataaaaataatatcatgctgataattgtgcttgctttatttagtattgtttctttcacccatccttgatggtcatagctgtagttagttcatataccacaaaatatttgtgttttcctgttgtgaacattttctcctgtcaacatgtttctggtttttgtaactgggaactttcttgcatgtctctagtgcacatgtggaagggtttctctagagtatgtaaccaggagtaattcccgtgagtcataggtactgcaaatattggacacaaggaatacaaactgttttttaaagtctttgtaccaatttataccccatcggcagtgtataaaagttcccattgattcacttccttgccagcaattggtgaggccaacctccttaaattttgcctatctggtgagtataaagtaaactctcatcgtgatgtaggcctaaccttttttggtagaaatctgctttatattgtatctctactacttgttggcctgtgtcctgtgaactctacattatgatactttagaggttactgtctacagcttagacatttcatccaattcccaccctgctcctcacctgcttccccttcttagaagcactttttgtctgtctttagtttggctgctataattccagcagcttatacccttaaataagtcagtgaggcctggcgcannnnnnnnnnnnnnnnnnnnnnnnnnnnnnnnnnnnnnnnnnnnnnnnnnnnnnnnnnnnnnnnnnnnnnnnnnnnnnnnnnnnnnnnnnnnnnnnnnnnnnnnnnnnnnnnnnnnnnnnnnnnnnnnnnnnnnnnnnnnnnnnnnnnnnnnnnnnnnnnnnnnnnnnnnnnnnnnnnnnnnnnnnnnnnnnnnnnnnnnnnnnnnnnnnnnnnnnnnnnnnnnnnnnnnnnnnnnnnnnnnnnnnngggcatggtaacatgtgcctgtgttcctacctacttgggaggctgaggcaggaggatcgcttaagcccgggagtttgaggctgcagtgagctgtgatcgcaccattgcattccagcctgggcaacaaagtgagatcctgtatcaaaaaaaaaaaaaaaa

SEQ ID NO: 1584 - DNA, 161 bp, Macaca Fascicularis
tatttgctggtttgaaagattatgatgcatacagttttctaacaattttctttgattttacagcattgtctttgctgtactacctatcctcaatactcaaaagcacaacttggcattactgtactttacaggaaagaaaattctgttgttccattgtatgc

SEQ ID NO: 1585 - DNA, 706 bp, Macaca Fascicularis
  misc_feature (1)...(706): n = A,T,C or G
tccagaagtcatctgcctggtttgaaatattttgcagggattgcttattattattattttagctgatgaacctcaggacaacatatacacacacttacacacatacatacacacannnnnnnnnnnnnnnnnnnnnnnnnnnggaatcagatttctgtgtccagtaaaaacctttcctgcacagaagtcattgtgacttaagtagttacagactgattccagtgaacttgatctaatttcttttgatctaatgaatgtatctacnnnnnnnnnnnnnnnnnnnnnnnnnnnnnnnnagtagttgctaattttttgacaactttaactgagtttcattcacttattttacttagtgttttaaatatactatcaataatttcattaacctgttctcaagcggtttagctaccattctgccatttttaatttttatttaattttatttgcttgagcacactgatcaaccactgaactgccttcttccattgtcctgcaatgatataagggttacatttttgtgtatatggctttcatagttgggatttcagagcactgataccagatattttcagtttgttctctgggggaatttcatttgcatctatgtttttagctatctgtgataacttgttaaatattaaaaagatattttgcttcatattggaacatttgtatactcgcaactatatttctgtaaacagctgca

SEQ ID NO: 1586 - DNA, 3135 bp, Macaca Fascicularis
agttgaagatgctgggggaggcagcctggtgcttcttaagctaacgcggatcacggcgctcaggagctgctcaggcacaaccccgcagagttcctccagcgtgagagccttggaacggttggaaagtgcctttttatttctccaaaccccttccttagttgaccttcgaaaatgattggcgtgaatagtgtccagagtgccagcaaggtacgggtgaggacctcaggttccgtgaaatactcccgagaggattctatccggcggcagtctcacaggtcaaagtccatgaaaatttccaactcctcagagttttctgctaaggagaacaaggctctgtacaactcaatcaagaatgagaagcttgaatgggcagtagatgatgaagagaaaaaaaagtctccttcagaaagtactgaggagaaagctaatggaacacatccaaagaccatcagtcgtattggaagtactactaacccgtttttggacattcctcatgatccaaatgctgctgtgtacaaaagtggattcttggctcggaagattcatgcagatatggatggaaagaagactccaagaggaaaacgaggatggaaaaccttttacgctgtgctgaagggaacagttctttacttgcaaaaggacgaatacaagccagaaaaggccttgtctgaagaggacttgaaaaacgctgtgagtgtgcaccacgcattggcatccaaggccacggactatgagaagaaaccaaacgtgtttaaacttaaaactgccgactggagggtcttgctttttcaaactcagagccaagaagaaatgcaagggtggataaacaaaattaattgtgtggcagctgtattttctgcaccaccatttccagcagcaatcggctctcagaagaagtttagccgcccacttttgcctgccactacgacaaaactgtctcaggaggagcaactgaagtcacatgaaagtaagctgaagcagatcaccaccgagctggccgagcaccgctcatatccccccgacaagaaggtcaaagccaaggacgtcgatgagtacaaactgaaagaccactatctggagtttgagaaaacccgctatgaaatgtatgtcagcattctcaaggaaggaggcaaagagctcctgagtaacgatgaaagcgaggctgcaggactgaagaagtcgcactcgagtccttcgctgaacccggatacgtctccgatcactgccaaggtcaagcgtaatgtgtcagagaggaaggatcaccgacctgaaacaccaagcattaagcaaaaagttacttagagtccgtctgcggccaggaagtgctggtcatggagcaaaatagggtttttcaagatctttctggtaatccgtgaatatatttaaaaaaaaaagtctgtgacaaaatggtgcattagtaattttttctattgtacatttttgttagtttctgtacagattgtctttgctcttgatttcttttgctttgatgatttttgcaacttgatagctaatgcaccttttctgtgaggaggaggggatcgtgatttcagaatgaattatgtatcccttctcttttggttttctcttgtttgcagtctgctcagttgttttatgtattctcaaatcaactgttacactttttttaaggttaaagaatttaatccattgtgaaacgcttaactggacaaactgtagttttagtaaattctagctggagttaatatacgcctttatatgtgaaatcttgcccagtcacagaggtagaattgagcactcacagatgctccagtaagaatcgcagtgctgggaatctagatgctccaatatgaggcagctgcgtgtgcagcttagcacttcctgttgagatcggaccctgctggaagcagggagaaggagcgtgaagatcataggattgagaacgtagggaagcacattagcttgcttgaagtgctgattccatttcagccaagcaagggaaagaggaattggagtcattttgcgtttgaaggttgaggaaagattgatacccagttgattttgtttgctaaaggatgggggcagtaatcggcccttgaggagctgcaacagtaggcatgtgcgcagtctgcaggaaattgttacctcactcccacagggtctagactagaaatccatcatctctatcgttgatatccttccatacaggaatagattctttcttactctacatatgtgtgtgtgtgtgcgtgtgtgtgcatgtgtgggcatggggttgtgtcctggtcatgatgttggggtcttccttcctaacaaaataatgcattttaaaatgaaaccgcttttgttctgtccttaagacaaaataagggaggaaaaagtagctgcagttgtccacaatggatattggttctttaaaatatgtgtgaaagtaatagtcggaatgaattgtggttggaaaactgagggatccgctggtcgcaggtgcaaagtgactttgtttatttttgtctcagtctccttgatagccacttcactctgctactactcaactttctcctaaaaatactttatctattttcagtcctttctttctgtctactcaaaatggttctattaactttgcagtcatgagcttgttccacttacagtccctttgaaattcagggtgataaacagaatattctcctgtagaggaagagaagggaatgaaagtttagcccactgagacctagaactttgtgatttcctcaccttgaaactctagtccctaaagttataatctccacaagtggcacaactgcagaactaatagaatcactctgatgattcttttacctcccttagaagtgttctatagttctgcagtttatttgttgaaggtactatgaccaaagaatcagctgctctaagtgaatagcatggttccagtgaattagagaaaacctgctgtaaaaccatggtagtgtctaagtggtatgttattatgatatactagcatttatttacagaattatttatttaatgtttacttccttcccctctctaaatgtccatacttgctgttgcccagagaagggttacccctctctaggattgcagttgctttctttgtaataagtattttgccacaccttaaaaaaaaaaaaaaaaaaa

SEQ ID NO: 1587 - DNA, 719 bp, Macaca Fascicularis
  misc_feature (1)...(719): n = A,T,C or G
tcattgtgtaagannnagtcnngatggnnnnnnnnnnnnnnnnnnnncagaagatggaacattgagactannnnnnnnnnnnnnnnnnnnnnnnnnnnnnnnnnnnnnnnnnnnnnnnnnnnnnnnnnntagnnnnnnnnnnnnnnngccaaagattggttttccagagacaacagaagaggagatagaagaaattgcttcagagaattcagactgcannnnnnnnnnnnnnnnnnnnnnnnnnnnnnnnnnnnnnnnnntatgccacagttagtatacaactgactaaaacgagcaagcagagaaaagcatcagccttccagagttactctctgcttaaggcagaaacagcagtaaataatgaggaaaatgaattatctccagtnnnnnnnnnnnnnactaacttggtgttacctgtaagtnnnnnnnnnnnnnnnnnagataaagggaggtggagttatcctnnnnnnnnnnnnnngcctgttatctttttaatgaatatatacaagccaacatccaatttctattattacaattagggttcttgtagccgtttatgttattatggagaagaaaaatatattggcttatttttctgatctttttccttaaagcagaatgcccttttttttttttgcttcagttgtaaggaagagggagnnnnnnnnaaagtaactggtttgatttctctttcattgtacactgcttctgaacatcta

SEQ ID NO: 1588 - DNA, 765 bp, Macaca Fascicularis
  misc_feature (1)...(765): n = A,T,C or G
acttcaagcggaagtcagtgtaggctgnnnnngcnnaacatggtctnnnnnnnnnnnnnngtaannnnnnnnnnnnnnnnnnnnnnnnnnnnnnnnnnnnnnnnnnnnnnnnnnnnnnnnnnnnnnnnnnnnnnnnnnnnnnnnnnnnnnnnnnngttgctgtgcctctgttggaacgctaagtgcctgcaactcacgtcaatcatagaattgtgacgcacatttggcaaaatagttctttatgctatttctcaaaatttgaggacaaactcagattgggattggaatgtgcactgtaaatcagatttttcttatctacaaagactaatgtaaaaatgatttttnnnnnnnnnnnnnnnnnnnnnnnnnnnnnnnnnnnnnnnnnnnnnnnnnnnnnnngctttgggagaaaaaatatcttttcttgaaagaacttaccaaagcaaatttgttatcttcacaagttaatgggagaatgtggtttttattctgggtgtttgaattnnnnnnnnnnnnnnnnnnnnnnnnnnnnnnnngttgtcctgtgctccttctactgtacttttttaattttttaataggaaagtgatgggtttcagagaagggttcctccttagtgttgaggctttttacaaataaaaatattgtttctaagctctttcattattggtttgcatgattactggnnnnnnnnnnnnnnnnnnnnnnnnnnnnnnnnnnnnnngcacctttcctatttagcctcattttagaatgcnnnnaaca

SEQ ID NO: 1589 - DNA, 1629 bp, Macaca Fascicularis
  misc_feature (1)...(1629): n = A,T,C or G
aaaaggtagggcgatgtatacagtctgaggggcctctaagtcagccatgatgcctcccaaagtgagcagggagtgggcagccaccactgtgacctcaccctgcccccgactcccagttctgggaattcttcattagcaccaaatccaaacttttcctcagcagtggcaggacccgggcgcgggtcctccttcctcctcccgtcccctcgcggtcagacaacaggtatctgtatgtttgcaagcattctttcaggcagggctcctggggacagcagctggcagctctgaagttacctccttccagttcatgattcagagcggcaggaagcagcattccacctgaagaaaaattgtcatcataatgcctctctgttcctcagcagccaatggctgactcactcccctggccctgggaggcttggttgctcggctctgattgtgaagtgtgtgcagatagtgtgttcacatccaaaatcatgcatgcacacaaaactccgaaacacaatctcacgtgttctctgtgccaaccatgcaaacgcaccatgcctgaaggggggtgtgtcctccccacacagtggggtgccgacagaagccattctgcaaaggcttgttaattcttagacagtcgggtgtgaatatcgtgctgacatttatagcgtgtcttcgccacactctgtctcgcccacgctgaaccacgcacctgcaggagggaatgctggtatcaacgcagcagatgttgtgtgccctgggaatgcttaaatatgtactctctacagaaggcgtgtgttacccaaacacagacctgagagagggggactaggagggaagagaaaaggggagatatggtctggcttccccgagcctatctctgggtgccctggatgcctggtaaattccagccttgggtgaaaacaaaaggctttatctttcaaaacaagtttaggaagatgttagactttattatatagaaaaatataacaaaacaaaacatgggctgtggagtcagagaaacgtggttttaagtcccagtcctacaatttaacaaactacatgaccttgggtcaatcacttagcctctctgagccttctcaccagtaaaatggagctcacagaggcatctatttctcagggttgtggtcaaggaaagttaggttagtgattcatatgctggaatataaagaaataaatactcctttatttgaacttctaagtcatgggtggcatgccagggtgactttgccctgatattagggttactagggtccttttctagttgccctggatctcagcatcctgcctccaaccctggtattctcactaataccaagggtggatccacaggtcatctcccctgcagattcagccccttcccagttcccaagtatcgctgggcttgaggggaacacatactacgttgctcaacactgtcctggttgcaaatgacagaaaattgaaatttattggtttgtgtgattagaaagtttgagggtnnnnnnnnnnnnnnnnnnnnnnnnnnnnnnnnnnnnnnnnnnnnnnnnnnnnnnnnnnnnnnnnnnnntgtcaagagctcaacaccagcctgggcaagagagtgagacatgtttctccaaaaaaaaaaaaaaaaaaaaa

SEQ ID NO: 1590 - DNA, 727 bp, Macaca Fascicularis
  misc_feature (1)...(727): n = A,T,C or G
acagacatgcaccaccatgcctggttaattttttatttttgtagagtcaaagtctcgctatgttgcctaggctggtctccaactgctgggctcaaacaatcctccacctcagtgctggggttacaggtgtgagtcaccgtgcccacctctcttctgcctccttccacatttaagggccctagtgatggcacannnnnnnnnnnnnnnnnnnnnnnnnnnnnnnnnnnnnnnnnnnnnnnnnnnnnnnnnnnnnnnnnnnnnttattctttaccatgtcatatannnnnnnnnnnnnnnnnngaaattaggacatggacatcttttggggggtggggagggggtgccattatcctgccatctacgataatatggttgtaattatgtgacatgctgacctcctgtctcagcatcatgctgtgctgtgcagcacctgcagctgtgagcacacacccctgttgacagaagcagctgctctcctatgtaatgaggctgtggttatcattcttcccatcctgatacctcttttctctcactggggatccctgccagcttctgcaacacaaaacttcatttttatctcctagtctgtttgttttgttccctaataacgtcggctttttttctatggtttctaaaattattgccactgttcagccatttttatacttcttggaactttttgaattttgaataagtaaataaatgctcaaatatgcatcaaactct

SEQ ID NO: 1591 - DNA, 601 bp, Macaca Fascicularis
  misc_feature (1)...(601): n = A,T,C or G
gagtagaaggcggccatgcacaagccaagaagagggnnnnnctgggnnnnnnnnnnnnnnnnnnnnncaatnnnnnnnnnncagcctcannnnnnnnngcaggaatagcaaggctgggaggcggtggcaagattgaacacactccagccaaannnnnnnnnnnnnnnnnnnnnnnnnnnnnnnnnncggggcatgacctacactatgccactggtctggccactctgcttctgggccnnnnnnnnnnnnnnnnnnnnnnggagtccatcctggaggagacgcgtcagcatggaccccatcatggcttcctgaggccctgcccaagggaagcagcttcccaggccaaggcaattctcaccaggacaaagctcccaactccccannnnnnnnnnnnnnnnnnnnnnnnnaggagggtcagggaaggggatggcaggagctagaaaaatcctccgactcccacatccgccgccatctgtctctaggaagaaacagaacatctggcaccggctttggcccatgccgtttatgtaagccacatgtgaccccatgtggcccaggcagcccctcgcaggttggtgccctggcctcaccccacctgact

SEQ ID NO: 1592 - DNA, 678 bp, Macaca Fascicularis
agatgcgccacggcttcggtagcgacggcagctctgcgagggcctgacctgtgcaagcacctcccccaggagaccgttgcagtctccagcccccttctccacggtaaccatgtgcgaccgaaaggccgtgatcaaaaatgcggacatgtcggaagagatgcaacaggactcggtggagtgcgctactcaggcgctggagaaatacaacatagagaaggacattgcggctcatatcaagaaggaatttgacaagaagtacaatcccacctggcattgcatcgtgggaaggaacttcggcagttacgtgacacatgaaaccaaacacttcatctacttctacctgggccaagtggccattcttctgttcaaatctggttaaaagcatggactgtgccacacacccagtgatccatccaaaaacaaggactgcagcctaaattccaaataccagagactgaaattttcagccttgctaagggaacaacacctcgatgtttgaacctttgttgtgttttgtacagggcattctctgtactagtttgttgtggttataaaacaattagcagaatagcctacatttgtatttattttctattccatacttctgcccatgttgttttctctcagtccattcctttaaaaaataaatctgttgcagatgtgaaaaaaaaaaaaaaa

SEQ ID NO: 1593 - DNA, 2084 bp, Macaca Fascicularis
atagcagggggcgcagaagcttgggctgcagaaaaacgatactgtttgctgtgtaatcgtgagaatgggctgcaagagaggaaaaactgggtgtctgcttgggaatctcttgcggaaacccagcagggtgtttccagaccagtccctgggcgccaactagagtatggactgaccaggtacctggatggagacctgagctggagaaggagatgcgcctggaaattgcagaggccgtcaccatggaaaagcagccccagaacaagaggagaggcctcgccccccgagaggtgccaccagccgttgggctgctgctgatcatggccctgatgaatactctgctctacctctgcctcgaccacttcttcattgctcctcgacaatccattgtggaccccagacactgtccctatggtcacttcaggataggacagatgaaaaactgctcaccttggctgtcctgtgaggagctgagaacagaagtgagacagctaaagcgtgtcggggaaggagccgtgaagagagtctttctgtctgagtggaaggagcacaaagttgctctctcacggcttaccagcctggagatgaaagatgatttcctccatggactgcagatgctgaaatctctacaaggcgcacatgttgtcacgctgcttggctattgtgaggatgacaacactattcttactgaatatcaccctctaggttccttgagtaacctggaagaaacactaaacctttcaaagtaccaaaatgtgaacacgtggcagcacaggctgcagctggccatggactatgtcagcatcattaattacctgcaccacagccccatgggcacacgggtcatgtgtgactccaatgacctgcccaagacactgtctcagtatctgctgacaagcaacttcagcattttggcaaatgacttggatgccttacccctggtgaaccacagctctgggacactggtgaagtgcggccacagggagctgcatggggattttgtggctccagagcaactgtggccctacggagaggacatgcctttccgtgataatctcatgccctcatatgacgagaaaattgacatttggaagatcccagacatctccagtttccttctggggcacattgaagggagtgatatggtccgattccatttgtttgacattcacaaagcatgcaagagccagactccctcagaaagacccactgcccaggacgttctggagacctaccagaaggtcttggatacacttagagatgctgtgatgtctcaggcaagagagatgctgtgaaaaccagtccagccaatgaaggtcatatatctaataaggaattgatatccagtgtacatgtagaactcctgtaattcaacacaaaaaccaaacagtccaattaataaatggagaagagattcgaatgaacatttttctaaagaacagctcaagctcaagatttcccagataacttttctctcttcaaaatctgcttctgtgtttccttatctgtaggtggcacagcatgcatctgatttcccaagccagaaacctcagagtcattcttgactccaggaagaaatactgagtttttaaaaactcaacttattgattcattattttatataataaaatgcaacagttttaagtgtatatttcaatgagttttgatacatttatgtacttgtgtcactatccccatagataaagagacaaagcatttctatcacaccggcaatttcctatgtgtcccatcccaatcaatcctttcttctctgctggctccaagcaatgactctttcctatccttttggaaagattagaatttcttttctagatttccagtaatggaatcatacagtgtctaagtctatttgtggtgctataacaaaatacctgagactgggtaatttatataaattacaggaatttatttctcacagttctggatgctgaaaagtttatgatcaaggcactagcaggtttggtgtctgagggcccagtttcttctttgaagatggtgctttgaacactgtcctcacatggtagaaggggcagataggcaaaaaaaaaaaaaaaaaaaaaaaaaaa

SEQ ID NO: 1594 - DNA, 314 bp, Macaca Fascicularis
atagtccgtatggcaaaccccccacagacacaggattaacttatttaacaaacttgcacatggatccttgagcttaaaatagaatcctgaaaaaagggactccaaaaaagtaaggaatccgtctttaaatcaaagttttttcaaattaaaataacttaactgtaaatttgaaataatgacattagggaaattcaggtgttacgtgccttcagcaaacataatataaaacggccgggcgtggtggctcacgcctgtcatcccagcactttgggaggcacaaggcaagtggatcacctgagctcatgagtttgaga

SEQ ID NO: 1595 - DNA, 757 bp, Macaca Fascicularis
  misc_feature (1)...(757): n = A,T,C or G
cagtactttatccattccttgccnnnnnnnnnnnntagagaaatttcttgtttagcaatccacctcccacacagacttcagtgagagtaacatcgtcagaacccccaaacccnnnnnnnnnnnnnnnnncagaaaaaagggaaccagtgagaaannnnnnnnnnnnnnnnnnnnnnnnnnactttaaaaaggaggggaaaatatacagattaaggactcaagatgatggtgaagatgaaaacaacacttggaatggaaattccactcaacagatgtagnnnnnnnnnnnnnnnnnnnnnnnnnnnnnnnnnnnnnnnnnnnnnnnnnnnnnnnnnnnnnnnnnnnnnnnnnnnnnnnnnnnnnnnnnnnnnnnnnnnngtctataaaatgtctctctattcctgcttagtgggtgtgggttgaaggtgtttaactcagaaaagtaaagacaggaaataactgtctgctaggtccttgcttgtacggcagccactgctagaagcctaaaagaaccaaaaagtctgccgcagcctgcctccatcagcttcttactcagtatttcacatgctcattagccnnnnnnnnnnnnnnnnnncgttttgtttagagctacttnnnnnnnnnnnnnnnnnnnnnnnnnnnnnnnnnnnntcactgagtaatttgactctgtgtcagagnnnnnnnnnnnnnnnnnnnnntgagaatttatgtttaacttctctttttgctcatcagctgcaagcaaaatcttgta

SEQ ID NO: 1596 - DNA, 787 bp, Macaca Fascicularis
  misc_feature (1)...(787): n = A,T,C or G
tggacacagagtgacccagccaggggnnacccannnnnnnnnnnnnnnnnnngccattccagtctcctgtgaagccaggagggaccaggaaccatgcagaggaaactggaaacttttctccgctgggtagagcatgttgctgatactcttctgttttcaagggaaacaatcacattgtttgattccaaatggcaaatgaacactcactatttttcaggcttcagtaaatcttttttcttctttcatatatatatatatacacacacacacacacacacacacgtatatctatacacacatatgtgtgttatgtgtatgtgttgtatatatgtgtatgtgtatatatagttttagctccaagccaagcaagtttgtgtttggatagaggtgaacttaactattaactacaagttgaacgtctttggtatcttgattttcccatttctaaagatgaatttcacaaagccataaagcgtgaaattagagctggacttaagactcactggctgaccatcctgtgtcgtggcctggccctgcagtaagaagcgtgtctcagtctggagaagggtgctttcgaggagtgtgcaggtggccgttccccttggaggcgagaagagagaatgtgccttgtatcgtcctggttttcagtccacagagtcggtagaccaagggttacctgactggggaaaatctcacatctccttgtccgaaaacatttcccctgctgttctctttctaacatgttgtcataaatctgttcagatactgtttatctgactgttttgta

SEQ ID NO: 1597 - DNA, 1489 bp, Macaca Fascicularis
ttttttgaaagtggtaggatgagaagaagtagatgacttttgtgatgacagatttctaaaatgagcactggaaatctaggtagagtggaaatgtgtgtgtacttgaggttttgaggtcatctttatgtggagttctgaaataaaaatgtgttaaatacataattctttttgttgggtgttcactaatttggcattaaaataaaacatgctgaattaaaagaattctagtaaaaatgatgagttctagttctacgatgaagtataatttaaatactctacagtagattattttctccagaggcccgaatagtgacattggttttcaaaattgtatcaatttgtgccacttaatgttgatggcttttctgtatataaatctgaatattaggtaagaatattagatattacgatacattttgacaggtaaagaaggtcactaaattctatcctgtgtgtgatggtaatttattgttactattatttattaaaattattatgagtaaaatgttaatatgaatgattggaagtttattaaaatctcatacatttgaagggaagaatatatttaaacttatatttatctaaattctccttagaaaatagttgtgcaagaactgatgcgatttttactccttaccccggatttaaaagtcacgtaaaaggtaagtaaccaccacatgacatctgagtcactgacagaagtctagattattagcaaaatggaatagaaataactttcccatctaaattttattttaaaacaaaaacatcttgccgtccttcatacttgtggttagatggtctttatgaaaaaaatacaaagtgctgttagggaataagaatttctgatttttgaaatataaatgtatataggctcaaaagtttgttaatttagtttctagagttgtgaatacatacggaccacagactagacctgaaggaattccagggtcaggtcataaacctaacagcatgcttcgagattgtggtaatcaggctgtagaagaacgactacaaaatattgaggcccacttgcggttacagacaggtaagcagagtgctaagtggacctcataatgaacctttgcaaatggttaaaaaattgcagttcatttagtcaccaaattttcctttagctcctaacattgtttgaacgataagtgccagtcattcagaaagtgttatgtatatgtcagttcacttaaaaggtcatagtacccttttgaggtgttggtgctgttataattgtacagataaataaattgaagtttaaagagcccaagcaacacgcctccgatagtgagtgacaactctttaaaaaaaaaaaaaaaaaaaaaaaaaaaaaaaaaaaaaaaaaaaaaaaaaaaaaaaaaaaaaaaaaaaaaaaaaaaaaaaaaaaaaaaaaaaaaaaaaaaaaaaaaaaaaaaaaaaaaaaaaaaaaaaaaagcacaaaaaaaaaaaaaaaaaaaaaaaaaaaaaaaaaaaaaaa

SEQ ID NO: 1598 - DNA, 711 bp, Macaca Fascicularis
  misc_feature (1)...(711): n = A,T,C or G
tgctnnngaggtcgtcactatatcaacagtcaaaaacccaatggcaataaaggcactgaggatagcnnnnnnnnnnngnnnnnnnnnnnnnnnnnnnnnnnnnnnnnnnnnnnnnnnnnnnnnnnnnnnnnnnnnnnnnnnnnnnnnnnnnntgtagccacagagagcacataagacacnnnnnnnnnnnnnnntagaaattcctttctgtttccttctctcagnnnnnnnnnnnnnnnnnnacctgggttgtgtgaaacagagcctgagagtgctttacagnnnnnnnnnnnnnnnnnnnnnnnnnnnnnnnnnnnnnnccagctggccctagtcctagtgnnnnnnnnnnnnnnagtcctgacctgcaacaactgaggttttttagtcttttaaaccannnnnnnnnaattttttttaaattaggtaagttaaaannnnnnnnnnnnnnnnnnnntcagccctgtgtgcttgtgttccttagagctctcctttaaagagtgctgggcagggctgnnnnnnnnnnnnngtgcctgtcagttcttgccacagcccttgcctgtgagtgaaagctcaggtgtggggagggcatcccgtgtcccggcggtgctgtgctgctgccaggatgcgagccccactgagcctctccaaagatggcctccaaggatctgaacccttggccacttgtgtagtggcctcctgttctcaccc

SEQ ID NO: 1599 - DNA, 1016 bp, Macaca Fascicularis
  misc_feature (1)...(1016): n = A,T,C or G
tcgtgagatgcgtgtatgttnnatgagagctgctacngaaagaatgaagattgttttcacagtgttgttattagttcttatacttcaatgcgttcttttcctaggttgtgagtatgtcatctgttagttttaacaggtctagctcctactttaccattttcttggtctcagctcaggcatgctctgaagtgggctttagctggagccctggtgagccctattttctccttttttatttttgatacaaggtccggccccgtcgcccagtctgnnnnnnnnnnnnnnnnnnnnnnntcacggcagcctccaccacctgggctcaagccaacctcctacctcagcctctcaagtagctgggactacacgtgcatgccaccacacccagctaatttttatattttttgtaaagatgggggtctcgctatnnnnnnnnnnnnnnnnnnnnnttcctgagctcaagcaatccacccgccttggcctcccnnnnnnnnnnnnnnnnnnnnnnnnnnnnnnnngcccagcccattttctccattttaatttagagcaaatgcatccagcatttacnnnnnnnntatgtgtttggtgaaattttcttgtttaatattagcttttgggtgtttttcaaatttcctttttgaaccaatttttaattatccaataatttctttgagtaaatatcgttgcaatatatacttcttaagtctattaaattaatgtatgatattaaaaaatgtcctaaccttatgttatgatttcatgagtaaaataaactaaaacctccattgggcttttgttaatgcctaaatatctaaatttaactggaaaaaatggtatcagtatttttaataattgtatttaataccaattggagtacaagttcttacatatttttgttttagcatttttacagcttaacttacaaaaatgtttataaactaaattaagtnnnnnnnnnnnnnnttaattgtcnnnngnnnnnnnnnnnnnnccatgagcaaaaaagacaactaaaa

SEQ ID NO: 1600 - DNA, 1960 bp, Macaca Fascicularis
agtagctgatggtatggtgggaggagtggagtgcagctcttgctttgtgactaaggaaatctatttgtttctagtattattggattcttggggaagattttgtagtcctccccttgaaaggcaaaggggctagttgtgccatttgccctcctgaagaaggaactgggactgtaccagtttgccacggatatcatcgtaatgatccgagtgtgtaaaatgtttcgccaaggcctcaggggattccgggaatatcaaatcattgagagtgctcactggaagcaccctatcttctccttctgggataaaaagatacaaagccgagtcacatttgataccatggacttcattgcagaggagggtcactttcctccaaaggccattcagatcatgcagaagaagccttcctggagaacagaggatgagatccagaccgtctgtaacatcttgcaggttctggatagctatcggaactacgcggagccccttcagctgctcctggccaaagtcatgcgctttgaacggtttggtcgcaggcgtgtgatcatcaagaaggggcagaagggcaacagcttttatttcatctacctgggcacagttgcaataaccaacgacgaggatggcagcagtgccttcctagatccccacccgaaattgctgcagaagggtagctgttttggggaaacggacattctgcatgcttcattgaggaggtccaccatcgtctgtatggaagaaacagagttcctggttgttgacagggaggacttctttgctaataaactggaccaggaagttcagaaggatgctcaatatcggtttgaattttttaggaagatggatctgtttgcatcatggtctgatgagaagctctggcagcttgtaaacatgtcgaagatagagaggttctcgtatgggcagctgatctcaaaagactttggagagtcatccttcatcatgtttatcagcaagggcagctgtgaagtcctgcggctgttggaccttggtgcctccccttcctaccacagatgggtctggcagcacctggagctgatagatgacaggcctctgaagacccacctgagggaatactctcctatggaaagatttaaggaattccagatcaagtcatatcctctacaagactttagctccttgaaacttctgcatctcaaaaaagcctgggggttacaggggacgagcttcagcaggaagatcggaacctcaggagacactctccccaagatgctgggcccgaagatccaatccaggcctgttcagtcgatcaaatgtgccatgatcaataccaagtttggtgagctccccaaggaggctgcagtgggggcctacatgaaggtgcacactgtggagcagggagaaattttgggtcttcaccaggccttccttccagagggtgaatgcgacacacgacccttgatcctgatgagcctgggaaatgagttgatacggataaggaaggaaatattttatgaactgattgacaatgatgacgagatgataaaaaagttgttaaagctcaatattgcattccccagtgatgaagatatgtgccagaagttcctccaggagaacagctggaatatctttcggaaggacctgttgcggctgcttgtggagcctcgccaaagtccaccattccctccaatccggcccaagaagaaagagatctacaaccctaagtctgtggtcctggatttgtgcagcatcaacaagacgactaaacctcgttatcccatttttatggcaccccagaaatacctccccccattgaggattgtccaagccatcaaagcacctcggtacaaaatccaagaactcttgcctcagtataagagtgcaggggtccttatttaggacaaataaaggatggtggattggcaaaaaaaaaaaaaaaaaaaaaaaaaaaaaaaaaaaaaaaaaaaaaaaaaaaaaaaaaaaaaaa

SEQ ID NO: 1601 - DNA, 717 bp, Macaca Fascicularis
  misc_feature (1)...(717): n = A,T,C or G
cgagcagaaaacnnnnnnnggaannnnnnnnnnnnnnnnnnnnnnngttggggtgtggtcagacatctggccaggtccatctcttactggctcctggtcaacccccagggagnnnnnnnnnnnnnnnnggaaccacgagggtgatgaggacgacagccacgtccgggcccagnnnnnnnnnnnnnnnnnnnnnnnnnnnnnggtgcccccctcccacatgtgggtctgtgtgtgtgcacctggcgtgggagcatccccgccttgtgttgggtcggtgccccatggaggagggaggtggggtgtcccgcacnnnnnnnnnnnncaactcttcacaggacaagtacatggcagacannnnnnnnnnnnnnnnnnnnnnnnncgagaagaggaaggtgagtgtctgtcacttgctgcggtgggtggcaggtgctggagcagtgnnnnnnnnnnnnnnnnnntcgtgtnnnnnnnnnnnnnnnnnnnntgacnnnnnnnnnnnnnnnnnnnnnnnnnnnnnnnnnnnnnnnnnnnnnnnnnnnnnnnnnnnnnncagtggcatcacctacgaccgcaaggacatcgnnnnnnnnnnnnaggtgaggctgcggctgggggagcagggccagcagcatggtcctgggcccactgactgccctctgcccttcttgtcactgcagcgcgtgggtcattttgancncgtgacccggnnnnnnctga

SEQ ID NO: 1602 - DNA, 760 bp, Macaca Fascicularis
  misc_feature (1)...(760): n = A,T,C or G
agcnnnnngacaaaatcannnnnnnnnnnnnnnnnagattgtgagacatgannnaaaagaacttcgagatttcgatctggatggagctccttatgggtatactccgttttgtgatagccgcagggaaatggatgggtatcgtttctggaaaacaggatactgggcatcacatcttttaagannnnnnnnnnnnatcagtgctttatatgtagtggatctcaagaagttcaggannnnnnnnnnnnnnnnnnnnnncaggggccagtaccaagctctcagccaagatccaaacagtctttcaaacctagatcaggatctccccaatgatatgatttaccnnnnnnnnnnnnnnnnnnnnnnnnnnnnnnnnctgtggtgtgaaacctggtgtgatgatgaatccaaacaaagagccaaaacaattgatctgtgcaataatcccaaaacaaaagaacccaaactaaaagctgctgccagaattgtnnnnnnnnnnnnngagtatgatgctgagataagacaactgttagatcatcttgaaaacaagaagcaagatacaattttgacacatgatgaactctagcactggtttatatgagaaggaannnnnnnnnnnnnnnnnnnnnnnnnnnnnnnnnngggaagtgtggagccccnnnnnnnnnnnnttggaagtctcatgaagatcagtgacatattctttaattttaaaaatttgtaattatttaaannnnggtatttaatgtattgaataagtttaagt

SEQ ID NO: 1603 - DNA, 2104 bp, Macaca Fascicularis
  misc_feature (1)...(2104): n = A,T,C or G
gagtatcataccatatatcgctagtctgggaaaagatcaaaattcaaagtacagtttctactgaatgcatatcacttttgtaccaccagaaagtcagaaaaattgtaagtcaagcctttgtcagttaggaagcatctatattgtcttacaaatctgtttagtaacagttctagggaggtaagtgtttctgtctccagagaagtaatcacagatttcccaagtaggaagcacaaactcaagacacttttatttttaaccattggtatagttgaggctttttgacaagctatattcatcctaaaaatagacatataactaccaaataaaaacctgtattgacagaataactatttttgggaaaaaaaaaaaaaaaaaaaaaaaacctgaactgtagcatatctgtatgttcttctacatgagtattttttagagctgggaactacaacccaattcatgacatcaactcagttttttaaaaaaaagatatgaggtactgcaatatgaaatttttgtgggttttggtttttttaagcaatttgtgttgtgtctaactacatttttttctttatgttctgtcttgggctcattgagcctcttagatttgtaggttaatattttttatcaaatttggaaaatgcttggccactatttattcaaaatttctgccccagtctgtctcctctgcttctgggactccagttatgtatgtaagaacactgaatgttgtccacaggtcatggaggctttgtactcccactccactcttctccctgtatccacatataaggtttttttttttccttcactgtacttcagttttgtttttcttgccctgacttgaaactcattgatcttttttatagttattgagtctactggtaagcccattcagtgaattttatttcaggcaagcgttttttggatctagactttcagtaatatatgtaatatacctgtatatacacatacatccatatatatataatttctgtttttctactgagctgttccatctgctcacttactgtgtttatcttttctcttaaatcctggaacgtatttataattgctgttttgaaattcttgtctgctgattttaacatctgtgtcacctctgggtctgtttttagtaatttgtttttaactggttatgggttcctatttcctggcttcttcagttgtttttgttattgtatattggacaatgtaatacaatgttgagagtctggattttatcctctttctttaaagagttaattacctggtatgtctacttaatcctttcaaggcttgtgtcaggttttagagtattcagcaaggtctttcctctggtagaaagccaaatttttcctggtacagtgggatctccagaaactcacagctctctgttagccgttttctgagataccttgcatactctggctttgctcttggtattcagccaaagacttaagaaaacctctttgcatatttttggagttcctcctttatagagctttcttatttttgggactgtgccctctaccttagcagcgccaaattaaaatccttgtcccttcacctgttgagactgttactttctctttgggctccattttcttgtatcctcgtttagaaagtgcccccaggcagaaagtcagggtaaatatggctcttatcaccatgtattttccttcttttaagaatcacagccttatggtgtctgtggtgcattgccttcaaacagttgctttagtttgtacacacacaaacatttagacatatatatgtattacatgtagatagttgtttatacagaagggtaagtccaatttctgttatttaaaaatggccaggcgtagtggctcacacctgtaatcccggcaccttgggagatttaggccggcagatcaactggggtcaggaactcctgaggtcaggaaacctcatgagatggtaaaaccccatccctactgaaaatacaaaaactagcaagcatggtggcacacannnnnnnnnnnnnnnnnnnnnnnnnnnnnnnnnnnnnnnnnnnnnnnnnnnnnnnnnnnnnnnnnnnnnnnnnnnnnnnnnnnnnnnnnnnnnnnnnnnnnnnnnnnntaagagt

SEQ ID NO: 1604 - DNA, 586 bp, Macaca Fascicularis
  misc_feature (1)...(586): n = A,T,C or G
caccgtcaccgcaccagtggcccaggcaggctttgtgggaccaacagggctaatcctgccccgcggatctaatccggatcgggacccggtcccaggggaggccctcacctccccttctattgttctggggctcaggtatcaagagaagaaaactggcaattgtatcaagagtgcgcatttattgggcataaagacgacctgggctgggcgcagtggctgactcctgtaatcccagcactttcggaggccaaggcgggcagatcacgaggtcagaagttcannnnnnnnnnnnnnnnnnnnnnnnnnnnnnnnnnnnnnnnnnnnnnnnnnnnnnnnnnnnnnnnnnnnnnnnnnnnnnnnnnnnnnnnnnnnnnnnnnnnnnnnnnnnnnnnnnnnnnnnnnnnnnnnnnnnnnnnnnnnnnnnnnnnnnnnnnnnnnnnnnnnnnnnnnnnnnnnnnnnnnnnnnnnnnnnnnnnnnnnnnnnnnnnnnnnnacactcatatctcaaacgagaaaatgcttgcaaataacctgaaaccgcggaacactattctttttaaaacgatgttttaagtaggtcgtgtaa

SEQ ID NO: 1605 - DNA, 3451 bp, Macaca Fascicularis
  misc_feature (1)...(3451): n = A,T,C or G
cttagcatgctcacaggcttgttgaatgctttatttatatcaggagtcataaattcaaatattggtacaaggaccaaacaggtgaagtaattgtgtgaagcaaagtggagaccaagcaaataaaatggcctggtgagggttaggggctgcagctcagttgtagtcagttgttgccataggagaatatgtgccctccccattgttaaaaataaatccaaactacaggctctttaatgagatcttccagattttaaatgtcacctcagctttctaaaatgaagattaaaaactgacccaaataaaacacacatgtccacatatgtttttcagggaagggtttttgtatctgttcactgctgtattcctaggctaccaaatgaattcagcctgtaggcctcaaatttgcaacttctgacttatacgtaaataaataataaatgtattctttttttctgttttgnnnnnnnnnnnnnnnnnnnnnnnnnnnnnnnnnnnnnnnnnnnnnnnnnnnnnnnnnnnnnnnnnnnnnnnnnnnnnnnnnnnnnnnnnnnnnnnnnnnnnnnnnnnnnnnnnnnnnnnnnnnnnnnnnnnnnnnnnnnnnnnnnnnnnnnnnnnnnnnnnnnnnnnnnnnnnnnnnnnnnnnnnnnnnnnnnnnnnnnnnnnnnnnnnnnnnnnnnnnnnnnnnnnnnnnnnnnnnnnnnnnnnnnnnnnnnnnnnnnnnnnnnnnnnnctcacctggccaagtgttgtattcttagtcatctggaaaaaaataatgtggtaatcttaaaggctgaaataaggcagtaagtgtttccctttgctgtcattttgtagaaatgtaattagaaagttaaatattatagcttaagtctgtgttttagttcaaggttcattgtgactcttgttaatatgctggttttccatttactagctccacattgtcattatattcaccatttgttttttattccctattaaactttcatgatgtttaaggggtgtcataatttttgtgatgacatttccagtgacattaggaccgcctaatggctggggaagttcatagactagaaggaatggaatttctttttaaatttgtaatggaattcccccaatcttaagacaacagtagattgtcattacaaacatgcattctggagttttttggtgtttttttttccacggtggcagttatattagctctgcatgcctttggaaagatgtataataaatatttaaaacacaggagctgataactatacccaagaataaattatgttttaaactaaaactgtggtatattcttgtctatatctagatctttaagaatactgtttacgagaattagttgtaatgaatttaagaagttgcatatagtaacttccctaacttttgaatgttaaagtgttagcctagtttcagacatatgtttcaaacttacatcttttcagtgtttcggcccttctgtgatttattgaatcagtaagatttcttaaagataatcaagttatgtatgggaaagcttatctttcccttattctgttctcattgctttagccttatgccagcctggaccattttggaggcactgtaggatcatggaagaactttgaattaggtgaattgcattctgtacttttctgtagttaacagttttgtaacctttgaccggttaataacctttttagacttgacttgggtgatctatgaagtggtggtaacaacctcacagagttgtgacaattttgaagtaagtacctagtaacagtgctccctagacattggcttaaagttagtcatcagctctatacagttgtgagtgcacctggtgatcacagacctactcaccccatgttctcaaaccagactactcttcttgttttctaattgcccctttttctgcttgtatccccctggaacctcacaattcttttctgaaattatacatgcccagaacatatacttaatatttatgctaaaccctttttctcacctctttgccagtgctttacatcattcattttctgaaattccactttccattttctctttccacaccaaccatgagagaagtgacaccattctttagccttggctaataggtttacttccttggctcactgctttaaaatcttaccttaggcatgcctgtttatttgttcagtgtgtgaactttggatctttttgttcaggatcagctatttcacatatcgagtactacaaagcagagattacataaatatgtatataaatggttctctatgacaccccccaagtaggtgataacatgattattataatgcatttgttatccttttctatttgctcctaggtttttagaacttcagccataaaaatgggcagaattttccttgatcatatcggtggtacccgtctattttcttgtgcaaactgtgatacgatcctgaccaaccgctcagaactcatctccactcgtttcacaggcgccactggcagagcgtttctttttaacaaggtagttaacctgcagtacagtgaagttcaagatcgggtcatgctcactggccgccacatggttcgagatgtgagctgcaaaactgcaatagcaaactgggatggatctatgagtttgccactgaagacagccagcgatataaggaaggccgcgtgatcctggaacgtgctctagttcgagagagtgagggctttgaggagcatgtaccatctgataactcttgaagatacagagagaaatccatcttttcccaggtctccttcactgaaaacaaaaatctacttacatacactgtcaccttagcatcagagtcggattaatgaactgcggaacaagaggttgtgagaatctaagatggaacctttctttcttttttttttttttttaattttgtattttccatccaacagcagtgtgtagagagaatattatgcagatgccgttaattttttaccctatgtttacatcttgaggcagaagagtctgcagctatgtggtgagctatgtaaggaaaaaaatctgggctgttagagtgaaaaagtgtgttttatgtaaattttgaaaggaaaatgttaggagtatggtttttaaacttgggcttcattttaaactttttcttttaaacccagttatctcacttgatttgttagctccagagaagagatccgaatctgtgcccagcgctaaaggctcagtgttagcatggcttgtgctggccggtgtgccatattcttgttggagatgaaccgtagcaccagagcccattcttccttgtcagtcttgacccgaagatgtcaccattcctagttatttgtcaccacataattggtgttgattggaaacttctgagatgggacagaactgctgggttgtctttttccatgtaacttaagcatagtaatataaataaagtaatagttggatgaaaaaaaaaaaaaaaaaaaaaaaaaa

SEQ ID NO: 1606 - DNA, 671 bp, Macaca Fascicularis
  misc_feature (1)...(671): n = A,T,C or G
gcnnnnnnnnnnnnnnnnnnnnnnnnnnnnnnnnnnnnnnnnnnnnnnnnnngctgcggtccatcttggtcaaggatacccaggccatgaaggagatgcacttccannnnnnnnnnnnnnnnnnnnnnnnnnnnnnnnnnnnnnnnnnnnnnnnnnnnnnnnnnnnnnnnnnnnnnnnnnnnnnnnnnnnnnnnnnnnnnnnnnnnnnnnnnnnnnnnnnnnnnnnnnnnnnnnnnnnnnnnnnnnnnnnnnnnnnnnnnnnnnnnnnnnnnnnnnnnnnnnnnnnnnnnnnnnnnnnnnnnnnnnnnnnnnnnnnnnnnnnnnnnnnnnnnnnnnnnnnnnnnnnnnnnnnnnnnnnnnnnnnnnnnnnnnnnnnnnnnnnnnnnnnnnnnnnnnnnnnnnnnnnnnnnnnnnnnnnnnnnnnccgaggccagcaaggtcgggccnnnnnnnnnnnnnnnnnnnnnnnnnnnnnnnnnccccgcctgnnnnnnnnnnnnnctttcagccatcgtcctttcctctgnnnnnnnnnnnnnnnnnnnnnnnnntcttgccaaataagggtctccnnnnnnnnnnnnnnnnnnnnnnnnnnnnnnggtggtcctaggacccgggagaggtttaggggtcctatctcctgggggaaggggagatttaagatgtcc

SEQ ID NO: 1607 - DNA, 1855 bp, Macaca Fascicularis
aatattgaaagaactgcagaaagtggaaaggcagttgcagatgaaaacacagcagcaatttaccaaagaatacttggaaaccaaaggtcagaaagacacagtgtctctacaccagcagtgctctcatagaggagtcttcccggaaggggaaggagatggtagtctcccagaggatcacttttcagagttacctcaggttgacacaatcttatttaaagataatgatgttgatgatgagcaacagtctccaccatcggcagaacagattgattttgtcccagtccagcctttatcatctccacagtgtaacttttccagtgacttaggttctaatgggacaaattctcttgaacttcagaaagtatcaggtaatcagcagatagtaggacagcctcagattgctattactggacatgatcaggggctgttagttcaagaaccagatggactaatggttgcaactccagctcagacgcttaccgacactcttgatgacctgatagcagctgtgagtaccagactgcccactggttccaacagttcttctcagaccacagagtgtcttacacctgaatcctgttcacagactacaagcaatgtggcttcccaatcaatgcctcctgtgtatccttcagttgacattgatgcacatactgagagcaatcatgacacagcattaacactagcttgtgcaggtggtcatgaagaacttggatctgtgctcattgcacgggatgccaaaattgaacatagagacaaaaaaggttttacaccactaatcctggcagcaacagcagggcatgttggagttgttgaaatccttttggataaaggtggagatatagaagcacagtccgaacgaactaaggatactccactctcattggcatgttctggtggacgtcaggaggtggtagacttgctgctggctcgaggtgcaaataaagaacataggaacgtatctgattatacaccactgagtctagctgcgtctggaggatatgttaatatcattaagattctgcttaatgctggggcagaaattaattcaaggactgggagtaaactaggtatttctcccctgatgttggctgcaatgaatggacatgttcctgcagtaaaattgctgcttgatatgggttcagacattaatgcccagatagagaccaatcggaacacggctctcaccctggcctgtttccagggccgagcagaagtagtgagtttgcttctggaccgaaaagccaatgttgaacatagggcaaagactggtcttacccccttgatggaagcagcttctggagggtatgcagaggttggaagagttcttcttgataaaggagcggatgttaatgctccccctgtgccttcctcaagagatactgctttaacaatagcagcagacaaaggtcactacaaattttgtgaactcctgattcatagaggagcccacattgacgttcgtaacaaaaagggaaatacaccactttggctggcatccaatggaggtcattttgatgttgtgcagttgctagtgcaagcaggtgctgatgtggatgcagcagataaccggaaaatcacaccccttatgtcagcatttcgcaagggtcatgtaaaagttgttcaatatttggtaaaggaagtgaatcagttcccttctgatatagaatgcatgagatacatagcaacaattacagataaggaactgttgaaaaaatgtcatcaatgtgttgaaaccattgtgaaggctaaagaccagcaagctgcagaagcaaataagaatgcaagtattcttttaaaggaacttgatctggaaaagtcaagagaagagagcagaaagcaggctcttgccgct

SEQ ID NO: 1608 - DNA, 718 bp, Macaca Fascicularis
  misc_feature (1)...(718): n = A,T,C or G
gacacagcccccaggaagnnnnnnnnnnnnnnnnnnnnnccgtgagccagctgcccctcttcggctataccgtctacgtagcgctgagagtgagcatgcaggccctgtcgggacccgctctcctggggctcaaccgccagcatctcatcctcatggaccccagctcccagaatctgtactgtcgcattgccctgaagagcctgcagcggctccacttgctaagcccactggaggagaaggggccccctggcctggaactcaactatggctcagctgacaacccccagaccatctggtttgagctgccacaggcccaggagctgctatacaccactgtcttcctgatagacagcagtgcctcttgcactgagtggcccagcgtcaactgagaggagtgtaggccagggagagacgagggtgaggcctcccctggcccaagtctcacccagatggtctgccttggatgctatcagaccactgttccagaacctgccacagcacagcccagccggcccacatgcaggccatgaggcagttggtgacgtcaccaacaggcaaagaaaacagccagagcccctccaggacggcctgggcccaaagagggctgcaggaactcgcctggggaatctgaggttgcccagtctgagggagacgcccaccggccccaggctccgcccaggccccacattagcacaatcccaggcatgggagaaacagc

SEQ ID NO: 1609 - DNA, 414 bp, Macaca Fascicularis
atgggtctcacctcccaactgcttccccctctgttcttcctgctagcatgtgccggcaactttgtccacggacacaagtgcgatatcaccttacaggagatcatcaaaactttgaacagcctcacagagcagaagaacacaactgagaaggaaaccttctgcagggctgcgactgtgctccggcagttctacagccaccatgagaaggacactcgctgcctgggtgcgactgcacagcagttccacaggcacaagcagctgatccgattcctgaaacggctcgacaggaacctctggggcctggcgggcttgaattcctgtcctgtgaaggaagccaaccagagtacgttggaaaacttcttggaaaggctaaagacgatcatgagagagaaatattcaaagtgttcgagctga

SEQ ID NO: 1610 - DNA, 747 bp, Macaca Fascicularis
  misc_feature (1)...(747): n = A,T,C or G
tgatgcagctgagacaggagagaanctacagcagttcctagattnntacgaggatgtgttgcccgagttcaagaacgtggggaaagtgattcagttcaaggnnnnnnnnnnnnnngagcctcacctgaggggcaatgtgtatgttcagtaccagtcggaagaagaatgccaagcagccctttctctgtttaacgggcgatggtatgcgggacgacagctgcagtgtgaattctgcccagtgacccggtggannnnnnnnnnnnnnnngttatttgaaatacaacagtgtccaagaggaaagcactgcaactttcttcatgtgttcagaaatcccaacaatgaattcnnnnnnnntaatagagacatctacttgtctccagatcggactggctcctcctttggtaagaactccgaaaggagggagaggatgggtcaccacgacgactactacagcaggctgcggggaaggagaaaccctagtccagaccactcctacaaaagaaatggggaatccgagaggaaaaggagtagtcacagggggaagaaatctcacaaacgcacgtcaaagagtcgggagaggcacaattcacgaagtagaggaagaaataaggaccgcagcagggaccgcagccgcggccggggcagccggagccggagccggagccgcaggagccgccgcagccggagccaaagttcctctaggtcccgaagtcgtggcaggaggaggtcgggtaataaagacagaac

SEQ ID NO: 1611 - DNA, 636 bp, Macaca Fascicularis
  misc_feature (1)...(636): n = A,T,C or G
gtnnnnnnnnnnnnnnnnngtttcagatagcccaggtggtnnnnnnnnnnnnnnnaatgctcagggagggatacaagacctnnntcaacacactctaccataacaacattcctcttttcannntttctgnnnnnnnnnnnnnnnnnnnnnnnnnnnnnnnnnnnnnnnngaaagttttccaccccnnnnnnnnnnnnnnntctaactacatggattttaatgaagatgtggaagagcggcgggagcgctacatggactctnnnnnnnnnnnnnnnnnnnnnnnnnnnnnnnnnnnnnnnnnnnaagggctgctgcagcacatcctgtgccagggggannnnnnnnnnnnncaaggccccnnnnnnnnnnnnnnnnnnnnngacatgcaggccgtggtgaggagtccgctcccccatggacacagagcagaggccagggtggcnnnnnnnnnnnnnnnccttccatacccctccgtcctcctttccctgagcaccttcatcaccagaggcttgaaggagccccgccatgtggcagggtacnnnnnnnnnnnnnnnnnnnnnnnnnnnnnnnnnnnnnnnnnnnnnnnnnnnnnnnnnnnnnnnngggatttttttcaacacttttaaaaatgggaag

SEQ ID NO: 1612 - DNA, 1494 bp, Macaca Fascicularis
aaaaaaaaaaaagtcgcggcggcgcgggcgctggggagaggagggaggcggggtgcagagatgcagcctggcaccgggcccattacccaccaccctgactgagtctccagggccagatgacgtgagaaatcattggcttcagccatagctaccccggcacccaacggggctcctcttattctgactctgtgacagagtgggagcacccaacacacaacagctcaccaaccagaggaatctgctattcacagcacactcagaatgctgccgttcagccttcacttgtgggatgaggtgccgtgcgctggcctcattttacagatgggcaaactgaggctgtgactccatagctggtaggtggtgtctcaggcatgctgtccatggaggagatggccgccccacttgtccccagccagccaggtttgacagtttctgttgtgtgttcccataacttctaccccttgccacaagaaaggaagccattccctaagtggaactgaaactgcttttttgctctcagctcttctgcctcattcacctgcttgtccagaatttgctggcaactttgggaatacaggctttccttcattctcagcctttaccaagcaggtctaagtcagaccctcgacgccagtccccactttcccccagcactcacacacccagggatgtctggggagaggactcccgtgtggtcaagccccgccggttctcccattctggggtacagaagtgcccataaacacaccgctgtccttgcctgcatctctgagtgccctcaaatcccctgaggcagagctgggccttggccttggggcacagcagctctctgaagaccagatgggccccatcagggtgcagcatgcagacccaaggaagcatccaggctccactctgatgccaaatagcctggtggctgccatgcgccccagagaagaggggcggctgagatgtggtcgaatctgggattcagtcgaggggacctgggtttgaggccagctctgctgtgcaccgcgtgaccttcactgcatctcaaaggttcccgacggctccacttcctcaaccataagactggggtcagcaatacctggtccacccatcctcaggacgagtgtgcagccgactagaggaacgatgtgaaccagccttctaaacaccatgacgctataaacgtgagttatcagtggggacagactctggctggtctggaaggggagctggggtcccggacatttatttctagaacaggagccctcggagccgggacccaggagcctggcgttccggagcgagtgaggctgctgccggcatctcggggactctgtctccacctagtgggcgctgactgcaggtgcttctgctgctaaggccgcccagaaagcaactggggttgcacatccctttaaaagctgcattggggcagggcgcggtggctcacgcctggctttgggaggtcgaggcgggcggatcaggaggtcagaagatcgagacagt

SEQ ID NO: 1613 - DNA, 743 bp, Macaca Fascicularis
  misc_feature (1)...(743): n = A,T,C or G
ttctgtagttatatttntccaccctttctcgaattttatatgggaaatacgaagttgcaagtcgaagtgaaaaacctttgtgtaaacaggtgagtggagaagacgacctgacttctctagataactaagatctaataaagagagaaatcttaattaaaataaagataccgagcacatgttgttgcattagtttaaaaagataataataaaaagaaattaagtctcgatgtaaataattgttttgttgttttgtttcagtgattaatccaaattttgaccaggctttaagttttgaaataagaaagtgaattattttaaagaagaagaaaaatttgcttcattttaatgtgtacactatttttgcccttaaaacctttacaatatacttatacacacacactcagcttgcaaaccctcctttagaaaataacccactctgagtagaagtaatcagatatggtagcagcatgggcaaagtcnnnnnnnnnnnnnnnnnnattaaaaatgagtttttcagtatggaaaatcaattaccaaatgaaacagagatttttgttaaaggttcaaacctttttaaatttttatgttatagggtttatattgattaaaataaatgtacgtttgtagttattcaacattatgaatttcaagattgnnnnnnnnnnnnnnnnnnnnnnnnnnnnnatgaagtctgttgttgcatatatcaatgnnnnnnnnnnnnnnnnnnnnnattaactatg

SEQ ID NO: 1614 - DNA, 771 bp, Macaca Fascicularis
  misc_feature (1)...(771): n = A,T,C or G
cccagatagaggtcaccagtgagtgggcaggcagctttgatcccatnnnnggcaaggagccagnnnnnnnngtnnnnnngcaggggcaaaatcccaccnnnnncagtcctttgggggccgaagtctgtctctctagcatagccaggcctnnnnnnnnnnnnnnngatgaaaaggatgcaggcccaagccttgaacccccaaagagctctcccaacctagcagcccctgcagaatgtgtgtgtgcactgcctcctcagctccggggtcccttgacccagactctgggggtcctggctgggctagtggtggtccctgtggctctgaacagtggtgtgtccctcctggnnnnnnnnnnnnnnnnnnnnnnnnnnnnnnnnnnnnnnnnnnnnnnnnnnnnnnnnnnnnnnnnnnnnnnnnnnnnnnnnnnnnnnnnnnnnnnnnnnnnnnnnnnnnnnnnnnnnnnnnnnnnntctactgaaagagaggccttcccatccccaagctctccagttaacacagggctccctgtggtgaccccagtggagacgaggggatgggtagatggtgtgagtgaggggaacttttagagtgaaactgggcatgtcctccccctaccccctgagcctgtatttatttttgtataattctctggacgagggagagtggtcgtgagctggtcttggggcacaattacccagagatatatttattaacagccaacctgtgcaacatgctggagctttatttttaatttaatttatatagagtacc

SEQ ID NO: 1615 - DNA, 1954 bp, Macaca Fascicularis
cttgcagccagccccgggtccaaggggcactcctgggagtgcagaggaggatttgtgacagcctagaggaaatggtggctttgaaaaggtttgtgagccgctcctggtcccctgctgctccgtgagaaatcaaacttctggcaatgacgaaccatgaaggcagcatctaagggagagttagtgacataattacacggccagttcttggagatactaggaagccaagagtttcctccaagaatggagattccttggaagtgaggttcaccttgagtcaagaaagatgaatcacacatggtcaaaggccattgcccagggtctcaagagtagccagaaagaagagctgaagctggtgggattatgggggtcctctctcccacctgaaaagctactgctgcctgctgaccatctcaagaggagacctctctgggctccagcacctaaaacagataaacctgggaggatgcttctctcctctgtgtcacacatgtcccggagaaaacctgtgtatctaaatgaccaaagaaaactgtgagaaaaagtgcaaaatttgtgccaggccattcagtgtctggctgggggtctgtggtgcacatgtattccaagaagactggagagtgctaagcctgtgggaaattccctcagacctgcctctcacacctggagtatgactgcccatccaggttcatgatgcagaactgtctttaaaaggtgactgcggatatagagagagggatttctaaccctgatagaacacgaccagctgttgcactggggaaagctgcatccacccgtgacatgctgctcaaactggctcacactctactacctaaggaataagccccacatttgctctttgtgggtgaaaggagagggtgagagaggagaggagtgtccgcacagacatgaggagcctgcagatccagatgaccccttgctgatcagaatatgaaagattgatttgtgaaaacaatgaccctgtagcagataagcttctagagcaggcttcaaccatgcgtcatccagacccactggcggagaagtctgcccccactctatgttgatggtgtgggggataccattactgagacagatttaaaaaataatctacctgttggtgagatctggacggtcactgttttgcagagacaacagcgtgctctcatcagctttccacagggcaggctgcggaaatggccactgagaagtccttctgtaaattcattgtccttgactgcagacttaccatcaaatggaagaagattccaagctcttaaagaaaaggaaaaagagaaggatggaaccgtagactctgggatcctgccagagcctatttcagtgctgccaggagctcctcgtccccctgcagctctggtccccaccttggagcctccttccaaggagtgagattacctttctctggcaacagacaacttttctgactttttctatccttggcacctgctgaggagagcagacccacggacccgggccattcttgccctgcttcttgattgtgtgacttgaaggcattcttgtgtggtagaagcagggcaccaggaccatctgatcgatggtctctggcctctgccccactgatggtcagatggtggccactcaggatgtgcgagcccaaccgtcactgcttccttgagttgaagaggttggaggctggtccacctgctcctatcccaccctcggtgatgtggatggttgctttttgagcctggtaacgtcactgccttggccctcccaggcatttcctgccttggctggggggcttgcctacccacacactactttaaggggcttgcccttccttgggccaaattctaattttggccagtgccccaggaagctcagtcccctgaaaaaaaaaaaaaaaaaaaaaaaaaaaaaaaaaaaaaaaaaaaaaaaaaaaaaaaaaaaaaaaaaaaaaaaaaaaaaaaaaaaa

SEQ ID NO: 1616 - DNA, 874 bp, Macaca Fascicularis
  misc_feature (1)...(874): n = A,T,C or G
tgtagaaatgactgcagcattaaagctaagaggaacacttcaacgtatgtggtacaaatttgnnnnnnnnnnntaattaaaccacagattttccactctnnnnnnnnnnnnnnnnnnnggtggctaaaaggaacactttttgtgtgattattataaactttacgttgtatttgaatcctagaacttttgtacacactaaatattgatgtcacaccatttctaaactgagcatccctagccagagaatgttcattatacttcctaagtgagcaataatttaaatcagatgctattttattttaatataattgacctttctttacatttcttatgtgttcacctctaatctgttttaggaagaggattggttattatgttgatcccagaatataaatcatatcctttatatttgagaatatctcaaatgtattccttttctgtatggtgggtttccctagggacatgtagctttttctaagctaaggaaaaagataatttttcttttcagcttacagattcccgatatctacaaaagatgtgaaagcactaaaaataccatttttaagcagtacttcacctgttttttgtttagcaaacnnnnnnnnnnnnnnnnaaggtttgttatatgtgccacaagatagcatataaatattacaccatcattccttctcttgttaaaggtagaagaataaaattaccatttttataatctatgctcatattactcaaatggtcttcaacatctttttaaataacacgtattttttgaatgttcagtttctattttgcttgaggtattttgtacatatgtgccttgtgattgctgctgctttaaaggataaagtactctttgggggatgagtctggtttgttt

SEQ ID NO: 1617 - DNA, 729 bp, Macaca Fascicularis
  misc_feature (1)...(729): n = A,T,C or G
accagtgggaacaggatngtcannnnnnnnnnnnnnntcagagagccnggaggcccaaagtggctggagaaagtaaaggaaaaatcctggnntgagctcggggtcacagagtggggcccaggggagttcctactgagggcagggccttgccaggcttcagtctccatccagtgccaaaggagggaggcccagnnnnnnnnnnnnnnnnnnngagggcagaagggagaggcttaaacccaagtcacacatccagcaatggagtccgactgcccagcaccgtctagggagtgaggagcgcctctgcctggctgtcagccaaccatctgggaagtgaggattgcctgggtccatccaccgccaannnnnnnngaaatgaggagcgcctctgccgggccgccaactgtctgggaaatgaggagcgcctctgcccggccaccaactgtctgggaagtgaggagcgcctctgcccggccaccaactgtctgggaaatgaggagcgcctctgcccggccaccaactgtctgggaaatgaggagcgcctctgcccggccgccaactgtctgggaaatgaggagcgcctctgcccggctgctgccccactgtctgggaagtgaggagcgcctctgcccggacactgccctgtctgggaagtgaggagcgcctctgcccggccgctgtgcaaccttccaactgtgaagtgacagccttgtatgtgatcttttctgtctt

SEQ ID NO: 1618 - DNA, 371 bp, Macaca Fascicularis
  misc_feature (1)...(371): n = A,T,C or G
acttccccatcccacccccccagagtactccccactgtgaaaagagctggaaactgaaccagttagaatgaacctggctccctgagcacccctgtatccttcaaataggccctgagatgtgaggtctgctgcttcactggggcctgatgacttcggctgggggagggggcctagggccccttctcattgaaagcnnnnnnnnnnnnnnnnnnnnnnnnnnnnnnnaggctgtcactttggnnnnnnnnnnnnnnnnngaacaattcaagtccctgtgtccnnnnnnnnnnnnnnnnnnnnnnnnnnnnnnnnnnagcccaggagaggggatgaggcattgtcaccctagacccctcttcctctctccccca

SEQ ID NO: 1619 - DNA, 2002 bp, Macaca Fascicularis
caaaattaaaatgattttatttccttttacataagatacctgtctcagaatttatcagtgacagaatatacagtattaatataagaaattaggagaatttgaatttcagaaatcccatctttaatcaaagtaggtttcatcttatgagttacttcacaacagtcccatactttacatataaagaagcataatgcactgtattcctccttccctttttatcagatctaccataatcttggtagtctcttacagctttggctctagccttccatttggccatattctgtctgtattttcacaggtcataatttcttatgttcatccttttttattacagattttcatagatattgtcttctgtaattgtaaatgatttacaattaaaatatccagaacaaatgccttctgtctctcctactgatgagtagatttagtcctagtttcctttggcattaaagaatatttagaggacgttatgctgagcaaaaaaagctagacattaaaaattgaatactgtatgatactacttatatgaagttatagaataggcaaaactaagatgaaaaaaagacaggacagtggttttcttggcattgacttgggctggattgggaagacatgagggaaccatctgagtagatggaaatgttctgtatcatatatccatttgtcaaaatcatacagctaagatttatattttaatgcatataaattataccacaaaaatatcctataaataataatagagtatcaaggtaggtagtgagtgctgataaaaagggcacatgttaattgttgaagttcagaggtatgtatgtggggtattttatactattttttgatttgtttgaaattttccataagacagggttttctgttttaattgttttgtattagaaaattatacatcttgttttaaatagctgttaattttatttgtcaatatatgttaagtagaaacagtagaaatgaaacgcgtctttctcccagcactagcatcaaataattactaggcagttaagcttttggtatttctcttatatgtgatttgcagcagattaagaagttgagacattaagcatggaaactcactttgaaataagaaagcatagaagaatataatggaaattacgtaaataattagcagtctgtaatttaataagtcaataatttattgccaacaaaccatcattttcattttaccagtttttatcgctaaccaagcagctctttcataagaagattatgccttacagatgggggataggaatggaggagggaaggggaaagggtagagtctataaaggagagttgggtataatttcttaaaattacaatctgacttaagaaatatttttcagtgctcagagtcatctacagatgtgcaccgctatcaaaaatacttccttctgcagttctcttccacccttacctattgaatgtagtgaattagatggagatctcaattcattacctataatctttgaagataggtatttagattcagttactgaaggtaagtgtaatctaactaaaatatacaagctatgtgtatagttttcagtatattcttcctaatatacataaaatcattccctaatatggaataattttttccctctctggttttatttatgtttgaggatattagaaagttatagttagaaaaagaatcatatgagttttcacactttgttttaaacctgaatctttttttctttggataaaagacttagatgcaccctggatgggaattcagaatcttcagagatcagagtccagtaaaatggataaatatgagactgaagaaagctctgtagcaggactttctagcccagagttgaaagtcagacctgctggtgcctccagtatttggtatacagaaggtgaaaagcagctaacaaaatctctaaaaggaaagaatgaagaatcaaataaatccaaggttaaggttactaagcttatgaaaacaatgaaatctgaaaaaaaaaaaaaaaaaaaa

SEQ ID NO: 1620 - DNA, 661 bp, Macaca Fascicularis
aacctgaattgacattcctttgtatacccttataagtgacaaataagattaataagatttttcaaaatcgccaggaatggtgaatataaatgatgattgaactggaatattattggggaccaaatcaaatgaatgattaaattatgaagctcatacccttttgaaggtagttgcaaagagacatttcaaaactgccctaggccattgtagcatccttagatgggacacataatcattaccttaaagcaccaccactcattttgaccatatagattttattatgttagtttaaaaggtcaatcagtctcatgactttatagttatgttttgtatttaaaaacattttttaaacatttggatatgttgataaaccataaaacatttgattaataaaatatctattttaataaattgggaacttctgtcctttcaaatagttattggcaagttttaaacccaaaatatatacacataattttgtaataaaactgtgtgacttctaacaagtaatatgtgacttccttatttctgaacagtactggttactttcaaaatgaatttttattgagattttccattaagtatttttttcaaagactcaaattttgtaccaagtaaatccagcttttatatacaaacatgttgtttgttttatttgggg

SEQ ID NO: 1621 - DNA, 2476 bp, Macaca Fascicularis
tccaactctccgacccccagtctgcccccacgggggtctccccaccactcccccgtcccacagcctaaacccctcttcgccctgaacctcccttttcctcatgtggtgaatgggcactggccccgctcagactcccaggagcaccagagctggccctgagccaagtcctgctccaccaggacctggggacacaggtgactcagacctgactcaggaaggctcaggtcctgctggcatccgcggaggtggtgagaagcccggggatcccatccagtcagtcaacagacgactgagcctctaagctggtgccgcgtggggagaggggcaggaggccgtcagcgaaaccaggaggagccccaccagcatgggcagcctggcccagagagaagatctccaagatgattcggataagaactcagcattcacctgggaggtccaggccaacaaccgcacctacaacgcgcagttcaaggagaaggtgttcctgtgctggcagaagaagaaatacaagaccaacgtcatccgcacggccaagtacaacttcttctcgttcctgccgctgaacctgtacgagcagctccaccgggtgtccaacctgtacttcctcctcatcatcatcctgcagagcattcccgacatctccacgctgccctggttctcgctcggcgcccccatggtctgcctcctcttcatccgtgccacccgggacctggtggacgacatcgggagacacaagagtgacagaaccgtcaacaacagaccctgccagattctaatggggaagagcttcaagcggaagaaatggcagaatctgtgcgtgggggatgtggtctgtctccacaaggacaacattgtcccggctgacatgctcttgctggccagcacggagcccagcagcctgtgctacgtggagacggtggacattgacggggagaccaacttgaagttcagacaggccctgatggtcacccacaaagaactgacctctgtaaagaagatggcgtcctttcaaggcacggtgacgtgtgaggcgcccaacagccggttgcaccacttcgtggggtgcctggaatggaatgacaagaaatactccctggacattggcaacctcctcctccgaggctgcaggattcgcaacacagacacctgctatggaatggtcatttatgctggttttgacacaaaaattatgaagaactgtggcaagatccatttgaagagaaccaagctagacgtcctgatgaacaagctggtggttgtgatcttcatctccgtggaggagggcccgagcgaggagattttcgccgtggagcccttgcctcatttataccgcgagtctcgcacccggcgttccagctatgccttctcccaccgtgagggctacgcagacctcatcactcagggcacaattctgcggaggggaccaggggtcagcagtgtcatagcatctgaatccatagacccatctgatgaagaggcattttcaagcccaaaggagtcgcactggcatctcaggaagatgtccttcctggggaagaagaagcgccagtcacaggggcagatgtccttcctggaagcacagcacttccctacaagtagctcatcattttctatggatagacaatctgctctttattcagaaaaccaacttgccctccccagatatgtgcttaccggcacccacaggctctctgggtctttccaggagcaattgccaagggtacaggagaggccactgtcacccaagcagaggccatcttctcctgagaagttgccgttgaccaaggagaggtcatattctcatctggagaaaccgccgttgcatagagaaagccagctgtcatcttctgagagccagccacagcctccggggagccagtcattgctttcaggccagctgacattggagagccagccagactcctcagaggagaagtcagcattttcgaagccctccgcaccattatggaagagctggcaaaaggagcccctcacccccaaggaggggatggtgccacttccagacaagacccacgaatctcaggtggagactctgccaccaagtctggcggaatcgtccacgtccacgagcgagcagcctatggaggtggagccctggcctgtggagaagcagtcatcatcatccatggagtggctgctggtgcccggggaggagcagccatccttgcccccagaggagcagtcattgccctctgcgggggggaccaggggtcagcagtgacatagcatctgaatccctagacccatctgatgaagagagatcttcgagcccaaaggagtcacactggcatctcaggaagatgtccttcctggggaggatgaagcgccagccagttctgctgcaagtcacccagcatgcaggggcctccctctaaagacaggggctccacatgcttttctttttctaataaaccagggaccatctgaccccagcgctaaaaaaaaaaaaaaaaaa

SEQ ID NO: 1622 - DNA, 806 bp, Macaca Fascicularis
  misc_feature (1)...(806): n = A,T,C or G
catccagagacataaccaaactgaatatcaccccatattgatttncggaattgactctcaaactctgtgcagaatcttgtgttgggattatatcttgacattcctgtcatgttatttttcttaactggagtgtgtgctgcctttcaggtacaatttttgtgtaataaaannnnnnnnnnnnnnnttatatagactactttctatgcaagactgagatatggaatggatagcaagagatnnnnnnnnnnnnnnnnnnnnnnnnnaagtgtgttttcggatggagtaccagcaccgaaaatgggttgagggaggatgagttgtatatatgtttctgcccactaattttgagcagccatattatgaattaaatcatcacagccaagtaataacccaagaatggtattagtttcatgtgtaatagctcaaatggaataagcatgaatnnnnnnnnnnnnnnnnnnnnncaaatattctatgtcacttctcatttaaaggctcttgttacgaactattagaaactttagnnnnnnnnnnnnnnnnttgtggcaaaataaaggcctattctactcttatttaaagtgaaacactgtatacttgtttctctccaaagtgaaattaggtatttataatttcaattgcctcgataagtnnnnnnnnnnnnnnnnnnnnnnnnnnnnnnnnntatattgttgcacaattttaagataatttttgtctcaatgtcaacttttnnnnnnnnnnnnnnnnnnnnnnnnnnnnagaaaacacctatttgaaaatccactgtctctgtgtgtctgagttgt

SEQ ID NO: 1623 - DNA, 2491 bp, Macaca Fascicularis
tttctttcacctgacttattctctcgtgtaaagatatgtttattttttgccttcagagggtcagacgaccagttgcctgccgttttgtcttcttctaagatgtgtgttgggttgttttgctttcctttgcatctttattaagatgtctttcatgtgtatatgcctctgccatagaatactcagtcttgtggtcaagagagttctcaagtgacaaccattggggttccttcataaagatcttgatatgatcaagatggaaagagacaagcataaacaatgtgccctgtttgactaagtcaaatgaaatggggtggttttttgtttctgttcctaattcctttaaaaaaaaatagggggaatagtattttagaattttatgcagaatttaattctctttttacggttaagattttaagattttcttacttgcacataaaaaataatttgggttcttaaacttaatttctggcctgtgactagaatgtttaaaaaaaaaaaagtcggactaaatgttaattactgaaacattaacttaatttctaaaaccatggtgctatcatttattaatctgtaatgtcttcatacaaaatgcagctcctgggctgggttttgggggaaaaaaaattgtgttctgtcctggtctggagtccattgctgcagtctccttggttagttaagacaaagccctcattaacgtttgctgcaggacttaaaattttttacctcccaactaacaaacatagcctcacattaaatttaatgggtcagtaaagccctttttaaaggggctgctgggaaactcaatcaaactgatttgaggagcagtttaggtacatactgccttttgtttagctttttgttttccttactcagtctaactgaggctaattttgcaacttcaataacacttcagagtaaaagaaggaaaatatttaacatgtttttggtttttttcatttcttgcttaaaaaaaggaaggttgtattttgggggactgatttgatttgatggaatttctttccctttggttcttatttctgggttgaaaccaataagttttaaaactaaagaatgggttaataagcttcagacagataactgcaactgaaaactgcacattaagtaaaaaaaaaaaaaaagaaaaaaaagaaaaaaaaagaaaaagaaaaagaaaaaaaaatcctattttgtcctttgtcttatctgtgctctatctctagtccggagtggtacagtcccattcctgcagtcctagtgaatccagtgattcttgggggttagtgggttttgtgtggtggccttcctctgtaatgtcaccctatgctgcttctactgtctgtgaatcttccgttttaccttttaaaattcctgctgctgctttgctggtgtatattctccctacctctcctctctttccctccctttcccatctccccctctccctcctcttcagtccttccccatccccaaaatctgtttcattctcagagataaaaagactcttaactagctcaaggttaatggagccatttttcccacaacggaattctgggtatgactctctcttctggagtgcaacacaaagcactgaagaataatgctcagatatattaaataaattgatgccatatagcctcagttgttaacattcccagagtcccttgtgctctacctataaagcagtgggtgcttttctttggtttcctttcaggttggctgatggagcaatatataaagcaattaccagtgagacagaaaattctttcaaaggtcaaccaacatttttaagaaacaaaataggaggggataatggaatctagaattgtcatatatatttgtttacttgtgcaatgctaatatagtaactcggctgtcctttgaatatcactgtgttgagtaggttcctctaggacctttgatttcatgagctgggcccaaaccacagtgggataataacaaaaagaagttaaatgccgcaaattttaatagtgagcttacttgaaggatttaagtaggtttagaaggtgaagaaagccaacggagaaatttacagattacttttggaagctctactctagctatcgaacaatcaaaggaatgcacctatcagccacaaagaacagctagacagctgttttttttttcttttataaatgtttctgtgttgtgtcaaaatgatttctggtgatttaaactaacagataatcacagctgctgtctaaatccatagtgttgaaaattacaaaatgaaaaaaaaaaaaaacacttcattacctgtgaagactgtgtctgtgtttttaactatttcttgtacaaatatatgaaaacttttatgaggagactggtgccaagtagctgaataatggggaaagggatattctgttcgtaaaaaccttagcagtgttaccaactctacgatatatatataaaaaaataattaaaacgttacaaagcgacaaaaaaaaaaaaaaaaaaaaaaaaaaaaaaaaaa

SEQ ID NO: 1624 - DNA, 725 bp, Macaca Fascicularis
cagactgaatagcaaagccaaaagaaaagtatcctcaaagtaaccttggaaataaaagcatcgggaaggagcagagggagagggggacgtccgctgaggagtggcgagaggccccggccgagtcgggtcgcgggcgggcgggcggactgggagcagatcggggacccagccagcaaggccgccgagccaggcccggccgcgtacccaggctttgacggctgccattcagggtggacgatgcctaaagattccaccgctaatattttttttattaatatttttattttttatttctggactgactcagataaaggaatttagaaagactgagcaccagccgctgcacttctctggacttctctcctcaatccgttgccaactttgattgaatgggtgctgtggatgtgattatataatactgccatttccaagcagtgtttttggtaggttttaataaacagacttttcaaaagacggcaatatagaattgttagatccgttgttgatctaaaaatatttgctttatattttcattaaatgacttcttttaatattttattcagaatacttatgaactgctgcaaaacggtaatttatttttccccagatcttgtattacgtgtttttttcagacgagcacaaatcaaaatgaaatgaaaatatggacagttgttaggtaataagggtatcttttgatgtgatcatttgattgtaatttaatttga

SEQ ID NO: 1625 - DNA, 1938 bp, Macaca Fascicularis
atcggtagggtctgccgggtataaaggggccttcggaaccccaccaaagtcacagctagggagggcagcggggcgcaccaggctgaaggctcacgccacagggagggcagcaaggacatggggggaagcgccttaaaccagggggtcctggaaggggacgacgcccccggccagtccctgtacgagcggttaagtcagaggatgttggacatctcgggggaccggggcgtgctgaaggatgtcatccgagaaggagctggagacctggtggcgcctgatgcttcggtgctagtgaaatactctggatacctggaacacatggacagacccttcgattctaattactttaggaaaactcctcggctaatgaaacttggagagggtaaattcagagtgggagctggagaagaagggattgtttaggggcgagatgaagcagcctacctcaggctattaagactgctcaaagcgcggattctttgagttggctttgctgaggctgggttttggtaaaacagccatgttctctccccttgagacctgggcatttgggagatggcttaacgggcaaggtatctttgcactctgacttaactaaccactgggaatgtttctgtgttcattaagtaaaaatcgattgaatgcttgcttctcataatacatggtgaaaagagaagatgtactcagaagattagaacatctccaccgttaaggacctcacaatgtagtggaggagactgacctgcactcagctcacttgatattacactgtggggcatggagctgggtcttctgagcatgcggagaggagagctggccaggtttctgttcaaaccgaactacgcctatggaactttgggctgccctcccttaatccccccaaacaccactgtcctgttcgagattgagctgcttgacttcctagactctgctgagtcggacaagttttgtgctctctcagctgagcagcaagaccaatatccacttcagaaggtccttaaagtggcagctacagaacgggagtttggcaattaccttttccgccagaatcgtttctgtgatgccgaagtgagatataaaagggccttgttgcttctgcgccggcgatcagcaccctctgaagcgcagcacctggtggaggccgccaagcttcctgttctcctgaacctgtcctttacatacctgaagctagaccgacccaccatagccctgcgctatggagagcaggctttgatcattgaccaaaagaatgccaaggccctcttcaggtgtggacaggcttgtcttctcctgactgagtatcaaaaggcccgggattttctagttcgagcccagagggagcaacccttcaatcacgacatcaataacgagctgaagaaactggctagcgattacagggactacgtggataaagagaaagaaatgtggcaccgcatgttcgcgcgctgtggcgatggttctacagcaggagaaagctgaaggttcttcacctaccagcgaggggagagagctgtggttctgcatcattgggggagtggaagggagctccccagtgccaccgtggcagccaccttcctggagcagggcttggaatgccccgtggccgcatctctgacagacgcggctgaaatgtgttttcacaggtgctgttttctgttttccgtgttcataacacaggaggggagagcgtagctactgacaagtagaacactgctacttttttaaggcagtttcttgtttttttagacggaattagtctttggcttccctcccagtcccagccccccttccggctgcgagtgtccccgggtcgacaccaatagagattgctttgtgtattttgtagggttctctgttttgaagagagaattatgttacaaatgtttttgttgtcaataaataaaacacttccttgtccttgcaaaaaaaaaaaaaaag

SEQ ID NO: 1626 - DNA, 731 bp, Macaca Fascicularis
catgaggtacataaataacaagggcaagaatgtggaaaaattgaaaccctcatacattgctggtgagaatgtaaaatggtgtagccactttggaaaacaatttggcaatatttaaaaatgttaaacagttaccacatgaaaactgaagtccacacaaaaccttgtacatgaatgttcatagcagcatcactcataatagtcaaaaaatgcaaacaacccaaatgtcaactgatggataaaatgtagtatatccatataatggaatagtttttaatttgttttatttaatgaaatattcatcagcaataaaaaagaactagctgctgctgtctgctataatgtggaccttgagaacattgttaaatgaaagcagtcacaaatgactccatgttttgtgtttccatccatacgaaacgtctagaacagataaatctatagaggcagaaaacagattggtggctgcgaggggctgagggaatggaagtgggaaatgactgtttatgggtatagggtttcttttcgggatgataacattctcctaaaattagattgtggtattggttccacaacactgaaaaaccacctcaccttaaattggtgaattttatagtacatggattagatctcaacaaaaacttttattgaagaaaagatttatctggagatggagagtgatgatggttgcatagtatgaatatacttaatgtccttaaaaattaaggtgataaatc

SEQ ID NO: 1627 - DNA, 818 bp, Macaca Fascicularis
  misc_feature (1)...(818): n = A,T,C or G
gtagnnnnnnnnnnnnnnnnnnnnnnncgacttcgagaattgcccggccctgtaccagcgcacggcgttgcaggtagagctgctggaggagggggccccgggcgcggaggagccgccggcgcccactacggtgcagtgcttcgtgtacagcagggccaccttcccgccggagtgggctcagctcccgcactacgacagctacgactccgaggggccgcacgnnnnnnnnnnnnnccccagggagaacagataaggggggcaggcagggtgggcctacgcctgagagccctggggttccaagatgtgcccagcccatgcggggtgaaggccgaagcagaacagggccttttccaaggaatcagcgggagaaggaaccaaactttcagtggcagctgattttacaaataatgttgacacacaaatagcaaggtggttccctcccatctttccacctggtaggaaaaattcaggattttaatacccctaaatgacatttagagaacttatgttatgcctaattcttctgctcttcttccttgtgatttttgttnnnnnnnnnnnnnnnnnnnnnnnntatttaggatcaatgtaaagacttggtgttgcagctagattttagcagccctatnnnnnnnnnnnnnnnnnnnnnnnnnnnnnnaagctgatttcacacagctgggtagaatttgtaaagaaggtccacannnnnnnnnnnnnnnatatcagagtgcgtacagcaccattcttcataattttcagatcaagcttcatagcagatattaaagattatttaaatttgaagttgatgttttgggaaa

SEQ ID NO: 1628 - DNA, 614 bp, Macaca Fascicularis
  misc_feature (1)...(614): n = A,T,C or G
nnnnnnnnnnnnnnnnnnnnnnnnnnnnnnnnnnnnnnnnnnnnnnnnnnnnnnnnnnnnnnnnnnnnnnnnnnnnnnnnnnnnnnnnnnnnnnnnnnnnnnnnnnnnnnnnnnnnnnnnnnnnnnnnnnnnnnnnnnnnnnnnnnnnnnnnnnnnnnnnnnnnnnnnnnnnnnnnnnnnnnnnnnnnnnnnnnnnnnnnnnnnnnnnnnnnnnnnnnnnnnnnnggccggaacatattttaccaggttttcacatttggatttctggatacagtaagtagccagttactactttaacgtcagaaaaagatgtctttaatttttttatagtctgtagtagaaaacttacgaaagaaggtacttaaaaacgccagctgtatatttcctagaggaaaaactggcaaaggcgctcttcacaaagggtagacggtactttatacatcaaacccaacgatccggtctcacactttacattcagtttaaccataagtaaaacctcttgtcacaccgtcaccgttactccaattatggcaataacgacctccttctacggatgcggttgacagataagatctctaaactgctgctaatcaatcggtcctggctcaagaatt

SEQ ID NO: 1629 - DNA, 487 bp, Macaca Fascicularis
gtgcggttgtcaggagcaaccaaggaagcaaactaacagccttgctagagtctgaggactatccagggcctcactgccagccagccagccatgggccaggattattactctgtgctccagatcactcgcaattcagaggatgcccagatcaagcaggcgtaccgcagactcgcccttaagcaccacccgttgaagtcaaatgagccgtcttccacggcaaaccggaaaaggtgttccacgagttctttggtggaaacaaccccttcagtggcatgaaactcgtaggtggacacacaaaggctgctgcagaaaaacccagtatttccacgacagtgctcaccagctccagacagagccgtggagagatgcctgccgtcttcttcctgcctcccaagtagctcagggtttacctgatgaacagaattaaaagccagaacattaaaaaaaaaaaaaaaaaaaaaaaaaaaaaaaaaaaaaaaaaaaaaaa

SEQ ID NO: 1630 - DNA, 737 bp, Macaca Fascicularis
acagagtttatactaaaatattttgcagatgcagtaaatatgaaaaaatatttaattcaaaattgattctatgtaaatatcaaataatttacactagaataactaaggcactgacacttcagacattacactaaatcagtgttgaatataaaaacgaatccacaactaaaactgtttttgtatataactctaaaaggagattttctgaagcattgtaattacattgaaagtatacttgtttcctcaaaaaaaaaaattgaaaagtgaataatgatgtaatacagctttcaaatttctttatgctgttattttattcctattgtattcacatgtgaaaacgtgattattgctgcattagagatactacagattctttttttattgggtgttatgactttttctatagaagagtaaggacattaaaatgtaaggtgcctgatgaaaatgtcagtggagaggctctttgtagttaacttatattaagtaatgtataaggtgggggttcctatttgtataatcctagcctatgacttaatgttgacgctttgctttgtcttttggatggcctaacctacattaacatgttggcagaccattttaaaactttttttcaaaaattataatgaatcactttattaataaagataaggtgggggttcagagtaatagttttctacattatagtgagaaaaattatagttaaaagtattaaatgagaatattattttattgtactt

SEQ ID NO: 1631 - DNA, 1665 bp, Macaca Fascicularis
ggcataaaatataaaacaaaatgctaccatagagattctcaatttaggagcaggaggacatttgccccttttcccctattttgaggaatagtgcctgtcttggcctcctggcagatataactgtttcatctttgctcttcttaatcagttgctattcatggcaaatatccctttgtccaccagagctcactttatctcatagtgtagagtgttccagatagctgtgttcctttatgtctgatccttatcatcaatgtttgcttttcttatgtgagaacataaatgtggagggacaaaagactctttccactatggtctgtgtatatctcgtccagaaacctcatgttgtggtcctatttcctcagttctttataccactatttttatttttcttattataaattgtttcactctaaactttcataggctaaagtcagacctgccactctagtgctgtaaccaacatagacattttgtagaccagtgagcatagcaaggagtttgtatggaatagaaaaaagaacagggctgcccacctttccaatgagttgggctcaggattcagcttgtcctttgtcattaaacagttgtggctttagacaagtcagttaaattctcaaaatctcaactgtatttctgaagtaaagagattgcccccaaatttccagtgcttatatcagctctaaaagttcaaaatttcacactcactgtgtatgaacatcaatccataaatcatacaattttcccacaataggactaatttcatttctctttggattattgagttgaatggtgtatgttttatgcatatgcactcaataaatatacatcaaataactcctatgtgttgggcagtgttagacatttagaatgtgtcattcattcagtcaactaatgctagccccttttattgtcaggaattaaaaatacatagttcctgcctttacacaccccaaagtcaggtggagtggtaagaaggtaagaggaaaataaaagttgttcaaatagtcacacaaaggtaaaaatacaactcaagacaagtgcaacaaatgaaagtttggtggtgttctgagagactctcaaatgagaatttgataagtgcaaggagatgaggaaaaaatgtccagccctgagagctggtagtgccaatgaaaaggattggagctatttgaccgttattgaggaagaaagagtgacgggagttaatgattgcattattgagtaagagaaagaaatgcattaaggacaatttactagaataattgaatagctctcaaactttatgtacatgtatctcctaaaataatatgtttaagtttacatctaaaattctccatcatacatttagataattgcaaggtttcaacttctagcatatttttataggcattttcaaataaaatattttcagtctctctaaatgtatccagtataatctaaaagcctagctattttttactttaaaataacgaccgttagtcatagctattttttacttcaaagtggccattagtcatttttaaatgtgatgaagtttttaatttaatagtcacagactttatatcatttctctctctcccccaaacttgtgttccaatatattgcttcctggaaatcttttatgtatcatcctatcatacccctctgcaaaaaaaaaaaaaaaaa

SEQ ID NO: 1632 - DNA, 128 bp, Macaca Fascicularis
actacgttgatgagttggtggtgggggcgacagaagaaaggaggagttattgaagaacgtcatgatgacgtcgaagaagtagttgcagcagcgaagaaataaaccgccaaaaacctcctgtggcggca

SEQ ID NO: 1633 - DNA, 1561 bp, Macaca Fascicularis
tgttttgtggcactgtcctcgtaagtggccactggtgtgacagaaggcattgctaaactcaagtgagacaactgctattttgctgcggattgtcccggtgaaaagggaagccattgactgctcgtcttgttagaaagacaagacattgaatgaagttcaagacgttgaatgaagctggttgttgcccagagtagaagattcaggcacctacagcaactcacagcaactcctaactcttgggagggctccctcctattagccgtgaagctgcaaaccagcctctctgttttccccagatcttctttgcccctagttattagccccagcccagaggcaggcctcatggctaataaaccagctagtggacagctgggacctgtggctccttctccatgttggccttcccttgtgtctcttgtaggagtgccttatagtattgtctcatgcttctagtctagtctgtctgaaccacttgaagcctgcaggacccttcaagggatccaagcaaagcctggatccctttgcttcttccccactggctagtcttcacatagatgctcttggagcctgtgcattccgtgatgcatgtcagacctctcaccttgttcagcctggtgtgccttaacctcaggagtaaaggagtaaagggaatcatgtcggaaacacatcgttaaagtggaatggtagaaacattggcttcttagtgccgttagcacttttaccaggaaatagatgcaaccacgtaatgttttcactttgttttatgctgttcttaaatcgctcttttgtttatttgtttgtttgctttcattaaccaaactcgggaatgtcatgatgtcaccaaggccaatgggtagagaaataaaaaccagccatccagaattgaatctgtaaagtcagtgaacttaaccttttcaggttcaaaattacacaaacacaaggattttcttatccttcacctttcgaaggttttctttttattttgccacctgtttttcaaataagaagtgggaagcctcttagctaaattgtgataaaaatgtctcttcgtgtggcgtgagctatcaaattagctttgtgtgtccactgagctatcaaattagctttgtgtgtccactgagctatcaaattaggctttggctgctggaggcctaggttctagctttggtcacctatcagaatcttactgttacgctgggcatggtggcgtgtgcctacagtcccagctatttgggaggctgaggtgggtagatggcttgagcccaggagcctacacaatatggtgagacccatctcaaaaaaacaaacaaaaaaagaagtagaatcttaatgtgaagagctactagcctaccctagaagatatatattttaaatctgtttcttaggaatagtagctaaaagaaggaatggtcaaaggagggaaagtgactggccacagtggctcacgcctgtaatcccagctctttgggaggccagggtgggaggatcactggagcccaggagttcaagacaagtctgggcaagatagcgagaccccatctctttaaaaaaaaaaaaaaaa

SEQ ID NO: 1634 - DNA, 1841 bp, Macaca Fascicularis
  misc_feature (1)...(1841): n = A,T,C or G
atcagaccagatctttggacagacccttctctacatgagcgtccctgtctccatcctgatcctctaagcattagcaaaattaccttggattcagcactctggcccagaccctctgcattttccccagccttcatttcttatcaggcatagaagtactcttaaatgaacataaggaagaaaacacaactacggttttataggggctaaactgcagaacacagaaaggattctagaaggacaaatcttatttcatttagcttcttcttaaagctaagatacctgcaaatgcaaacctcaggttctgccctctgcagcacccaggcagagcctgactaggaaacttcagcgaggagaatgtaaaaggaaatgtagatacttataattgaagtatctttccccttgggtatttctttttttaatgaaaatttagtcaactgaatattttgattccccaaggaagactcctcagctgtcgattacgctgagcacacgggaacagctctaacagaagatgacgcccgctcttggctaatgatcaccttgcttggtatcagtgagagacaaggtctttgaggctggccccctttcagctgtgaattaagtattaggtacagagtacagctaaaaccattttgtgcgagcctgcaaaccaaatggttgctggatccaattttgtacaggtatatcaaataaatttaatttccccatttaaggtgcttgcttttaattctgggaccagcaatgcagaacagttttgcagattaaatttccattcccagaaagaagtagtcggggatagaacttctaaagcacgtgtaaccaaaaagcaaaaggtttacagtgcacgcagcaaaggtgggggcgtaaaaagatctagtgagcactagatggtatagaaaacttcaggtgcaagattacctttgtcacctcatttcaaaccagataatcaccttatttataaccaaagcagggtgggctttgatgccctgattgcagcagcgggattctgctatcatttgagatgcctggtgcttctctgtgttatgtgtggactgaagcttggctgcccaattctacaaccaccactagaaaatgtacctgaataaggtttaattctaagactaaactcaagggttcttagtagtaatcatagatcacttccctcaaaaagcctttcttgatttctacccctcacccactaccacttgaccactcctcctgtttctcactcatgaccccctatgcacatatctatgaccacaacgatatggagggctagtgttgccccaggattaagctgtgcaaccttgggcaagttacatctgtgcatcgtggtttttgcattttaaatgacagtagtaatagggtggtgaggagtgggtgtgaaggacttagaacactatagaacaaggtaactagtaaatatggcaggcctgtgtaggacagactctctttgactccctaggatttaccccagcacctagcatgtttcacagcttagaggaaaacatttattgactgacttttgatctccattttttggtgagacgtgnnnnnnnnnnnnnnnnnnnnnnnnnnnnnnnnnnnnnnnnnnnnnnnnnnnnnnnnnnnnnnnnnnnnnnngatcagcctggacaatatggcaagaaatactaaaaatttttttaagaagtaaaagaaattagccagacatggtggcaggaacctgtggtcctagttattcgggaggctgaatcgcttgaacatatgaggtggaggttgcagtgagacaagattgctctccagccttggtgacggagtgagaccttgcctcaaaaaaaaaaaaaaaaaaaaaaaaaaaa

SEQ ID NO: 1635 - DNA, 3890 bp, Macaca Fascicularis
  misc_feature (1)...(3890): n = A,T,C or G
gtcccctgctcaaccgttctgccttccttcgtgcacaatcaatctacttcctctgcttagctctttctactcccatcctaccctttcctccttcaagagagattaagctcatgaaatcaacaaatattaaacgagcggcagggaaaggggatctcttttgcggttgttcaaagcatcctgcccctgagtggcagctctcctctttcttggggcttttgtggggaagaggctaaacacttaatttttttttaagccatgaagttatcattaaaagttttgcctctacacaattgagtcttgttgaaatgtggcttggaacttactatgcaattttagaaaaagagctgaaggtcagggcatgcaaacatctcttatggtggctcctttgaaagggcagcttgccctgcatgaacatgtgcacccccatcctagccagtgcctgtcagaagcacttctgctctggctgcacacaggatcactagggaactttaaaaaggcactgatgccaggtccccacttcggccaatacaatcagagtctctcagggcggcactgggaggaggtgtttgtggtgtttcatggacacacacactgccagcccctgaaacttcaccacgcacacgaatgcccaggagccctgcaaagctacagaccctgacctagaagccgggtgaccctggagccactggtgctgctggtgtgaggaccacactgagcagggaggccctgggatgttgggatgggtgtgctgtgcccgctgccatatgccaactggattgaaggaacagaacagtacagacggttccatcttcctgggaagacagggaattacagatcgttttaagggaatcccaggactctagaagtctccttcatgggtttctctttctgtacctttcctgtgaatggtatatccacctgggtcccctcctgcatctttgtacactctctctggtgtaatttgcacccagggcttcagcaaccatctatgcactgagatctttctgttcttggggtggcattcctagggatttagtgccaggacacgcctgtgtgcgcattcactgggaaaagtctgcagaatctgcaccaggcgttcctggagggcgtgttcctccgtctacattcgtgatagaacaaccagttattatcactaggacaccagtgcctcatctacactatcagccacaggagttttactgttacaagcttgtccttttaggcgcattccctcatcctgaacctgctggcagcagctcctttaggggagcaaggtggctgcttgccccatcagtccttgggcagccagcgctcagctggatgcatgcaacggaagtcaccttctgcctccactcctgagcaggatgtgctctccccacatctcctgtttgcgctttcagcaatagatcattcacagctataggagggggaggcccccgggccttggctttttgtacctggaaggggatggtgaggcattccgctgccaggaatcgcttccttccctccagggagcagccccttgcattgttcattttctaaagcaaatacgtctcaggaagtggctctcctcttttttttttttttcctatgaagctcttttcttaaaagctccctttaactgcaaaagttcctctgttcatggaggaagaaaatcaggcttgctgggtgagaggacagaatagggcttgctgtaattctctcctggaggcaggctctctctggctctctgttcccccttccccatcccctgtgaaaccacttcaaggatggctcaagctgtgctgatccttgaggcgctgatcctaagctgtcagcatcttctccagagcctggaagtagaggccttgttgctttttggtataaaacttttgggttaaaaggtgccagctgcagaaacatatgttcaaggatgaaggtaagtctgtcttcacaaatgaccgatcttgaaaatggaccggcacctccgggcccaggtccccgcagaatcaggtgatgggtccccaaaacacaaatggtggcacaatgagaaatctggtggtgggcttgaacgaaatggcgtggatgctgggtggtctcttgctttcacctctgtggcaggcactgctgaggtgctgggtccctgggccttttcttggctctgagccatctggtcagggaatgggtaggaagctggcttacataaaacagccatgtccctgagaaggctgtgcgggccccagcaggcaggtgggctgacctgggagcagcgcctgcaaacctggcatttgcacaccatcctgtcacacagagccttgctgcagttcctgagcatggcggggatccccccacagctggcagccccatgtctgccctggctgcacacagattcactagggaattgttaaaaggcactgatgccagggccccacttcagccgatacaatcagagtctctcagggcagcactgggaggaggtgtttgtggtgtttcatgcacacacacactgtcagtgtcaggcagaagtgatggggtactgagaacagcagaatatctagaagtgagttcttcataactgtgggacacaaaagtcttccctcacagtgtggcccttgatcactactgctggaggagagagctgaggccctggaacactcgtccttacacagccagagtctagtgaaggccacagagccacagcccactgcctttatgcactgatccactccattttctcatttttagattgttttaacctttgaaagcacagatcccaatgcagatgagctcccaattcttggagttcacagacatttgatccgtgtttgaaaataccctaatccttgtgcagagttcccagaattccaagttttcctttcccaggcttgttcttggagctggcccatgacaccagctggactcttgaatgttcccgacccatcatggccacgctgcaaggcttctgattgtgcagacacaccatgcccctgcacagtgatcaaagtcaggctgccacatgcttctacactggacggtcaaagtcagaccccagggctcagcaaagcacctggcacagtggcagctgcagaatgagatctgcttgcctggatgccaaggctggagggcagtgagcttcctcctcagaggcagggggctgccacctttgcactaagaaggaattactgatttccaacatttgagaaaaggggagttgaccgcatggaactctgaataggttcatgcacgtggagcaaagccctttaggagaaaagcccgttttttgctgtctgcctgatactggatggttgagaaacaatcgtggtgggcggtcatgccgcacttgtgcaggccaaggacacaggaaggtttagccctggcctacagggagggtgggcaagcacagcaatcttgtcccgcaaaagaacatcagcggccgctgatgttgagacccacgggaaggttagagctctgggtcacatttgtggagagagacacagacagcgacagagacagagtaatccaggccatgtggcataagaacataaagtggccccccagcccggggcccctcccatggacctcgtggtactgagcctccgttttcttacctgttcagtggagatgaagcctcacctcccagagtttttataaagatcgggagactggccgggcaccannnnnnnnnnnnnnnnnnnnnnnnnnnnnnnnnnnnnnnnnnnnnnnnnnnnnnnnnnnnnnnnnnnnnnnnnnnnnnnnnnnnnnnnnnnnnnnnnnnnnnnnnnnnnnnnnnnnnnnnnnnnnnnnnnnnnnnnnnnnnnnnnnnnnnnncagctactcaggtggctgaggcaggagaatcacttgaactgaggaggtgaaggttgtagtgagccgagaattgtgccattgca

SEQ ID NO: 1636 - DNA, 722 bp, Macaca Fascicularis
  misc_feature (1)...(722): n = A,T,C or G
acaaagccttnnnactacaactcnatcccctaagtagagtgaatgnnntcatactcttagtacctacaccttaattttggaatactcatgtttagtatattttcttttagcaaatagggaagcaaatactgtattttagaaatagttcatgtaaaatggctagttttttttttcttttctttttcttttttttttaagtgtgatgcttcaaggnnnnnnnnnnnnnnnnnnnnnnnnnnnnnnnnnnnnnnnnnnnnnnnnnnnnnnnnattaagcacataaggaatttgttgggtgaaatgcttgtgagggggaaaaaggaaggagacagggagagttgtcagactgatgtcagtctgactccaagttaaaagagaggtaaggaaggaaggaactttgggtgaaactgtcttagactgnnnnnnnnnnnnnnngaaagtttgcaannnnnnnnaagtgtttgagtgaaagttgcctattgcnnnnnnnnnnnnnnnnnnnnnnnnnnnnnnnnnnnnnnnngtcagtgacagggaggagctagtgagaaactggcctnnnnnnnnnnnnnnnnnnnnnnnnnnnnnnnnnnnnnnnnnnnnnnnnnnnnntatccttcctgtagtcagagatctgagaggttcattcttnnnnnnnnnnnnnnncatctctggctacnnnnnnnnnnnnnncatataaataatagttcctcaccatttcag

SEQ ID NO: 1637 - DNA, 596 bp, Macaca Fascicularis
  misc_feature (1)...(596): n = A,T,C or G
acagtggctgtggaaagactctttagagaattttttttgagatgagatctcactacattgcccgggctggcctcagcctccctagtagctaggactacaggtctgcaccaccacatccccaccaaaagatttgtttatgttgaatagaaagtagtagactttcaaaatgttttatttaactagtttctttttcttttttaagtgtagttatatgatcacattgggaaacccttagaagaaacatacattggatacctatcccaggatcagacagaatccttttcattatagaattgcaattagggaagggaaaggggaaaaatgggtttctctgcttttcttggactgtctcattcaagatcctgtggttggattgtcttttggttatgtatcattataaaaggttctgaagcttagaaagaagctagggtggctgggcgcggtggctcacgcctgtggtcccagcactttgggaggtcaaggcgggtggatcatgaggttgggagatcgagaccatcctggccaacgtggtnnnnnnnnnnnnnnnnnnnnnnnnnnnnnnnnnnnnnnnnnnnnnnnnnnnnnnnnnnnnnnnc

SEQ ID NO: 1638 - DNA, 735 bp, Macaca Fascicularis
  misc_feature (1)...(735): n = A,T,C or G
tttcccattctgttcttctaagaggaactcaatggtctcacagaagtcannnnnnnnnnnnnnnnnnnnnnnnnnnnnnnnnnnnnnnnnnnnnnnnnnnnnnnccaaacaaannnnntgcctgctnnnggggagggagggtatggccttttctgtgccccagtttgtgggagggtgagccaatgaagcaagccaatttaaaaggcaatgtgtgctcttgtttcagagagagtgaatcctttcggtggcgggggtggagtgtgtgtgtggcgggtgggggatggggcatgcacatctagatccacactttttgggctcaactcagggttaccaaaatagagtcaaactcaactcaggattacccaaatggagtcaaattgtgtgtgtggttttgtaacatgattctttcactcnnnnnnnnnnnnnnnnnnnnnttttcatgtcactcatgactgcattataagtttgtaccatacttcnnnnnnnnnnnnnnnnnnnnnnnntttagaatattttcagatgtttattgtccttataaaagtctgtatgaaagtatgcaactatcacttagnnnnnnnnnnnnnnagtaaacggaatggaaactatgtacgnnnnnnnnnnnnnnnnnnnnnnnnnnnnnnnnnnaaaaatttatacaaaaatnnnnnnnnnnnnnnnnnnaaagcctcaatgccactgagtgctgttgtaatgttaatcttgattaatctggta

SEQ ID NO: 1639 - DNA, 732 bp, Macaca Fascicularis
  misc_feature (1)...(732): n = A,T,C or G
aatgggctggtactagccatggccatgctgaagttgctgagnnnnncgctgtcagagggacnnncagcggagaagcgccaagctctgctgggggtgatcaaagccctgctcattctcacacccatctttggcctcacctgggggctgggcctggccactctgttagaggaagtctccgtggtccctcattacatcttcaccattctcaacaccctccagggtgtcttcatcctattgtttggttgcctcatggacaagaannnnnnnnnnnnnnnnnnnnnnnnnnnnnnnnnnnnccaagcccccagctccaccatctccctgtccacaaatgaaggctacatcttggaacacagcaaaggaggaagtgacactgccaggaagacagatgcttcagagtgaaccacacacggacccatgttcctgcaagggagttgaggctatgtgcttgaacccaccagatgagccctggcccaatgctnnnnnnnnnnnntgcctcnnnnnnnnnnnnnnnnnnnnnngtcaggcttctatttcccttagtcacactcatttatcttacagctcaccccttctcatttctaaagtatccagcaagaatagcaggaaaaattagctaaaggcacctaatgaataaggctgcctttgctccagaaataatcaacannnnnnnnnnnnnnnnnnaattacaagtaaactttctcaaccagtttttaactataacaatacatg

SEQ ID NO: 1640 - DNA, 737 bp, Macaca Fascicularis
gactataatggtggctcataaaataaaccaaatgcctacttacacattttttgcattgtgtcttcagaacacgagtttttactggttcagagatcttaatgtctaagagatagtacttaatatctaaaagagatttcctgtaaccatcgggaggcacaagcaaagttcaactgtattgacagtggccgctgccaactgactattttgaacaattgatgccactggacaaaccagaccaaaagggaattcaggtgttggcagtggtgattgattctattcatgaagagcaataggcttattgctacacagtgagagcaaggaaaaatatggataaaatccttcattatttatagtatttataattcttatttatttttcttttcagattttattgtctgagagcactagtacattactgaaaagcagtgtttataatggacatcgtctatgactctacagacaatatttctagcattttatcattacataagatgtttgtggaaggtttaaaaagatgactgttagttaagcccatttcttcttttttcttttttttaaaaaaagaaaaaaaacttcaatttttgtctcaggatctataagcccattttcttctattcttggtactcttaaaaaaactcatgaatgtatgttgcattttttctaatgcatttttcattaactaaaataattatttactcctttaatttataaatgtggtgaatcacatcaattaattt

SEQ ID NO: 1641 - DNA, 674 bp, Macaca Fascicularis
cgcatccgcctctacctgtctgtgctctcccttttcctgtatatcttcccaagatctcggtggacatgttctccggagctgtattcatccagcaggctctgggctggaacatctatgcctccgtcatcgcacttctgggcatcaccatgatttacacggtgacaggagggctggccgcgctgatgtacacggacacggtacagaccttcgtcatcctggggggctcctgcatcctcatgggttacgccgtgggaaacatctccagctcctgctatcgaccccggcccgactcctaccacctgctccggcaccccgtgaccggggatctgccgtggcccgcgctgctcctgggactcacgatcgtctcgggatggtactggtgcagcgaccaggtcattgtgcagcgctgcctggccgggaagagcctgacccacatcaaggcgggctgcatcctgtgcgggtacctgaagctgacgcccatgttcctcatggtcatgccaggaatgatcagccgcattctgtacccggacgaggtggcgtgcgtggtgcctgaggtgtgcaggcgcgtgtgcggcacggaggtgggctgctccaacattgcctacccgcggctcgtcgtgaagctcatgcccaacggtctgcgcggactcatgctggcggtcatgctggccgcg

SEQ ID NO: 1642 - DNA, 754 bp, Macaca Fascicularis
  misc_feature (1)...(754): n = A,T,C or G
atnnnnnnnnnnnnnnnnnnnnnnnnnnnnnnnnnnntctaaagtgaagtctgtagcttagcttgtgtatagtttttgaaagaaatctcatgatcttcgttcattctcttgccttctcttttatcttatatggcacaagtagagggggaagccaggaggaaattcatcaccttgctatgcttttatttgatttttaattcccgagtgcctaaatgtggtgactggcacctcacataactttttgagattcctgatgtcatttttatccttcctgtcaaccagcaatgtatttttatgttactaaaaccagtaatgtcgtaattgttgagggcaagcttcattgttgatagtgcaaagtgtcgttgttgtgatgtgtatttattttattcaagtttgaatattgacaagnnnnnnnnnnnnnnntgactgacacctattgatctgctgtgtgcaaatgatagtactattttttagaaaactcttcagtaaattttaaaaatatttgaatacaaaatatctgagcaattttgaactcaaaagtttttcattgttttaagnnnnnnnnnnnnnnnnnnnnnnnnnnnnnnnnnnnnntatgcctaatatttactttattggtgtgtttaaaatattttttgatagactattatgtcttaagtgctttagaaaacaattgtttgtaatggactcaaagtgtttccctggacagtttgatgtacttatggttgagatttataatctgcttgtactttgc

SEQ ID NO: 1643 - DNA, 728 bp, Macaca Fascicularis
  misc_feature (1)...(728): n = A,T,C or G
agtgnnnnnnnnnnnnntcacaacagcaatccaccnnntgcagagctgctaagcagaggcagaaggatgctactcagaagcacagaggaatttatcaaggctaagctaaccttgcggaaaaatgtgaggctgagttttatattttggtatgtgatcgaaaaataaactcattcagaaagaaaaacacatcttcttactaggtttcctacacaaaaacttatattttcattgcctgacatttagtatacagagtaattctccacatctcacttaggatacaaacattgtctgactccttctgttttaagaattagaagtatttcagatatacttgaaatattttccaaaatacttcaaatctaatagaaatagattatcatcctccagtaacaaagtcaaaaaaggaagaannnnnnnnnnnnnnnnnnnntcatttcctaaaaggtaatctcttaaaaaatatacatacagcctcaccacttactcttccaagttccttaaatatcaccatcttatgttaatctagattcttggaaaaattaaagttctttaccaaaagtcaacattaaagttttatccagtgttgaaactggtgaaaaagagagttcataccaaggtataagttggaagattaaccaaaagcttagtgaggagttaaaaaatgtttttttgccactgaatgaaagaaataaaggaaaaaaaggcaacaatttataactcattccatg

SEQ ID NO: 1644 - DNA, 736 bp, Macaca Fascicularis
  misc_feature (1)...(736): n = A,T,C or G
cagcacactgnccccngaccgtcagctgannnnnnnnnnnnnnnncccatccaaggagacgtagctattgggtcttnnnnnnnnnnnnggcacagagaatctaagacccttggaatctttcgagtggtcagagtgcctttgtgtagtcgggacaggcctgggagttggggccccctaggcagtttcagggtggttctcgggttcagaaagaccaaggcaacactagagggctggagctgtcagtctccaacccaacctctgacctggagggagagggctggagatgagtcaatccccaatagccaaagatnnnnnnnnnnnngtctacagtgacacctctagaaaaccctaaatggtggggttggagagcgtggggtttggagagcttgcagcttggggaaaaccttgacattctgggagggcagcattcccactccccagggacagaagcacttgcacttggaacccgcccccacccaccaggcctggagcaatgcacctcttcatctggctgttcacaggtccttcataacgaactggtgagagtaggtaaaggtgttgccctannnnnnnnnnnnnnnnnnnnnnnnnnnnngaccttaagtagaagcacagggcaaccccgatttttaggtggtcagtcagaagcaagggaggtnnnnnnnnnnnnnnnnnnnnnnnnnnnnnnnnnnnnnnnnnnnnnnnnnnnnnnnnnnnnnnnnnntggcgcagcact

SEQ ID NO: 1645 - DNA, 718 bp, Macaca Fascicularis
  misc_feature (1)...(718): n = A,T,C or G
gacaggaaaacggacggtatnagntcaggaaagcgtgannnnnnnnnnnnnnnnnnnnnnnnnntcggacaggggctttatggatcactagatttcaatttgaaagccctgaaaccgtccttagtattctctgaagcccacagtgccagttgcccttcacgtcttggccagcagaaagctcatcatgagtggatcctcttgggaacttcagaggggtcaggcgacagtgatcgagactgcctcagtgatcacgctcggtgccatgagctgaaatctgggccaagagcacaggnnnnnnnnnnnnnnnnnnnnnnnnnnnnnnnnaaaataactacannnnnnnnnnnnnnnnnnatgaggacgtaaaggtgtaagaatgatacagtggactttggggactcagtagaaggggttgggggtgagggataagagtccactgtacactgcttggctgatgggtgcccccaaatcccagaaatcaccactaaagaacttcatgtaaccaaataccacctgaaccccaaaaacctactgaaatttttaaaaattaaaaataaatacataaaatagctacttttaatgctgtcaacagcatgttcctgaaaatatgttgttggaattcaaactttcctggaggacagctggtcaagaaatttattcacatgtcaggagttttctaaaatttgtttttaatgcttattggtatttctgcatggaa

SEQ ID NO: 1646 - DNA, 974 bp, Macaca Fascicularis
  misc_feature (1)...(974): n = A,T,C or G
agggacaagcaggccttcgcactatcacgtnnnctgggacgacaatcgtttctccnnnnnnnnnnnnnnnnnnnncacctaccagctttgtcacacctacgtgcgctgcacacgctccgtgtccatcccagcgccagcatactacgcccacctggtggccttccgggcnnnnnnnnnnnnnnnnnnnnnggaacatgacagnnnnnnnnnnnnnnnnacctctgggcagagtaacgggcgagaccaccaagcactggccaaggcggtccaggttcaccaagacactctgcgcaccatgtactttgcttgacatgttttagtgtttagcgactgtgtnnnnnnngggattcacgagaccagctacactcagaccaacagatggccannnnnnnnnnnnnnnnnnnnnnnnnnnnnnngacgtcattgattttattagattctccgttttccagaatgccttccgtcccagatttcacacttgnnnnnnnnnnnnnnnnnnnnnnnnnnnnnnnnnnnnnnnnnnnnnnnnnnnnnnnnnaaatctataagctgcttattnnnnnnnnnnnnnnnnnttcctaaaaatctaaaaccagtctatgannnnnnnnntttaaaacatttttaatttatttggtcattcaatttacttgtttttaatacatnnnnnnnnnnnnnnnnnnnnnnnnnnnnntagctgtgaatcttctgagagtgaaagcaacacaaaacannnnnnnnnnnnnnnnnnnnnnnnnnnnnnnnnnttgtcannnnnnnnnnnnnnnnnnnnnnnnnnnnntgccgctggcgtggctcacccaaggtccttgaccgagggccggtggccatgcagaggcctccgcaggtnnnnnnnnnnnnnnnnnnnnnnnnnnnnnnnnnctgaactaaggagcagtggcagaaggtgggccccgtgtgtttacagcatttccaggtccagagaggtggca

SEQ ID NO: 1647 - DNA, 731 bp, Macaca Fascicularis
  misc_feature (1)...(731): n = A,T,C or G
agtgcctggttgnntcccacattggcagagatggggccaccncntccttccaggcacatctcacattgccatgtacagaggcaggggtcacttttggtcaccatggaagcttttattgctcccacatggtcaggtcttaccctgcttgaagcacagaaggcacagccttannnnnnnnnnnnnnnnnnnnnnnnnnnnnnnnnnttttgtgcagccagccccgatagtttccacagcgagcgccagctccggccagcctgggacagctcatcccagccaactacacctgcctctggtcctgtccacattctgatatgnnnnnnnnnnnnnnnnnncaattagggttctgccattctgaaataaatgaagtttctaaaggagagtcggcctcagaagccaaaaactgnnnnnnnnnnnnnnnncaaacctttaagacttcatctccatgtgaagggctcactgtttctaccaaggctgtccctgtgttaaggcttttccgtcctgggaacgtcagactgggagagctcttgatctgcaggtggcaaaatggcactgaatatccccnnnnnnnnnnagaaaacccactgaaagatggtagagtggcacatgcttacagggcattggtgccaannnnnnnnnnnnngaatacagcccctcacaagctgtgggatggggcttgggagccgcagtgaatgtcactaaaatttcttccaaaacaaaacaagaaataa

SEQ ID NO: 1648 - DNA, 696 bp, Macaca Fascicularis
  misc_feature (1)...(696): n = A,T,C or G
gtagaggaaaactataggnnnnngttccacaatctctacgactaatcaccnnnnnnnnnnnnnnnnnnnnatatgtagttgtgcttttgtttgttcttttaggcagtctcatagcagtcttattttcaagtaagagtactgggagaatcactaggtaacttattagaaacccannnnnnnnnnnnnnnnnnttgtaaattnnnnnnnnnnnnnnnnnnnnnacaaatagatttttgtttttgttgttcctgcagccccagaagaaattgggggttaaagcagacaatnnnnnnnnnnnnnnnnnnnnnnnnnnnnnnnnnnnnnnnnnnnnataacatttatatcaatttcatgaaatgattgactattataatactgttaagatacagtgtaggcatttaactccacattggcatggtccatgctgataattttgcaaaatgaattgtgatgaatcaatgaaaaatgtaatttagaaactgatttcttcagaattagatggcttatttttttttgaaaaatctttgaatgaaaacattttatttttaagatatttacacaggaggcttcagggtttctcagtcattactgtccttttcccctacagaattttccctcttggtgtgattgcacagaatttgtatgtattttcagttacaagattgtaagtaaattgcccgatttactttcattata

SEQ ID NO: 1649 - DNA, 779 bp, Macaca Fascicularis
  misc_feature (1)...(779): n = A,T,C or G
gggtcagtgtatagctgannntgcatacaatgtgtaatcagataatccattagagaggaattgtccaaatagttttagtacctttctgatcatctgacgcagtaggctaggagacaatctgtcatctgagccatagttcttgagattcaaaaagtctgtccagtgactgcaatctgattataaataaactattttaaactgttcattcttgctgaaactgaagtgtacacaatagcacagcgttggcatgctgaggcaaaacattgggttcttttgcgttctaccttcaaaacgatctgtttgcatttgaaatatgagtgtttaagctctttaggagttagtgtaataagagaatgtgaatctgttgggaaattttcagatgccattaataattgtcattttgttgttaaattaacaagtactttaggataagcctctcgatgtttttgctttaaattgaaagcatgtctgtcaaattgcaagtttcccttcggtttctgtatatcacccagaagagggtctttgagttggtgttgtacctgtaccactcacatgtagcgtcaagtgtaatttttagtgtttacattcaagctgggatcttgactggttaaatgaatccacataccactgccactgctggaggaccaggtgttggaatacacagcgttacaggctataagcaaagcaaacaaaagttgatcctgacatatgccatccttctgtgtcattttgtggccgctctgtgtttttctccctagttattattgttaataactcac

SEQ ID NO: 1650 - DNA, 1911 bp, Macaca Fascicularis
ggtttcgggcggagagcgcgccccgtttggtaccttggtgtcctatcgcggcttgggacccgacaagatgggcaagaagggcaagaaggagaagaaggaggaggaagacctggaagcgctcatagcccatttccagacgctcgatgccaagaggactcagattgtggaaactccgtgccccccgccctcaccaaggttaaatgcctccctctcggttcatcctgagaaagatgaattaatccttttcggaggtgaatatttcaacggccaaaaaacttttttgtataacgagctctatgtctacaatatcagaaaggacgcctggaccaaagttgacatccccagtccacctccgaggcgctgtgctcaccaggcggtggtggtgcctcaaggtggcggacagctgtgggtctttggaggggagtttgcctctcccagcggagagcagttctaccactacaaggatctctgggtcctgcatttggccaccaagacctgggaacaagtcaaatcaacagggggtccttcgggtcggagtggacatcggatggtggcctggaagagacagttgatcctttttggtggcttccatgagagtacacgggattacatctactacaatgatgtgtacgcctttaatctggacaccttcacgtggagcaagctgtccccgtcaagcacggggcccacacccagatcaggctgccagatgtccgtcactccccagggcggcatcgtcatctacgggggctactcgaaacagagagttaagaaagacgtggacaagggcacgcggcactcagacatgttcctgctgaagccggaggacgggagagaagacaagtgggtgtggactcggatgaacccttcgggggtcaagcccaccccacggtctggcttttccgtggccatggccccgaatcaccagacgctgttcttcgggggtgtctgtgacgaggaagaggaggagagcctggcgggcgagttcttcaacgatctgtacttctacgatgccaccaggaaccgctggtttgagggacagctgaaggggcccaagtctgagaagaagaagcgcaggcggggcagaagagaggagcccgaaggtggcagcaagctggcgtgtgggggagctggcacgcaggcgcctgtggaggtggtcaaggaggtggtgaccgaggatgggaccgtggtcaccattaagcaggtgctctccgccccaggctcggcagggcagccccagtctgaggacgaagacagcctcgaggaggccggcagccccacacccgggccgtgtcctcgctccaacgccatgctggccgtgaagcacggggtgctctacgtctacgggggcatgtttgaggctggcgaccgccaggtcaccctcagcgacctgcactgcctggacctgcacaggatggaggcgtggaaggccttggtggagatggacccagaaactcaggagtggctggaggagacagactcggaagaggacagtgaggaggttgaaggtgctgagggtggagacgaggatgaggacgaagacagcggagaggagagcggtgcggaggactgaggcatccccctcggctgaatgtgtttctctctcattccttcctccttgtgtatcagaagagccccctccaggggcgcctggcaagtgctgtgcctacgtccgcccaggacccagccatgttggttgaagctctcggggccagcctgtgccctgacacacaggagagagctgaaggtgggtggcccaggccagggcgtgaactttctcccatgatttagtctttgatgcggcgctgggccagaagctcaactgagtgcagtgcgggtggattccctcagcagcctgtgtgttgtgtaaaataaattggacttgaaacaagaaaaaaaaaaaaaaaaaaa

SEQ ID NO: 1651 - DNA, 1297 bp, Macaca Fascicularis
  misc_feature (1)...(1297): n = A,T,C or G
caaaagaacagntnnnactgtactnnaaatttaccaccgactcaaattgccnnnnnnnnnnnnnnnntataggaggctagttgtcttgcttcacatcagcaggacagttggactctcagactcatgaccactgagtttacttgtattgaaactgtggtttcatctgaagtatgctattggacttgattattatctcattnnnnnnnnnnnnnnnnnnnnnnaggacaggacaaacttatctctcatggtgtttttttagaatacttttataaccaaggaagaaaccatgccagctgttaccattcaacttcttaagcagagattaagctttttcatatgtgttcttatcctagacattttcatatctgttcttatcctggacatcagtagtttttaattgcccagcatccgttccatctcattgtaacaactcnnnnnnnnnnnnnnnnnnnnnnncttcctattttcagtctgtggtttggacagtctgacccaatcttgagctttgtgggtggacgtgtaattcagacctcatcaatcagcaaatccatnnnnnnnnnnnnnnnnnnnnnnnnnnnnnnnnngtgctttagctttgtaggatgaaaacctcaaaccaacagggcctgccatgtagagaatgaagccagtgcaggggaaagtagagccaaaatatggagagacttgaatcctgatgacaacgtttgtgcccctggatccaaccgtgcctgaagctagtatatcccctggacttttcagttatgtgaaccaataaatacccttttttgcttaagttacttttgagttgggtttctattacttgaaattgaatccagactgatannnnnnnnnnnnnnnnaaacttgacagatccaagtatttattaaactagaggtcatggtccctgaagttactttccaaagtggaagacaaaatgaaacaggaactgagagaatatttaagataccacagaagcataaaaatgacatagtagaaagtaatagaaaacctaaatgtctgtcgttaaaggataggttaaggtatggtttagccatataggaaaatcttgtatctattaaaatgaataaagtacattcattgtgtatggaaaaatggccatgatacattaggtgaaacaagctactgatagaaaagtgtacagtgtgaaatcattttaaaatgtgtgtgcttatgtttataaatgcataaaaaagtctattnnnnnnnnnctttgaacagtgtagattacatgacactttcaactttatacatttctgtattaatattttactactac

SEQ ID NO: 1652 - DNA, 741 bp, Macaca Fascicularis
  misc_feature (1)...(741): n = A,T,C or G
aagaaagcagatgataaatacatagcctatgtaaaatgtttatagcctcatccactaagggtctattgtgatatcactgaccacataaatacagaagacatatgtctcctaaaaaagtgttatcataaacttgaacatgtgatagttattttaaggaacctatgcctgtaaacaatgtaaaacatgaagatatgcaaagnnnnnnnncctattacactgcaaaaaaggtttcacgtttatttagatcgactgtttctctaaattaattttgttcactttagattgtaaattcttctcagaaaaaaattaagtggtagctgtaagaggttgtctggaataccccaaagagaattgttcacactgtgaaataatgtcactaccacactgatgtcacgagatgcttcaaataaaagagcagttaattctaataataggttacttttaatccttttttatggaatcaaagtatagcttttcatcctgnnnnnnnnnnnnnnnctgacattattttagatgctactgtaaatttagaagaacataaaattcactgtttaaaagtgtacacatcggtgattttaagtatattaactatgttgtgcaaccatgactattatctaactccagagtattcccatcaaccccaaaagaaaccctgtacctattagcagtcagtcacaattctccctttctctcatctccnggcaaccacgaatctacttcttgtctctatgaatatgccta

SEQ ID NO: 1653 - DNA, 823 bp, Macaca Fascicularis
gtcaagatggccaaagttccggacatgtttgaagacctgaagaactgttacagtgaaaatgaagaagtcagttcctccattgaccatctgtctctgaatcagaaatccttctatgatgtaagctatggcccactccatgaaggctgcatggatcagtctgtgtccctgagtatctctgaaatctctaaaacatccaagctgaccttcaagcagagcatggtggtagtatcaaccaatgggaaggttctgaagaagagacggttgagtttaagccagtccatcactgataataacctggaggccatcgccaacgactcagaggaagaaatcatcaagcccaggtcggcaccttttagcttcctaagcaatatgacataccactttataaggatcatcaaacacgaattcatcctgaatgacaccctcaatcaaactataattcgagccaatgatcagtacctcacggctgctgcaatacataatctggatgaagcagtgaaatttgacatgggtgcttatacgtcatcaaaggatgatactaaagttcctgtgattctaagaatctcaaaaactcaattgtatgtgagtgcccaagatgaagaccaaccggtgctgctgaaggagatgcctgagatacccaaaaccatcacaggtagtgagaccaacttcctcttcttctgggaaactcatggcactaagaactacttcatatcagttgcccatccaaacttgtttattgccacaaagcatgacaattgggtgtgcttggcaaaggggctaccctctatcactgactttcagatactggaaaaccaggcttagg

SEQ ID NO: 1654 - DNA, 2323 bp, Macaca Fascicularis
aattccttaggaaaattagtcattgcccatgtgtgatagctgttttccattttgaattttaaccattttgggaaaagaaagagaatgggaaataccagtgtagtctgaaaagcccttaaacaacgagtgcgagaagtgtaagggtgaagtggacataggaagatgatgaacttgtcattttttcctttccgtagcttcattttattgtgtcaaagttgcagaaagcactgcactttcactgaggctctttttaggcagagtacggcccaggaaactttttttatggctcagatataaatcccagaaatgatggcaggatctctaactacaaaataacagtagtgttagtagtaagtatcgttgtaataacattgtagaactctacacgtcaaaaataccacattttatcatgatctctgcaagagatttcttggtagtcattccagacttttaataaataatatgtagagtaggaaaggttctgtgaggatccaaataataatgaaaatgacagtggtgatattaataataatagtacagctaccatttattatatcattattatgtggcaggcatttgtatacattatctcatttaattttctcagcagatgtgacaaatcaggaaactgtggcttagcaaagttaaataacttgactgatgtcatgcaaccactaagtgacagtagtgggatctgaactatgtctggggagagtcatgctcttaccattgcattgcctctaatgatcatcactttcagggaactaggtgtttagttagaatatcccaacccattgtctgcttactgatcaggaaactgaggcagggtaattttagtaattcccccaaataataaagacactcagagtcaataccagaaagcaacaagaggcaaaaccagcctttctctctgacaacatgttaaccacaaacaagacttgggaatttcagagcctctgcttgtgtttcagaaggaatgttcactgttgccatcagtcctgaaaagatttccttgcaccaaatcaaaatggttcgagtttgctgttgttgatatttttttccttttgtgttctgcttgctgactgacatctgctatcatgctaagcaggtgttcctatgtaaacgaacgtgccctgtttgtgtttcgccatcctcgctgctgcgcacccaaatgagcagcgtgattaagaatcctgtaaatttttgaaaggaaacggatggctaccctactagaacataattacaccgttccaacatccgcagctcactgctgcagcagagttggagaacagcagaaattaataatatataatagcatcattctcgtaatttataaatgaaataaagtagcgaggagattctgctgatatgcattttctccttaattctaaaagacaaagtatagattagaattttagtggggtgaaacctggccagcagtctcccactagttgcctgattcatgataggcgtgtttttgcttagggaaaagagctaatatcttttattaggccagaggaaaaaaaaaaaaaaaaagaaacatgaataaacaaggccctctaaaggcaacactaaataaagggggtctgaaaaaatctctgtggattgtgtgcccattgtatttaaaaagatattattactttcagacttcaacgtgtgctgcattttttctttcatggtaataacataccaccataggtcaccccttctgagaaaagagggactggtcagtgaaagatgtggctcaacatcaactttatgttaaacagcactagtgtaaattctagagatatgctgaacaacgatacacacatagttaacaataatagagtagatttcatctggtgtgttttatcacaataaaaaagaacattcttgctttttaaaaaacattattttgagcacccagtatgtgcaaaggagcctcttattacaaatcatcgttagatcaagggagttgatgcttttaatcaaccatgctggagaaagaacaacactttctaaagaggcaaataaactgtatgttaaaagtaaccagtccatttctctgtcacatagggttgtggcaggcagtttagaaactttaatgtttttctaatttcacttaccatgggtgagatgcctgacagatggatgaggttcaggttgtttcaagaggtttgtcttccacgagccaatgcccatctctctctctctctcacacacacacacacgagcaattatcctaaagaaaaataatatttatagcatttaaagtgttatttaagcaccttttcctgcttaattccaaagaatgacaatacatcaaaaaaaaaaaaaaaaa

SEQ ID NO: 1655 - DNA, 860 bp, Macaca Fascicularis
  misc_feature (1)...(860): n = A,T,C or G
atattcatttnntcagggaaaaataaagnncatgcnnacataggtctggagactnnnnanactaggaagaatnntgttgtcnnnnnagnnnnnnnnnnnnnnnnnnnnnnnnntttcaaatgaacatggtatcatttcaagacaaatttacgtgaactgggcagtactgacattggtgaggcgtgggggagtgccctgggaaaannnnnnnnnnnnnnnccgtagcctaaggctaatatttggaccacaggcgcaatgcctgggggtgggggccgggtggnnnnnnnnnnnnnnnnnnnnnnnnnctttttctgaatgtaattgtgaatacaaagcctttctgnnnnnnnnnnnnnttacccaatggatgactgtttattcgctatcagcagaattctgtaggnnnnnnnnnnnnnnnnnnnnnnnnnnnnnnnnnnnnnnnnnnnnnnnnnnnnnnnnnnnnnnnnnnnnnnnnnnnnnnnnnnnnnnnnnnnnnnnnnnnncctgtagaattgctatcgaccacatcttctgtagcactgacctgtgtgaactcggggaagnnnnnnnnnnnnnnnntgagtggaaacagagcaggattcatgaatatgaatgagaatgtgaatcattttggagnnnnnnnnnnnnnnncgggtcaattggaaatttcgtttctctaagaaagtagccctacnnnnnnnnnnnnnnntccctgttcctcgtacctgtgaggattcctccatatcagaactgtttcttgtgtcttttttgcattgtaactagccaaacctgaagtcagtaaataaaatgagattagcactttttttaggtaccagttgtatcactgagtaatgcacacc

SEQ ID NO: 1656 - DNA, 749 bp, Macaca Fascicularis
  misc_feature (1)...(749): n = A,T,C or G
gagggaaannnnnnnnnnnnnnnnnnncgccatttgtgtgccaagtccaggaacagtccatgcagcnnngcggcatnnnncgacgctgtcacaaagaagttcacccgaggctgagatggagaaactgaggcccagaaattgatctccagaatgctttgctcttagccactatactattatggcatattttatctttatgtattgcattatttcatggattcaagtttatcaatgtcctttgacaagtttaaaaatctgtctgctcacatgcacacgtatgttcattgcggcactattcacaatagcaaagacttggaatcaacccaaatgnnnnnnnnnnnnnnnctggattaagaaaatgtggcacatatacaccatggaatactatgcagccataaaaaaggatgagtttgtgtcctttgtagacatggatgcagctggaaaccatcattctcagcaaactatcacaagaacagaaaaccaaacaccgcatgttctcactcataggtgggaatggaacaatgagatcacttggactcaggaaggggaacatcacacactggggcctattatggggaggggggagggaggagggnnnnnnnnnnnngttatacctgatgtaaaggacaagttgatgggtgctgacgagttgatgggtgctgannnnnnnnnnnnnnnnnnnnnnnnnnnnnnnnnnnnnnnnnnnntgtaacaaacctgcacgttatgcacatgtaccctagaactta

SEQ ID NO: 1657 - DNA, 2036 bp, Macaca Fascicularis
  misc_feature (1)...(2036): n = A,T,C or G
tttataatcttgttagtgttgagcaatgtggaagatgcttgagaactgtttgaactgaatttcattcaaggctgcgatctttcagctgggaaaggcagaagtgcatattggtaagttactggaaataaagggtgagtttcctcagcttgatatgttacttctcgtgattccatgatttagaaaggatttggctcctggatttaggagatcattcagttctatttcatgcctttaaggaggtgcagaaaaggagtgttattcagcctgggagaatatttctaacaggagggtcggaactggtctttcgcaggagatcgtatttgaaagtaggtttaaaaagatatttcaggcagagagaggagttctttatgacctaattaattcagtaagcacatattgaacacttaccgtatgttagcaaagagaagactgttgagataagcaaggatacaagaagtagttttaaatggctgggaggttggagttaaatttggaaaggtagactggcactgggttgttcgaggctcagtaaaagattgtattttctaaagagagattcaacagcgtttcacatcccatgtgctcttcttgaacttggtgccaccaccatgaccatcaggaggtagaaggccacaaaacaatcttcacctaggcacattgtcatcaggttattcaaagctaagatgaaggaaagaatcttaagagctctgagacagaagcaccaggtaacctataaaggaaaacctgtcagattaacagcggatttctcagcagaaaccctacaagctagaagggattggggtcctatcttcatcctcctcaaacaaaacaattatcagccaagaattttgaatccagcaaaactaatcatgatatatgaaggagagaattcgcgactgtcaagccaccactacaagaactgctaaaaggagctctaaatcttgaaacaaatcctggaaacacatcaaaacggaacctctttaaagcatctatcacacaggacctatgaaacaaaaatacatgttaaaaaaaaaacacacaaacaacaacaacaacaacaaaaaaaacaaagtacacagacaacaaaaagcatgacgaatgcaacagtacctcacatttcaatactaaccttgaatgtaaatggcctaaatgctccacttaaaagatagagaaacacagaatgaacaagaactcaccaaccatctgctgcccttaggagaatcacctaacacataaggactagcagaaacttaaagaaaagggtggaaaaggcatttcatgcaaatggacaccaaagcgagctggggtagctattcttatttcagacaaaacaaatgtgaaatcaacagcagttaaaagagacaaagaggttcattatataatggtaaaagacctcatgcaagaggcaaatgtcaccatcctaaacatatgtgcacctaacactggagctcccaaattcataaaacaattactaatagacctaagaaatgaaatacacagcaacgcaataatagtaggggactttaatactgcactgatagctctagacacgtcattaagacagaaagtcaacaaaaaaaaatggatttaaactatagcttggaacaaatggacttagcagatatatacagaacattttatccaacaactgcagaatacacgttctattcaacagctcatggaactttcctcaagataaaccgtatgctaggccataaaactagcctcaatagatctaagaaaactgaaattatgtcaagcactttctcagaccacagtggaataaaactggaaatcaactccaaaaggaactttcagaacaatgcaaattaacccgctcctgaatgagcattgagtcaaaacgaaaatcaagatggaaatttaaaaattctttgaactgggccannnnnnnnnnnnnnnnnnnnnnnnnnnnnnnnnnnnnnnnnnnnnnntgggcagaacatgaggtcaggcgatcaagaccattctggctaacacggtgaaaccccgtctctactaaaaaaaaaaaaaaaaaa

SEQ ID NO: 1658 - DNA, 303 bp, Macaca Fascicularis
  misc_feature (1)...(303): n = A,T,C or G
gttggtcaggctnnnnnnnnnnnnnnnnnnnnnnnnnnnnnnnnnnnnnnnnnnnnnnnnnnnnnnnnnnnnnnnnnnnnnnnnnnnnnnnnngctgattccaggtgaattcttatctgatgggcgggcaagggcgtgtcagtgtggtgggttggagtgtgtgtgtctgaggacacagatgacatgttttcccttcagcttcttgttttctgagcatccattgtgccttaacattttctgcttgtcctttgggacannnnnnnnnnnnnnnnnntctttgaatgttctcattcttttgtatca

SEQ ID NO: 1659 - DNA, 818 bp, Macaca Fascicularis
  misc_feature (1)...(818): n = A,T,C or G
acactgacagtattctttccagttaagnnngatgcccgttcacctgttggttcaccactcaccagatctgattctgcaagaatcagtggtagaactacgtcgtccttgctaaacaagtgagcctgtgtcctgtgacggcctttcacagcggaatgcagttgtccctgacattactttggnnnnnnnnnnnnnnnnnnnnnnnnnnnnnnnnnnnnnnnnnnnnnnnnngtgtttactgtggcccctcttgatgtggctgtcagtgcagcgttgttgaacagggctattatttttacagggtgtaaagtgtggctctttgctttgtctttgccatggcattaagagaaagttccctgtcttctttcaatattagttacttcaacatgaatatgtgctacttacaaacttgttttgtttctttgtatataacttgccttggatttgttgtgcgcagtttgttgagttgtatgtttttgtgaattatcaggagtaaatttgacaagtatatgtgaataacctcctgtaaatgaattttataacaaaaatgtactgaactattttttaaagttgtgcagattannnnnnnnntgctatagctttgacttttctatgctgtgaattaatnnnnnnnnnnnnnnnaacagtagccctgttgtctttgttaaaccctaaattttaagaggaaatggcagaattaaaagcagaaacaagacggacatggattagaagttacgtattactgaagtaaactacaaggtactaacatccatttcgtctgccatttggtttnnnnnnnnnnnnnnnnnnnnngtggggat

SEQ ID NO: 1660 - DNA, 738 bp, Macaca Fascicularis
  misc_feature (1)...(738): n = A,T,C or G
tcagaatggttctatggacttgactgttgattatcttggactgacaactgtactgtctggaaatgacagtttccccttcctttcagtatttgtacctgtctatcccacatccctttgctggtcaggatttccaggacaatagtgaatactagccgggacaacaggctagttctgattccactgttcctaatattctaccaagaagcatgtattttttctattttggtagttttatgttaggtagccttatcaagttaggactttttttttacccaagctaaagaaattacccaaaataaagaaatgttatcaggaatgggtactaattttaagaaatgtatttcaacacctgctaaaattaccacttatttttctattatgggaacaaattacattaatagattttcactgttattgtttatcctgggagaaagcatacttgtgacttttttaggtactgtgctttggaaccagatttggaagtgagatgaaatgtcagctgtgctctcctggttaggtatggtttcagggtcaggttcgcctgataaatgaagtgagatgcttttaactttgctctagaacagtttctactgcagggaatgatctgttccttgaggctttgtcacagtctgtccacaatggactggatttggcatgtaggatgttaatttctatgtactttggaannnanatacagtttannnagaannnnnnnnnnnnnnnnnnnctcacgtcctc

SEQ ID NO: 1661 - DNA, 759 bp, Macaca Fascicularis
cagaagaaatgcttagcaaacagcggcacgatggggccttcttatccgagagagtgagagcgctcctggggacttctccctctctgtcaagtttggaaacgatgtgcagcacttcaaggtgctccgagacggagccggcaagtacttcctctgggtggtgaagttcaattctttgaatgagctggtggattatcacagatctacatctgtctccagaaaccagcagatattcctgcgggacatagaacaggtgccacagcagccgacatacgtccaggccctctttgactttgatcctcaggaggatggagagctgggcttccgccggggagattttatccatgtcatggataactcagaccccaactggtggaaaggagcttgccacgggcagaccggcatgtttccccgcaattacgtcacccccgtgaaccggaacgtctaagaatcaagaagcaattatttaaagaaagtgaaaaatgtaaaacacatacaaaagaattaaacccacaagctgccactaacagcagcctgtgagggagtgcagaacacctggccgggtcaccctgtgaccctctcactttggttggaactttagggggtgggagggggcgttggatttaaaaatgccaaaacttacctataaattaagaagagtttttattacaaattttcactgctgctcctctttcccctcctttgccctttttttcatccttttttctcttctgtccatcagtgcatgacgtttaaggccac

SEQ ID NO: 1662 - DNA, 654 bp, Macaca Fascicularis
  misc_feature (1)...(654): n = A,T,C or G
tgtgttgcagtggatanntcctgcagataagaaatgcttaactgagaaatgctcatgttgggannnnnnnnnnnnnnnnnnnnnnnnnnnnnnnnnnnnnnnnnnnnnnnnnnnacttgactcaatcccaggagcctcagtagaggataaaatattacacaagatgctcaaaatggtggaattgctcagtgctcccataaatatacatttataattttcatttgccgcatggtaaactgaaaaatacagaatatattaaaaagaaactctgcatgatttttttcaaaaattcaaagcatatttaaataatatataaattaaatgccctcctctcttccaattctgtccctatagttttcctctattaagtgaactacatgcattcttttagtggatagatgcacacaaatacacaagccattttggggaaggatccaggagtgtggccatattgtaacacatttttctgcaaattacctctttcatttaacaggcctcattcaatggcctttttctttttcagtaatacatacacatctgtgtcatttgttgaatgacgacatgaatgttttgtagatgaaatataattaaatgttttaagcatttctcactcatagatatttatgttagcaccaaatttctgtgcaatgaacc

SEQ ID NO: 1663 - DNA, 3007 bp, Macaca Fascicularis
caccacaagctggatgtgagtgtgcttatggatcctgaggtgtaactgtctcaggccctttcagcaacagagccaggaagtatatttatgtatacatatacatgcacacacacatctgtatttatttttatatctatctgtactaaaatccatgagtttatactgatatctgcaattccatggggttcagtctagcctcctgcttctttgtagtatccctaacaatgagaaacattgctcgccttatcctcaatatatttacatctgcttattctcccttgatatgtaaccctctccccttcccactggcctcctccttggccctgctgtcctctttgcttcagctatgtccttggtgccagcacccaggtcctgagacccccccctcttctgttccaattgtctccttaaacccaactggacaggccttgccagccctctccaactgcagggaaggaagggaaccaataaatatattttaaggagaaggaaagatagtaagagaggagagaagggaagtggaagagaaagaactatttctaagtcacagctttattctgtgctgtgtgaatagcataaaaacattgagcaacttccttgattatttatatactttgataattctcctttttgaatttttaaaacaatgtcagttaacttagaacatatttatataaagcgaatatacacatcttaagagagttttctactttcaaagacaatgccagtttacctaattgaaaaggcttgaagttacaggcatttgtgattacacttatttaataataatgctactattacatgtattctgttatagtcttatctttcctttttagggtgtagcatttttcagtttcctccagaaagctcttgatgattgcaggatcattttaatgttttggttgtagatgaagtgaccttttaattttggtcaggaagtttcattgaagtgcaaagtgtgattagtgatgaggaacttcaagcagaattgcatgaaacgtccaaacctccctcagaacaaggcgaagaggaactgataggaactagggaggaagaagcccctgctgagcccgagagcctcctgagggacaaccctgagagggaggacgtggatggtgagccacaggaagctgagaaagatgcggaagattcactccatgaatggcaagatattaatttggtaatactgtaacattgtgttttcacttcttgctgaggaagccgggttaagtaggttttgagttttaaggagttgctggatgagtatttattagctatttgcagtacatcttgtggttgctgatggcttcgttttagtgtaggttactggctggaatagaccccgttttccgtgtggtttagtgagggatctctaaagatattacagagtcttggttagcaatccagtggagtacttcctaaggagaaagagcttattggtaatttcggtcagactaaatacaggctttctgtaacaaatggactcatttggattattaatataaatctgtaaatgaaaacacattttataggaggagttagaaactctggagagcaacctcttagcacaacagaattcactgaaagctgaaaaacagcagcaagaacgaatcgctgctactgtcaccggacagatgttcctggaaagccaggaactcctgcgcctgttcggcattccctacatccaggctcccatggaagcagaagcgcagtgcgccatcctggacctgaccgatcagacttccggaaccatcactgatgacagtgatatctggctgtttggagcacggcatgtctataaaaacttttttaataaaaacaagtttgttgaatattatcagtatgtggactttcacaatcaattaggattggaccggaataagttaataaatttggcctatttgcttggaagtgattataccgaaggaataccaactgtgggttgtgtaaccgccatggaaattctcaatgaattccctgggcatggcctggaacctctcctaaaattctcagaatggtggcatgaagctcaaaaaaatccaaagataagacctaatcctcatgacaccaaagtgaaaaaaaaattacggacattgcaactcacccctggctttcctaacccagctgttgctgaggcctacctcaaacccgtggtggatgactcgaagggatcctttctgtgggggaaacctgatctcgaaaaaattagagaattttgtcagcggtatttcggctggaacagaacgaagacagatgaatctctgtttcctgtattaaagcaacttgatgcccagcagacacagctccgaattgattccttctttagattagcacaacaggagaaagaagatgctaaacgtattaagagccagagactaaacagagctgtgacatgtatgctaaggaaagagagagaagcagtagccagtgaaatagaagcagtttctgttgctatggagaaagaatttgagatacttgatgaggcaaaaggaaaaacccagaagagaggcataacaaatacattggaggagtcatcgagcctgaaaagaaagaggctttcagattctaaaggaaagaatacgtgtggtggatttttgggggagacctgcctctcagaatcatctgatggatcttcaagtgaggatgctgaaagtttaatgaatgtacaaaggagaagagcggcgaaagagccaaaaatcagtgcttcagattcgcagaactcagtgaaggaagctcctgtgaagaatggaggtgtgaccaccagcagctctagtgatgatgacggagggaaagagaagacagtccttgtgactgccagatctgtgtttgggaagaaaagagggaaactgagacgtgcaaggggaagaaaaaggaaaacctaattaaaaaatatgtatcctgtataattaggtatgacagccttttgtaatgaatttgttgtgaaggcataataaaattaactatttacatggaaaaaaaaaaaaaaaaaaaaaaaaaaaaaaaaaaa

SEQ ID NO: 1664 - DNA, 581 bp, Macaca Fascicularis
agcactgaattggaactacattctaataggttgcaccataaagagtattcagagagcatcaaaaaggagcccacaccttcagcggtgaaggattctaacacagggaatctgcagtttgtagcagaatgctgttttcctcaagtagctcataatatactgccaaatctcaaaaattaagctgaatttcaaaccagatactccactccccctttccctgagccacgtgtttcacccaagtgtagaaaattccagggatccaccacaagatggagatggtcagcacaaaccaattctgttcctctttaaagtgtatattagccacttagcaatctctatactctttcaagtaaccaagctgttgactttcttactacttgcagtagcctgtccccaacttttcaatccagtgcttaacctaaaaaactccttaactctgccttgacctgaggaagaccatgctaattggtgttattttgtatgtaccctgtgcttaattctagaacagtaaacccatacacaggtgggagggaggaacaccggtgcctcggtcactctgggggcagtttagatgctgtgaaatt

SEQ ID NO: 1665 - DNA, 2837 bp, Macaca Fascicularis
ggaattctgagctaccgcatcagcagctgagacctcacaccctgcctccctaacctaagaatccggaacacggggcctccccgacccctgacctcccagccctgcagggttctcctgagaactcctgtctgtggaggcctttctgggagactccccttttgatgtacatatttgtgaggtcctctctggaaagggctttctcttggttcccttcagtcagcttttctccaaggagagtcctgaggcctcccctgggcacacagcagcggggccctgctctcagctgcccaggctggaccttagaggttcaggagcctccatgcagggccaggttgaggctgcaggtgagctctgctgggggagcatgggggaagggggctggctccatacttagcctgctcccctgtgccccagcttgcctgcggggtgctctggttctgcggctatggccacgtctgggcacagaacgccacaaacctcgtctcctctttgctgacgctcctgaaacagctgggacccacggcctggcttgactctgggacctggggagtccccagtctgctgctggtctctctgtccatgggcctggtcctcgttaccacgctggtgtggcacctcctgaggacacccccagagccacccacctcactgccccctgaggacaggcgccagtcagtgagccgccagccctccttcacctactctgagtggatggaggagaaagttgaggatgacttcctggacctggacccggtgcccgagactcctgtgtttgattgtgtgatggacatcaagcctgaggccgaccccgcctcgctcaccgtcaagtccatgggtctgcaggagaggaggggctccaatgtctcgctgaccctggacatgtgcactccgggctgcaacgaggagggctttggctacctcatgtccccacgtgaggagtccgcccgcgagtacctgctcagcgcctcccgtgtcctccaagcagaagagcttcacgaaaaggccctggaccctttcctgctgcaggcggaattctttgaaatccccatgaacttcgtggatcccaaagagtacgacatccctgggctggtgcggaagaaccggtacaaaaccatacttcccaaccctcacagcagagtgtgtctgacctcaccagaccctgacgaccccctgagttcctacatcaatgccaactacatccggggctacggtggggaggagaaggtgtacatcgccactcagggacccatcgtcagcacggtcgccgacttctggcgcatggtgtggcaggagcacacgcccatcattgtcatgatcaccaacatcgaggagatgaacgagaaatgcaccgagtattggccagaggagcaggtggtgtacgacgatgttgagatcactgtgcagaaagtcattcacacggaggattaccggctgcgactcatctccctcaagagtgggactgaggagcgaggcctgaagcattactggttcacatcctggcccgaccagaagaccccccccccccactcctgcacctggtgcgggaggtggaggaggcaacccagcaggaggggccccactgtgcccccatcatcgtccactgcagtgcagggattgggaggaccggctgcttcattgccaccagcatctgctgccagcagctgcggcaggagggtgtggtggacatcctgaagaccacgtgccagctccgtcaggacaggggcggcatgatccagacatgcgagcagtaccagtttgtgcaccacgtcatgagcctctacgaaaagcagctgtcccaccagtccccagaatgactgcgcttctcctgcaaggttgtctgggcactgcccagcctgagtctcggccctcacccagggccccgccttgggtcctgggcctgctccccgcttcctccccttcagtcagctccctctgtcctctctgtcagcctggcctggcccctaccctccagcattgctcttcctactgtacatattgaggaatgggggcagggtcggggagggacatgccaggccgggcctggggccccagggcctgatccacaccacacagaccccgggccccagtttttaacgatggtcccatcagtacctgatccagaacgtttccgtgccacactctgtgtcctgctgcagtgtgttctgtctgtccgtccatctctgctgtctgtaccggacactgtgtctcctcggccaggaaggggtgatgagctccagcccctaagcaacctgggcggacttgcctgccttggcctcacccgcacttctcccaaaaggcagatgactgggagttaggcatggggagctccggagggctaccagagttccagctgagggagaggtctctaggttggagtgggcatcacagccagggtggcctctgggtgtcagatgccctcaggagggtgcccagcctgtgaggcactggcgaggaagggggcagatggggcgtggagaacccagaggatctgggccctgttggggaggggaggggagctccaggtttgggtggggactcagccccagatctatgtgagacatttttcgtgtcactgtgggaaagccttctcagaagtctcactgcgtgtcgctctgcgtgtgttcccatgtccatgcgtgtgttgagagcccaccaggagggcatgcatgactctggcaacgtgtgttaccttggagccacgagtttttattgctgactttaaatatttatcccacggcagacagagacatttggtgtctttttataattcgctcgtggtcattgaatagagcaataaacggggcattttgagcaaaacaaaaaaaaaaaaaaaaaaa

SEQ ID NO: 1666 - DNA, 739 bp, Macaca Fascicularis
  misc_feature (1)...(739): n = A,T,C or G
actgaaaaaaatgagaatacaggaaatggctcttgtatatatttttttgccatgtttaccacttgtgaatgcnctgctgtctttgcttcaagagagatttgttcactgcccagctcgttttgtgtcctgagccctatgcccagcccaccttataaatcatgcctgtttagatgtttgattttgttctgtgtgccattgtcatcttaagggtgtataactcnnnnnnnnnnnnnnnnnnnnnnnnntctcgtttaaatgtttaaacacctaatttatattctaattgatcccagccactgatgnnnnnnntttagctacttctgctaaataagcatattaattttccacatcagaccatcagatcttaagaaccaacagttatctagaattccgtgtctactaatgtttnnnnnnnnnnnnnnnnnnnnnnnnnnnnnnnnnnnnnnnnnnnnnnnnnnnntgtagcttctagattaaaaaattttgtgcgtgaagttgctttgtaaagagcatgtgnnnnnnnnnnnnnnnnnnnnnntttgtgttagatgttagagcaaaagaaagggcttatagtattagtattggagcactttgaagataggtatttnnnnnnnnnnnnnnggagttaaaagttacattttaaattttagaaaaagatatgatggtaattggaaatagtcacaatgaagttcttcatccagcaggtgtttaacagtgttattttgccattgannat

SEQ ID NO: 1667 - DNA, 3233 bp, Macaca Fascicularis
aaaaaaaaaaaactatttcttccaaagagccactctgttactgtttctcatggttagaagacaatatttgctttctctttgtcatttcttccggatgaaaggctaagccgtaatagaaagaatggagaactattgattgaccatctttattctgtgggctctgattctcccatgggaacaccaagggatggttttccatactggaactcaaaggtaaagacattcaaggacagacatttttggcacagcatagatgaaaatggcaagttccctggccttccttctgctcaactttcatgtctccttcttcttggcccagctgctcactccttcctcagctcagttttctgtgcttggaccctctgggcccatcctggccatggtgggtgaagacgctgatctgccctgtcacctgttcccaaccatgagtgcagagaccatggagctgagatgggtgagttccagcctaaggcaggtggtgaatgtgtatgcagatggaaaggaagtggaagacaggcagagtgcaccatatcgagggagaacttcgattctacgggatgacatcgctgcagggaaggctgctctccgaatacacaacgttacagcctctgacagtggaaagtacttgtgttatttccaagatggtgacttctatgaaaaagccctggtggagctgaaggttgcagcactgggttctaatcttcatgttgaagtgaagggttatgaggatggagggatccatctggagtgcaggtccactggctggtatccccaacccaaaatacagtggagcaatgccaagggacagaacatcccagctgtggaagcacctgtggttgcagatggagtgggcctatatgcagtagcagcatctgtgatcatgagaggcggctctggggagagtgtgtcctgcatcatcagaaattctgttcttggcctggaaaagacagccagcatttctatcgcagaccccttcttcaggagtgcccagccctggatcccaaaacagcaaaccccatcctccttgtttctgaggaccagaggagtgtgcagcgtgccaaggagccccaggatctaccggacaaccctgagagatttgattggcattattgtgttctcggctgtgagagcttcatgtcagggagacattactgggaggtggaggtaggggacaggaaagagtggcatataggggtgtgtagtaagattgtgcagagaaaaggttgggtcaaaatgacacctgagaacggattctggactatgggactgactgatgggaataagtatcagattctcactacgctcagaaccaacctgacacttcctgagcccctaggaaatcgggaatcttcctggtctatgagactggagatatgtcattctgcaatgctacggatgggtcacatattcacaatttcctgaatatctccttttctgggcctctgtataccactttcagaattttgacctaggaacccactgccctgacctttgcccagcaccaaaagaagtagagagttccctcattcctgacctagtgcctgatcattccctggagacaccagtggcccaagcttagctaatgaaagtgggaagcctcaggctgaaataatgtctctacttctctctgcccagcctgaatctgagggtctccttctccacagcaaccaatcacaaccataaagctacaggcacacactgaagaacgctactgatattcattctattttattctgtataccaaatatagagtttcataccactttattgtcccctttatgcagatacggaaactggggtacagaaaagtgaattaactttccaaatttggcatgactagtaaacaacagagctgggatctaaacagcaataactaacattaatggagaatttaaaatgttctgagtgctgtgttatgagctttggtggatgtcactcctttaatcctcacaacaccctgtcgggtagtctcattttgcaagtatggaagctgaggcagggcaacattaagtagcttacataactcctacggtaatttgtgctgttgggagatggtcagcttcagtctctggccatttgcccattcttttccaccctgattcttcccccatgggaaaaacccacctgtagccctgaggttcttttcccaggacagctccagggtaaggatcattgtaggtggttgtggagttggcactccttttgactcctttgcagctgattgtcagagcaatagacccagcactccttggattagctctgctgagtgtcttggttgagagaataacctcacagtacccacgtgacgtgtaactgggaaagagactaaaggccacatgacatgtaactgggaaagaaactaaaggccacactcaatgtataatgaagccctggtaggtaacagagcctctgggaggtaaacagtgtgaattaggatttgagttgactttgaaggctagcatgtcaagtctcctaaaaaccatcacctcctatgggtggtagagagtggtagttatggaagacctaaactagaaagaagggtcaatatctttaggtcaaagggtttcttaggcttctgcccccttggcaggagggactccttcctgcctaggggattttccaagggacagagctggggaaaatccttattgatacacacccataattcattcaacaaatgctcgagaatcatattgtatgttcaagacactgttctagaaaccgagggtaaatcattgagcaaactatattaagatctcttctctcaaaaagtggttaaataattaaccatatattctatcagatggtgatgaatatctgtaggaaacattaagcaaggaaggaaaagagaggtaggggcatgagacagatatgtacccccaacaaatgtgataagtgatcgtggagccagagccagccttcctatagtcaaggtttccaggtagaacaaatactctgtgatataagaaatttggatgaaggaagctggaagaattacagggatatttttaatccctctatggattcagtctgctggaaaggggtctatccacccctgttcattagtggatgttaaacccatattcctttcaactgatgcctgcttgggaaaactactcctcattatcatcactattgttgctcaccattgtatcccctcttcttggcatgtgcttgtcaagtcttggttgttcaataaatttgttaataatgcttaaaaaaaaaaaaaaaaa

SEQ ID NO: 1668 - DNA, 720 bp, Macaca Fascicularis
  misc_feature (1)...(720): n = A,T,C or G
gagtnnnngacaaggtggaaannnnnnnnnnnnnnnntnnnnnntaaagacagatcagttacacccctccacgggttctttgtgatgtcagtgacacgatgggaggtgcacctgcctctaacggcgcccaccattaagtcagatctcagtaaccatcttcgtggcaggggctatcacactggaccctcgcagtagccaaggagagacgccattgagggactcattttcccacttggtgaaatnnnnnnnnnnngcgtggaagcaggaggagggccttcctcggataggtggaggggnnnnnnnnnnnnnnnnnnnnnnnnnncaggactcaggagaggttcacctttggagtgagtccccctaagggtgaggttgcccccaaggagcaccgtgggaagagtcagggacccctggtnnnnnnnnnnnnnnnnnnnnnnnnnnnggcttggaggtgagccccatggggtatcctgatnnnnnnnnnnnnnnnnnctagctgccttcttctcatgacatgtggtgtcctcacagccagccgtgggatctgcattgagttcagcaagcggaggtgccttccccagggccacacagccatggagggctgcggctcggacgctgacttctgcagctccccctcacgtccatgaggtttctgctccaaaatnnnnnnnnnnnnaaaaaatgtcccaaacacaacccatttcttaccacatttcactc

SEQ ID NO: 1669 - DNA, 719 bp, Macaca Fascicularis
gctgggctgggaggctggatggagtggagggctgggagttgtcaaagaggagccaagtttgagatttctacaagttttctgaactctgcaagttcagataattttttccccattctgttggctacatataataaacattacttaatattttatataattattttaaaataaattttaaaatatttgttcattgcttatatcttgtggtatttggacataagtcagacataaatcatgttgtaagctaactgtagtaagattcgacatctgtggatggatttttaatagctgatatattaacaaaacttcatttatatgcatatgcttattatggtatatagatgtgtttattttgttatagttaccttgttctgtatgctctgagaatttcccttttaaaaacaatttaatgaggaattcctgatgtgtgtgtgtgtgtgtgtgtatgtgtatatgttttcccagaagtcttaagaaaaattaatcaagggaagaggtgtatttttctcttcatttaaatatatatatggcattgtctcatgagtcatatgatcccattcagtgacatgggaagaagtaaaataagagatagttctaaaacaacggtgacggccaggcacagtggctcacaactataatctcagtactttggaaggccaagacaggaggatggcttaagcccagaagttcaagaccagtctaggcaacatagcgagacc

SEQ ID NO: 1670 - DNA, 711 bp, Macaca Fascicularis
  misc_feature (1)...(711): n = A,T,C or G
gnnngtgctccagannnnntctgagtgaccagctgggctgtgagtttttcaacttgctcataatggagcagagccagttgctttctgagagtcttcaggagacacgtgaattattcatccactgctttccaggaatcaggaagacagccctagccataaagatcatggagaaaattaaggacttgtttcactgcaaaccaaaagaaatcctctatgtttgtgaaagtgactccctaaaggattttgtgacgtaagagttttaccaactacacacacacacaaatgtatttagtcagtcttttcaagagtgtcacaaaagtaatttgtgtttttagtttaagttttttagtgcctcagctgcataagtgcaagagcccaaactatatacacatttccaaataatcacagaattgagctgtaaacaggtaatttagaatgttcaaccttaaacatctcattataaataacccacatgtgcataacttaaatttatagaaccagaaactttcttttttcacaatccttagccttaaatttaagagaagtagaaatgaacccattctgctttaagtatactttttgtttgatacgtaatgtcttaaagtcatagggtatttctgctaattagacattgtacctagcgaaacttaaatttaaatacagcttgattttgttcataaaatattttcatttttgacttgtaaaatcagt

SEQ ID NO: 1671 - DNA, 745 bp, Macaca Fascicularis
  misc_feature (1)...(745): n = A,T,C or G
agtaggatttgggannnnnnaggacaccatactgttcagcgaccccacnnntnctnntggacagaggnnnnnnnnnnnnnnnnnnnnnnnnnnnnnnnnnnnnnnnnnnnnnnnnnnnnnnnncaaggatggggaggctcagaagcaagaaggagnnnnnnnnnnnnnnnctgctgaggcgttgacagcgcctgaggatgctgggaggcccgctgtcaactccccagcaaatcagnnnnnnnnnnnnnnnnnnnngctctttcatccttcattaccccagttaccttctgaggaagaagtaaacagccttggaagggaaataattaaactgacaaaggaacaggcagctgcagaactggaagaggtcagaagagagagtcccatggagggtcagaggagtgagacggggccagccccaccgggcctggccatccagggggagctccccagatctcacctggactccatcgaggccagccagccagcagccgaagcttnnnnnnnnnnnnnnnnnnnngggatcccagagggcagaggcacgaggagcannnnnnnnnnnnnnnggggagagggatctgacacaatgacacattgaaagcccagagagggtcaagaatgaagcatcagaacggcgcgcccacgtcgccttctcctgaaacacctccgagtctgcaagtgagaaaatgctctgatcctgttgcaaactgtgaatattctgatgatgccagttcagtttgattataaa

SEQ ID NO: 1672 - DNA, 662 bp, Macaca Fascicularis
  misc_feature (1)...(662): n = A,T,C or G
gatgtgcttgggtagtacaaagtggggcggggttaggggtggcggagtcggggcctggtggggtgggggtgggaagtnnnnnnnnnnnnnnnntctatttaaaaacacaaaaatcaagccnnnnnnnntggtgctcgnnnnnnnnnnnnnnnnnnnnnnnnnnnnnntcgcttgggcccaggagttcgagactnnnnnnnnnnnnnnncacaccactgcattccagcctgggggccagaacaagaccctgtctttaaaaataaaaacaaaacccataaaaagcagtcgttgtgtgtgacaacatgcactcagatttccacaaatataactaaaaatctgaacagagccaacgtggggacctgggagtaatnnnnnnnnnnnnnnnnnnnnnnnnnnnnnnnnnnnnnnnnnnnnnnnntctcgggagttgtgctttaaatgacataaggaataagaaaatgtccaacccagtgggggcttcaccttggagttctagacttctnnnnnnnnnnnnnnnnnnntgtnnnnnnnnnnnnnnnnnnnnnnnnnnnnnnnnnnnnnnnnnnnnnnnnnnacatctttatggtttttagcctgtccggaaatttttgcgtggatgcgcactttgtaagtagaacattgttaagtgtctatatgtagga

SEQ ID NO: 1673 - DNA, 688 bp, Macaca Fascicularis
  misc_feature (1)...(688): n = A,T,C or G
tgccttagccaccggagtagctgggattacaggcgtgtgtcaccacacccagctaattttgtatttttacacatttttgtttgaggtggagtcccgnnnnnnnnnnnnnnnnnnnnnnnnnnnnnnnnnnnnnnnnnnnnnnnnnnnnnnnnnnnnnnnnnnnnnnnnnnnnnnnnnnnnnnnnnnnnnnnnnnnnnnnnnnnnnnntaatttttgtgcagatggccatgttggccaagctggtctcgaactcgacnnnnnnnnnnnnnnnnnnnnnnnnnnnnnnnnnnnnnnnnnnnnnnnnnnnnnnnnnncttcttaaatattactgttgagccatatatacgacagtggtggactttgaatgtctgcacatctgtagtaaaatgcaatgctaccttcattttttgttggtatgctaaagaaattttaaagtatctcacttttttaaaaattggtttgtgtattttatgtgtttacacatttttctatagtactgtagatcattttagtgatgaaatttgatactttcgacagaaaaacaggtcaatgagttttgggatcaaaaaggggttgattacaaaagggcaggagggaattgttagagtgattctgcagttctgcatcttgataatggtatgactacgcatttgttgaaccttaacaggatgaattttactgaatgtaa

SEQ ID NO: 1674 - DNA, 855 bp, Macaca Fascicularis
  misc_feature (1)...(855): n = A,T,C or G
gcagaaagtttgtgttgagccgctgaaggaacagcagagcnncctgcacnnncagcaaggggtcggctcccaaaggaaaggtccttgtgtaacatttggagaatcttctttcatccagacaactctactcgaagcaagatgaaagcaggatgtggcagttccagtgagaaaggaaaggaaaaagacgggcagactctgctttctggaaattttttcatgaagtagagctcgtgaactctgtgctgtcttctggtaacatatcatcagtgtttgtattcatgagtggcacatggatccatgcattgggtaaatctggggggttttacacatggtcagaatgtatttaaatacatctcatgatggagacagtaaccaaggtaatgttttgtttcagcattttgaaaagacttaacatttatctcagaatcatgagcctctctctagttgacaattgtcattgttccccccagccccaaattcaaccatacatctattttccaaaacagaaattgtttctgtaaacatatctcaccttcaaaagaagtgtgaggttggatttttaccccttttatttgtcctaagattccagaaggctggcctcccagcccagatagctcagccacctcacctgcctatcattcctgcattcctactttgagggtctcatggtgcccactgggtgttgttcctaagaaattgattgattaaaaaatttcccaaagtatcctgaagtgtctcttcaaatacatgctgatctgtggagttgattcctttccttctcttggttttagacaaatgtaaacaaaactctgatccataaaattactatgctgatagagcggtgagggctggaag

SEQ ID NO: 1675 - DNA, 771 bp, Macaca Fascicularis
  misc_feature (1)...(771): n = A,T,C or G
catgctaaaggagtcttatannnnannncataaatggagaatcagtaattccttggcttaaagctcttatgtaatcaatattattggtgataaataatcaagtttggtatctcatagcgatctttttttttaagaaatgaagttcttgaaaatttagccaaattccgtnnnnnnnnnnnnnnnnnnnnnnttcattttgttcagtccctttgttttatagttgagaaatctgaggccttacgaaggttaagagaactttccccatgtctcacaggtaggtagaggcagagctggaactagaaatctgttgactctagctcagtgtcttttctgataacttgaaaattgtcttagtttgagagatggctgaaataatgaacataaaatgctatttataataacaagtatatgtgacatttcctattgtaagactactgccggcttactgttgaatagtttggttatagtgtttaggctagacatgcttcccacattggtaataaataacattacaaaatacaatgtatttttaggtaggcattttataaaatgcattatgnnnnnnnnnnnnnnnnnnnnnnnnnnnnnnnnggtagcatctttaaaatgtatgtgggcttaactgttgttcatatcaggagatgctctgattgtatagatgagactgtttctgttatttttattgctgtatgaaatgtgatcagattattttactaccaacagttatagtttgaaactgtattagttgactgataatatgataatatagag

SEQ ID NO: 1676 - DNA, 718 bp, Macaca Fascicularis
agctaaaattaaaaccgccaagtggcttttttccttctctgctggtgacttgcagcctgccagcactgtaggcttggggtgggggggcagggacaggataaagtgctccaccttgtgctttgccagcacttttcgaagggtcttctgcttttttttatgtcttggacagtgagtgggtagttcctgttacggttccagagaaatccatgtgtagtctccaccaggtagtgaggtcccctcctggggagaggtgccttagagctgccctggttccacctgcctctccttccttcaggacggctgagggacagtaggctccccccagcgcctggctgctggggccagcaactgtggcctgggctgctttccagctgtgagctggggctggctactgctgtttactggggtgtctggtccccgtccaggaggcctgtgctttgctatgggtctgccgggcttgagggagccctcagaagcaaggcaagcacagtgcgtttcctcagccaagccctaaacttcggctcaccaaaaggaggacatcttttttgcctttgtccttaactgacagaatgggggcagggcctggggcctggctaccctgtttgaccttggtttcacctcattgcttcccccacaagcttggtttccctggtgggctcattgggcggttaattagctctttgaagctttggaagtggcaaagtggcgctatgtgggt

SEQ ID NO: 1677 - DNA, 728 bp, Macaca Fascicularis
  misc_feature (1)...(728): n = A,T,C or G
tgatnnnnnnnnnnnnnnnnnnnnnnnnnnnnnnnnnnnnnnnnnnnnnnnnnnnnnnnnnnnngtggaggaatgtatgtcatcaacctccataaggcattagcatccctagccacagccactctggagtctgtcgtacaggagagatttgggtctcgctgtgctagaatannnnnnnnnnnnnnnnnnnnnnnnnnnnnnnnnnnnnnncaagtggaagnnnnnnnnnnnnnnnnnnnnaaggaggcgannnnnnnnnnatannnnnnnnnnncagaaaatttcatgtcactccaggaaattcccaaaacaccagaccatgccccatccaggaccttctatttatatactgtgaacatcctgtcnnnnnnnnnnnnnnnnnnnnnnnnnnnctataagagcatagccaacttgatagaaaggaggcaatttgaaaccaaagagaataagcgtctactagaaaaatctcagagnnnnnnnnnnnnnnnnnnnnnnnnnnnnnnnnnnnnnnnnnnnnnnnnnnnnnnncaagaaatagaggagatgatcacagnnnnnnnnnnnnnnnnnnnnnnnnnnnnnnnnnnnnnnnnnaacaannnnnnnnnnnnnnnnnnnnnnnnnnnnnnnnnnnnnnnnnnnnnnnnnnnnnnnnnnnnnnnnnnnnngaagagacagtgatccagaagcatcttcctcaaaagatctggggggggatggaaagcaaa

SEQ ID NO: 1678 - DNA, 765 bp, Macaca Fascicularis
  misc_feature (1)...(765): n = A,T,C or G
gtcattgatgacaccaatgncannngactgcagctggagacagagatcgaggctcncacagaggagctgctcttcatgaagaagaaccacgaagaggaagtaaaaggcctacaagcccagattgccagctctgggttgaccgtggaggtagatgcccccaaatctcaggacctcgccaagnnnnnnncagacatccgggcccaatatgacgagctggctcggaagaaccgagaggaactagacaagtactggtctcagcagattgaggagannnnnnnnnnnnnnnnnnnnnnnnnnnnnnnnnnnnnnnnnnctgagacgacgctcacagagctgagacgtacagtccagtccttggagatcgacctggactccatgagaaatctgaaggccagcttggagaacagcctgagggaggtggaggcccgctatgccctacagatggagcagctcaatgggatcctgctgcacctggagtcagagctggcacagacccgggcagagggacagcgacaggcccaggagtatgaggccctgttgaacatcaaggtcaagctggaagnnnnnnnnnnnnnnnnnnnnnnnnnnnnnnnnnnnggcgaggaattcaatcttggtgatgccttggacagcagcaactccatgcaaaccatccaaaagaccaccacccgccggatagtggatggcaaagtggtgtctgagaccaacgacaccaaagttctgaggcattaagccagcagaagcagggtaccctttggggagcag

SEQ ID NO: 1679 - DNA, 694 bp, Macaca Fascicularis
  misc_feature (1)...(694): n = A,T,C or G
attgctgaggtaggagcactggnnnnntcgcnnncctctttgcctccttttgggggataatgaggactgattattcctcnnnnnnnnnnnnnnnnnnnnnnnnnnnnnnnnnnnnnnnnnnnnnnnnnnnnnnnnntctcagcttaaccttcacagtagatctcatcatgcccagaaaccctgtaacaggagcccagctaggtaggcnnnnnnnnnnnnngctggacaaggttttctctctgaccttgcagggatttagttgttctctgaggatctaannnnnnnnnnnnnnnnnngaccagcagctgtccttttaccatcctattaacagtctctttaatagtctgggagaaggacatgaagggcccaaggcaggaagtttcctgtttacnnnnnnnnnnnnnnnnnnnacagctaggtggggtgtctacagtttcagagaaaagtcatttccttctgagaccctgctaaaacagaaaccagacgcctcatgtacctagaagtagatgcttttttttgttgttctttaatgaaggtgggagnnnnnnnnnnnnnnnnnnnnnnnnnnnnagtcctcctggaaaaatgtcacttttcttgaacagaccctctcactgatgtctaaaagtgtaatannnnnnnnctcaaggggtttgaaactgattgattctttcagtaattgtttattgatgcc

SEQ ID NO: 1680 - DNA, 150 bp, Macaca Fascicularis
ccttttttttttttttttttataatagtcattccaaatatgagatgcaatgttacaggaagtgcccatgccctcgtgaaagccaccccatttctgtgtaaggagaatcgctcagtcctctccagagtccacacaggggaggtgatcgcat

SEQ ID NO: 1681 - DNA, 778 bp, Macaca Fascicularis
  misc_feature (1)...(778): n = A,T,C or G
tttcaccaactgtatggaaaatgttcattttcccatataaccatacctacacttgatagttntatctgttgggcgaaaaagaatctattcttattttgcatttccctgactataaaaaaaaatggtgagattggggttattttcatgtttattggccatttatagtttactgtggattgtttgtatcctttccctgctttctactgggttatgtgtgggtatcttgtttttgtttgttcagcatctccttccccaccttctggtaatacaacccttatttatttgtggggaatccattctctgtggcttaggtgagtacatgaccaggcctggcctcctgagtcccacagcttcctagccacagtgattaaagaatgggtatataacttaagccaggctaaggagagccctcaacagaacttctgctgggactattggaaagaaggctttatggagatcccaggaatcaaggaccatgtaaacctgaatttgtgccatgtggagagagtctgtttgaggagaaactttggatnnnagcagaaatggaaagagaactaagttctgatgtcatttttctggaggccctagatccagctgtgcctaaagcctgccctacctccggactttaaagttttgtgagccaataaagtccctttcttgtttaagataattgaattgggtttctgttctgattaatataggttatttgtattttcttattgatttgtagaaannnntttgtaattttaaattctagactttatgcactatataagta

SEQ ID NO: 1682 - DNA, 2301 bp, Macaca Fascicularis
ttattgtgtaagctcttgggcattatacaacaaataatctaggatttatttggtattaataatttaggtatcatattagctgaatactatcctctattacataacataatatactgttgggttagtgttagtttctcaaactctcccaggctgctgtaatgcatgtctgacctaatttctatttctcttggaggaaaatacacatacacacacacaaacacacgcacaaacacacacacacacacacacaaacacacaccacagaaatgttgcattgagaatgctacatttcaaattgactttacccttgcaattttaagctatgccctattcagattaattttgtgagtgatatctgcatatgtttctgtacagtatgaaatgactgattctgtagtgtagtacgtgatagagctctacttgttaaagtaggttagatatagacactaatgtgtgtaatgatagtgtcctgtgtttcttagtgcaaatctgtaaaaatgtccatagaacttttacttaaaaacaatcctgtgctagagctgccattaagcgtgcaaaattaatcggctgtatggtagattcttgaccttaaatttaacaataacaacccaaatcagattattaatttttttttttttgcgagtcttactgacctaagaagcattgtttaaattgtttaaatggattctacctgcagttatttgtgtacctgtttgttggggtgtgcattcttgtgtgtgtgtgtgtgcgtgtgtgtgtgtgagagagagagagagaatctcagtctgccagatagaattttataggcttagtgatgttttaatgttgcttggcatcccattgctctggcctcttctggaatttaccaatgacccttaccaaacacatctacccatgtgaccaaagtccactgacacaagaggccagaattcatacttgcacattaatgaaaagtcacaactggaaagcacagaaagttagagctgaaagcagcctccggtggcttcattttgtagattagtccattttgtgattctgcagacaaggggggatatgaactttgcactgcagtgtcttcttgttccatcctaggtctgtctacatctctatctggctatgatcctttctagggttgatgaataccctttattgagtcaactactacttcaaaggattttttttgtaggtttatgtactcattttagttagcatctacctctctgggaaaaggagggttgacttagggatgagtatagatgttgaaagacaactatcaaaccatgtggtttgagtttttaaaattgtaaaacattggtgtccaaacctcccaccccacttgtatgtaaaggacagtgagtgttgtgtaaatagtaaactataagaagcatgagttttcatctttattaatgatcttgaaataagtaagagaatgcttaatatgttaagtagagccaagaatgctactaagaagcattgtctttggaaaaattttgtataatgacttggggcataagttgtgatgaaaaggcaactcggtttttggttccagtcatacttagtgatcagaaagctctaagatattttctttaaaaatagaattaagtttaattttttgcatggcttacagattgggtcccttgaaggttaaaccatgtgatggtataacccgtgagatcttctagatgggctgtgttcaatagggctttctgtgatgatggaaatgctcgaaaacctgtgccatctggtatagtagccaccagacttttaggcagttaaaatggggttactacaaggtaagaactggatttcaaattttatttaattttaattagctgaaatataaatagccgtatgtgtctagtggttgccatattgaacaatgcagttctaggtgattgtgcttggagatctagcatcaaggtattaatggcgtagcggtgaggctaagaaaagagtttgtgggctaggaacatgcaggtagaaaaaggcaaaaaattcctttctgggcttaaaaagtgtatgatctcaagtatgacagtaaaaattcattgttgccctttggaactgttgcttatagactttagaccaaggaatgatcagtgaagcttaaagagtgctttattaagccgcttttctgggatcattagttgcatgtgaacctgttgtccaaaaatagtagttagacagtagctgtaaaacgtttgacttgcaagctatgcatgacccgtactgtgaaattgggtcttgtggccaaaaaataaatgttacaaggaaaaaaaaaaaaaaaaaaaaaaaaaaaaa

SEQ ID NO: 1683 - DNA, 355 bp, Macaca Fascicularis
ttggtctcaaatggttaagaaaaagccatatgataatggtggtacacacacgtaggcatgcacaatgcagaaatatgaagtgtaatcaattgaacaatcaggatgaagtgaacatgggagttctttgtactattcctccaactttttggtaagttcataacaagttactttttaaaatctacatataatgtacaatgtctgaaaggctacatgagaaaatgctaactagctcattacccctggtgactgagcttaaggccaggggggagtcttatttttcactttgaactcttctgtaaattgttttttgaatttctacaatgactatttattactttcttaatataaaattaaa

SEQ ID NO: 1684 - DNA, 1032 bp, Macaca Fascicularis
  misc_feature (1)...(1032): n = A,T,C or G
gagcagatgcagcccacgcaccccnnnnggctgggcctggcnnncannnnntccgtgtnntactatgagatccagaatgcacccgagcaagcctgnnnnntagccaaacaagnnnnnnnnnnnnnnnnnnnnnnnnnnnnnnnnnnnnnnnnnnnnnnnnnnnnnnnnnnnnnnnnnnnnatgcagttgctgcgagacaacctcaccctctggacgagcgaccagcaggatgaagaagcaggagaaggcaactgaagatccttcaggtcccctggcccttccttcacccaccacccccatnnnnnnnnattcttccttgccacaatcactaaatatctagtgctaaacctatctgtattggcagcacagctactcagatctgcactcctgtctcttgggaagcagtttcagataaatcatgggcattgctggactgacggttgctttgagcccacaggagctccctttttgaattgtgtggagaagtgtgttctgatgaggcattttactatgcctgttgatgtatgggaaatctaggcgaaagtaatgggggagattagaaagaattagccaacacaggctacagttgatgtttaaaagatccatttaaaacaagctgatagtgtttcgttaagcagtacatcttgtgcatgcaaaaatgaattcacccctcccacctctttcttcacctaatggaaaactgttaagggaagctgatacagagagacaacttgctcctttccatcagctttataataaactgtttaacgtgaggtttcagtagcgccttgtttttgcctctttaaattatgacgtgcacaaaccttcttttcaatgcaatgcatctaaaagttttgatacttgtaactttttttttttttggttgcgattgtttaagaatcatggatttattttttgtaactctttggctattgtccttgtgtatcctgacagcgccatgtgtgtcagcccatgtcaatcaagatgggtgattatgaaatgccagacttctaaaataaatgtttggaattc

SEQ ID NO: 1685 - DNA, 2266 bp, Macaca Fascicularis
acaatcacagtgactttgcacaagtgggggcatttctaggcagggaagagagaagacattgtcctcacaacaggtcctctggtgctctgtgcccgcctctcatgcctgacaccattggctataatgtttacagaggaactggcctctttggttttagaggtatttttctggatggtcctgaagattggatactatttctctcctcagtccctcccaccctcaaaagacctgctgtgccaaggagaagttgagatcacagggaagaagacagccagacttgggaactgatgaagaaacaaacaaaaaagtcccctttgcccagagttgaggagcagttctggttccagacacccatgctgagaaacttgaccagcagaaaacccagtgggggacggggtaggagattcacaggccactcaaggcgggggtgtgtggaggctgtttgggttggctcctgtatcggacctcctggagggaggatggagcagagctgagcattggccactgctgtctgtctctgtttctctttccatttctgccccagtgttgctcaagctagcagcaatttagatagagcccagtaagctacttctaacccttagcaggtccaggatgaggcctttccttgagaaccatctgttaatccagtctgctgactgtctcatcatttttttttcctgctatctttgcacagagaggacatatgagtgacttcaaataactcagcataggactaacagggacagccccataaacctgtttccttcataccttagcttccctggtgggacttaactttttttccccttgatgaaaggaaatgactatgttctgatcattgttggcacagaaagagagataactaaattcctggccttttgagaagagacactatcagccttttctttcttggggcccagggatgtcttgcctggagacaggtaaatggacaggatggtgtctgtatctcctagatgggtagcctgggttgcggtgcaggaaagggcttgggggccagtgctctcactggtccctttcctaggttaggaaaggtaggcttagggtgtcactgttttggaagtcagatctctagttagattccatgtcacctctccaattcaaactcactccattaattttcccggggagtacagcggatgccttcatagggctggatcttcccagcaggctgagacttggggcttatgaagagggaacatggaaaagttgctgacagtccttacacatgtcgatgactcagtctgaatccctctctgaaatctaagtctctccagatgttgacctcggctggaaagcgggggccttttaccctgttcccatgcacaccctgtcttctctactgctgctgctgctgctgttcgaacaggccaaaggggtgtggggacagattggaggaggagaaagtggctgacagaggtgcctcaccaagggggcagagctctctgaactcagaacacattcactgtcttcagtagggaataagaagaggccagagaccaaggcctaggggtagtttgcagagcaaaatgggggaaggatcttaactccatacacctttttttcatccagttctggaggtataggcagcatcttggttctgaggatggcctggagtctgtctgaagatatggtggtgttccttcccatttttccatcaggcttctctcctattctttctgctgcattctcaaattgtttttcagtaaacaatttctgcttttttcaggagagagattggggtgcttaaagtgagagatttatcacaagagcaatggtcatgggaggctcttagggtctaccttgtcctgcttctttgggagccaagaggcttatctcaggggccacacctgggcggtggaagagccaggatagtgacaagattgccgaccccaggccaaggactgcctgctgcaccatagtgccttccctactcgacttaaaaacaaacctgtccttgagtctccactctattagccttttctttcatgcatgcctgctatgatcacagtgaaggaacctaatattaaagagggagaactggaaaaaagtagtcctttttagaggcagagcatgaatttggatgacctctggacaactttcaagttctcattttgagagcattcaaactttcatttgcttttaattattttcagacttctgaaaattgatcatttctgttccttttatctttccaagtcccactaacaataaaactacatggtataatggtgaaaaaaaaaaaaaa

SEQ ID NO: 1686 - DNA, 818 bp, Macaca Fascicularis
  misc_feature (1)...(818): n = A,T,C or G
caggcgaggaaaaatgtaagtcatttagaccaaagccaagcagtttctttgcgtgggttactcaagggcttgtggttacttgtatctcctctatgtgaacttgactttgaaaggcagagctctagtgtgccagcctgctaggtcctgtaagaatagggaaggggcagaggtgggtgggcagtgactaggggacgagaagcatgggaaaatatttgcactctaaacatatagagatagaggtgggacttgtggtactcaacacttgtagccttcaattgactgaggctttgggctaaatcatcaattgtgctgatatccatctcattatggaatgttcctaaatatgccaggtagacaccagcccaagtaccctcctccagcagtctgtgactaccttgtcactactttaggcccactccacaaagcgcatctctggtttgagaaattcattttgatctgtatctacaccacccaaagttaggcctcctatagtgtccaaaacattcctttcagccttatttcttactgtactgtctatctgcagtaattcaggacccataaaatttagataactacatgtctttgctcttagaattgtcactcnnnnnnnnnnnnnnnnnnnnnnnnnnnnnnnnnnnnnnnnntgtgttgatctatgtaaaagaatacaattcttttttatgtaattagtgaaattttattttttattaggaaacactaaatagtgtaatatttcttttgctttttaaaaaattcctggtagcaaatcaagataaataattgcttaattttcttgagcaatactgaagcaggatgaa

SEQ ID NO: 1687 - DNA, 1211 bp, Macaca Fascicularis
  misc_feature (1)...(1211): n = A,T,C or G
gacggaagagggccgctgagcttactnnnnatagaggagtgagcagaggtgggcagcctttcgactctgtccatgaagggtggcagggtcggggtaattttggggcctgtttcccggcaagccgagctagggtgaaaactgggggtgcaccaggatgtgagacagaaaagcagaagattagactctgtccattcacttttcctaggcccatcctgtggtcatctttccccctcccatcttacctcctcctttctggagcctctgccgacttggctgtaannnnnnnnnnnnnnnnnatatttcagtgggaggacgaaaagcgagactcaccctatgtggtgggacggatggggagaggaaaaaggcagagatggccaggagaggggcgcaggacaaaccagagaggttgggtcgggggaagaaggcagggagaaagaggggtgcaggccctgcaggccggttagccagcagctgcggcctccctgggccnnnnnnnnnnnnnnnnnnnnncagggtacnnnnnnnnnnnnnnnnntcataggatttgttcacatagtgttatgcatgatcttcgtaaggttaannnnnnnnnnnnnnnnnnnnnnnnnnnnnnnccatataaataaagataaatatatatatatatgtatgtaaattatagcactgagggccctgctgccctgctggaccaagcaaaactaagccttttggtttgggtattatgttttgttttgttatttgtttgttttcgtggcttgtcttatgtcgtgacagcacaagtgccagtcggattgctctgtattacataatagtgtttttaattcatcgatgttctagttaatgtctacctcagcacctcctcttagcctaattttaggaggttgcccaattttgtttcttcaatttaactggttactaacaagtacaaatcaatatccatcacaatctctcctccccacctctcacccttgccctctccgtctgcccctcccgccctcccctcctccctctggctccccctctcatttctgttggctccattctctctccctctctcctgcctcctgctgcccctccccagcccacttccccgagttgtgcttgccgctccttatctgttctagttccgaagcagtttcactcaaagttgtgcagtcctggttgcagctttccgcatctgccttcgtttcgtgtagattgacgcgtttctt

SEQ ID NO: 1688 - DNA, 777 bp, Macaca Fascicularis
  misc_feature (1)...(777): n = A,T,C or G
tcaaaggaggcagcactgnnnnnnnangnnntctttncagnnnactctacctaaagtgcactaccannnaagaagacgagcagtgaaaacctttgtgaaanctgaattctaaggaaataatgacgtcatgacttattaaaagctgaaaaatgtgatttttggggggagtcagatattacatttgattagtttactacaattgtaataaaatgcttaagtcatttgaataataaacatcatctacatcataaactctgtacaacagatgcttttatgaaatgaagccagttgtttttcatgttttattgtaatatactaggcatttatgtattactgtgcatttctttttaaatgtgtaagtcttatgtaaatggatataaatatgattttttaaaaaataaaatatatggttcatggagtctcgagtgcaaacatttgacaattccaagtactgtttgtattttaccattccaccatttttacagtttttgaattgttaatnnnnnnnnnnnnnnntttccttgaagcatgtttcatgcttcaacatgtttctccttcaagtctgtcaatnnnnnnnnnnnnnnnnnnnnnctctgatcatgtgaaannnnnnnnnnnnnnnnnnnnnnnnnnnnnnnnnnngagctttaaaggcaatcagggatgtcctatatctttagaaatagcactgtgatggcttgatctccttttcaatacaaaacaaagccaagctgtttacaagagtcaaaagcaattannaaaaattnnntaaaaaac

SEQ ID NO: 1689 - DNA, 1771 bp, Macaca Fascicularis
  misc_feature (1)...(1771): n = A,T,C or G
ctgccaggtgcctgggtccactccgattgctttatttctctggtggagccactgtggttcacatgttggagctgggaagagttccatctggctcacagccaaggaggaatggagagttccttcagacttaggtaggctgacaatcaacatcactgctcccaagaaaaaatgttttgagtcatggcccctgggtgggattggaacccgtcagtttctgcccagatgtgcctgcttcatgggaaccagatgtgctaaaaagcaaaacacaggccagaaaacctgccatgtgtctaaagaggctgtctggagtggtcttcccaagggcccacatagctttgcgtgttctccagtggcttgactgaggaaaccctaacatgcacacgcaggagaggaagccaagagaagtgaactggtacctaccagcagctttttatcttcaaagcttttctgcaaggcagggatttctttttttttttttttttttgagacagagtcccattctggagtgcggtggcacaatcttggctcaactgcaactgcagtcttagcctcctgagtagctgggattacaggtgtgtgccaccacgcctgaatttttgtattttttatagtgatggggttttaccatgttgaccaagctggtctcaagtgatctgcctgcctcggcctctgtaagtgctggaattataggcgtgagccaccttgcctggcccaactcacttaacttctacgtgtttcactctcatctgtaaagaagataaatcatctgatgactggaggattagaaatcttgcatgtggagttgcagaggaacgggtgtatagtaaacgctcaggaaggtggcagcttgttctcctcctcctcctctctccccccatcaccattagcagcagcagaagttggtgggtatccctcatggcatttactccatgcctgaaggagactctagctctccatgggtcttctgctaagaatataggtcttgaaaattggatagtttggaatctaaatgtcgccacattcgcccccgagggaggaagcagaccctggtggaggacctgcctgccccgcgccagcactctgcctgggccattgacatcgattagctcccatgagcctcacaagcacccgcagagtgatgctattcttaccatgttacaggcgaagaaatgaaacttcatgggaccagagctctgcccgaggagcccacaggaagagcggggatttgggctccattctgtgtgactctgaagttcagcattttaacagcaaactcctctaatttgacaacgcctggagcccgtggtgtggctcctggtgttgctgaggttgtgtaagctctggtgctgctgcagcacagtggcagccatctgggnnnnnnnnnnnnnnnnnnnnnnnnnnnnnnnnnnnnnnnnnnnnnnnnnnnnnnnnnnnnnnnnnnnnnnnnnnnnnnnnnnnnnnnnnnnnnnnnnnnnnnnnnnnnnnnnnnnnnnnnnnnnnnnnnnnnnnnnnnnnnnnnnnnnnnnnnnnnnnnnnnnnnnnnnnnnnnnnnnnnnnnnnnnnnnnnnnnnnnnnnnnnnnnnnnnnnnnnnnnnnnnnnnnnnnnnnnnnnnnnnnnnnnnnnnnnnnnnnnnnnnnnnnnnnnnnnnnnnnnnnnnnncacgcctagccccatctgggctttcctaaccaggctcccttctcgtccctccgaaaaaaaaaaaaaaaaaaaaaaaaaaaaaaaaaaaaaaaaaaaaaaaaaaaaaaaaaa

SEQ ID NO: 1690 - DNA, 728 bp, Macaca Fascicularis
ccagcacaccaggagaatggcttctcccccaagggaccctctggggacaagagtttgagccgaacaccagaggcactcctgcccttgcagaggcagaaagccttcctcaagaaagctgtggtgcagtctccgcaggtcacagaagtcctttaagaggatttgccttggatccgggcacagctgtaagggctcctctgcatcacctaccaggatgtctggaggagaaaaagacagagcaaagttggaagtggcctgggcccctgggggtgggtcctctctgttgtttttaatctgcaccttatagactgatgtctttttggctggcgccagatccgcccctcactgcactcgtgtgctcgcacgcgcagacatcccctctcccccatacacacacatacactcacagcctctctggcctcttcccttggggaggggccacctgtagtatttgccttggtttggtggggtacagtggatgtgaatactgtaaatagcttgtgctcagactcctctgcgtggagagggtgggtgcaggaggcagaccctccccgcaaagccccctggggagatcttcctctctctatttaactataactgagggggatcccaggtctggggatgggggacaccttgggccacaggatactggttgcttcaggggtacccatgccccctgcccttgcctggaatcagtgttactgcatctgattaaagtctccagaaataaa

SEQ ID NO: 1691 - DNA, 1640 bp, Macaca Fascicularis
agttttaaaccgagaatgcaacagggaaggatttcaagcttggagtgagagggaagactacgagcgtgcagtgataaggcaaagctgaagatttcagagcaaaggccacgccctacagttgccatggaatggggtggctcagtgggctttggagggaagctcacgaagagactgtcattcaccagcaaacccctgccccctcactttttcttttttgcaattggaagttcaggttgaactgctctgtagttattcacccacttctgcgggtcaaaggcccacgaggatttaaatgactaaataggccataaaatgccaaccttttagaagcgtaaaaaatgtctgctggatcaaacagtcagcatgaaccacccttagattcctctgccacccactttgctccctgtgtctgggacaccctgagtccacagtgactctgtgccaaactataaagaaaccaccatgtaccttttcaaaaatgtccacttgcccttaaagtcacgaatcaaggaagagatggcttccagatacgcaactcgacttccgacgccatcaccctctaaaatttccctgtgttttcactgaagtcatgcacccacttctgctggttcctggctcacataaacattgagcaagtaactttccattagacccagaggatggactaggatagacttctgaatgcctgaaaattcctggtcctcaacaaacctgtgttctgctcaataatttattttgtaagaagaagttacaataagtctagtcattaaatcaaaagagaaaaaccttaattaagtataatattgttggtacttgtttttgtccattccatttcttcattaactttttgattggtaaaataaagatcataacacaaatctattctcaaatgtagccatggatgatttgatttctctttctctcttttctctccctgtgcatatatatatatatacacacacacacacacacacacacatacacatatatatacacacactcagagaacagagttgtctctctatacacacacagagcatgtatatatgtgtgtgtatatatatgtatatgtgtgtatgtgtgtatatacatttatatggggagagagaaagagagagggagagagaaaatagagagagagagaaagatgctcctcaacttacgatggggttatgttctgataaacccaccgtaagctgaaaatattccaagccaaaaatgcactgaatgcacctaacctttcgaacactgtagcttggcctagtccactgcaaatgtgcttagacacttaacttgtaaatgcgcaatatttacattggtctggagctggacaaaatcatcatcacaaagtctatttcataataaagtgttgaatatgtcatgtactttattgaattctgtactgaaaatgaaaaacagaatggttgtatgggaacttgaagtacaggttctactgaatgtgtttcactttcacaccgttgtacagttgaaaacatcgtaagttagggaccatttgtgtatatacctatatgagatatatgtaaataagatatatatgtaaacaacatatatgtcaatgagatatataaaaacatataaataatacatagatctccttgttgaaaaaaaaaaaaaaaaaa

SEQ ID NO: 1692 - DNA, 698 bp, Macaca Fascicularis
  misc_feature (1)...(698): n = A,T,C or G
ccttgtttgcgggtgcggagggttcgcaactcaggagggagccnnnnnnnnnnnnnnnnnncaaagaactgccctttgacagaacagagacctcatcacaaggnnnnnnnnnnnnnnncagaagaaccgagagannnnnnnnnnnnnnnnnnnnnnnnnnnnnnnnnnnnnnnnnnnnnnnnnnnnnnnnnnnnnngacttggtgatgnnnnnnnnnnnnnnnnnnnnnnnnnnnnnnnnnnnnnnnnnnnnnnnnnnnnnnnnnnnnnnnnnnnnnnnnnnnnnnnnnnccacactctttcaggagcagcagaaaatgaacatatctcaggcatcagtgtcattcaagnnnnnnnnnnnnnnnnnnnnnnnnnnnnnnnnnnnnnnnnnnnnnnnngtnnnnnnnnnnnnnnnnnnnnnnnnnnnnnnggagaactacagcaaccttgtctcagtggggtnnnnnnnnnnnnnnnnnnnnnnnnnnnnnnnnnnnnnnnnnnnnnnnnnnnnttggttctcagaggaggaattctcaaaccagagtcacccaaaagattacagaggtgannnnnnnnnnnnnnnnaacaagaaaatcaaagacaaacacttgcagcaagcaatatgtatcaataataaaacatcgagtacagaggaagagaaagttttggggaaaccatttactctgcatgtagctg

SEQ ID NO: 1693 - DNA, 765 bp, Macaca Fascicularis
  misc_feature (1)...(765): n = A,T,C or G
ggattacaggcgtgggtcannnnnnnnnnnnnnnnnnnnnnnnnnnnnnnnnnnntagcatctgtaaactgaaatgtttgacctctgttttcttctcttgtctttcatctgtttctggttcgnnnnnnnnnnnnnnnnnnngtggggggaactctcnnnnnnnnnnnnnnncatatgcagagagtattgcactgaagatctttgctggaccttcttcagttcagaagataattttcaaaagggagcaatgctgcaaatgcaggttgcttttctctacagattgagaagtccagcttcaaaagttacttgccacttaannnnnnnnnnnnnnaagagatcatggttcattttactgaaaagactttaaggatttgtaagtttaatccatagattgctgagaacaatgacaatatgtttatttttacagattttgcacttctgaattcaggttaaaaactaacttgtatttagtctgcttagaggattgtgacnnnnnnnnnnnnnnnnnnnnnnnnnnnttttggtagcatccacagtgtttaaaatatttcataggcaagatccgtattctccatttannnnnnnnnnnnnnnnnnnnnnaactgctgtgtttcaggaaaattcttcctagtttaataagtaaattaaaagttttattttttatatttagtgcttaatctttgtctcatgttatgtagaattagcctgnnngatattttctcnnnnnnnnnnnnnnnnnnnnnnataaacatcaaacaggaaaca

SEQ ID NO: 1694 - DNA, 209 bp, Macaca Fascicularis
  misc_feature (1)...(209): n = A,T,C or G
cagccaataattcttgacgaataatcaagagtagagatgccaaggcaagaggaaaagaggaaaaaaactgtatattgttcctaaggcatagacggggcattatacagtttcgcgggccagttcaaattatgatccggtaagggattaagagtgaaataaccacataccattaaggggttcctctacagttnnntgaaaaatatttaaaa

SEQ ID NO: 1695 - DNA, 713 bp, Macaca Fascicularis
  misc_feature (1)...(713): n = A,T,C or G
aaggaggtaaagagtcctgtggaaacctctggctgtggggaccccagttcactgatgattgaatgggtctacctctgtcgaaggagttcagagtcnnnnnnnnnnnnnnnnnnnggggaatcaggctcagctgactggcccagccttaaatccactgaatttctttttatctctaaatagaaaaacaggattacagtcgcttctcagtatccagtgaggattggttcctggagccccccgaatacccgtccaggggtgatgctcaaaccccttatgtgtaacctacacgcatcctcccttatatcctttaactcatctctgcgctcctcaaatacctcataccatgtaaatgctgtgtaaacagttcttgtgctgtgttggttttttaatttgtattattttttcttgtgtttttaaaatatttttcttttcctgaatatttttgatccacggttagttgcctccatgggtgcggaacccacagacacggaggctgcctctactcaaacgagcacggcggcgccctctgggtcctcctgtggtcctgtctctggtgctgcgtccgcacggcggcgaacagcaaaactcatcttttgcaaatgatcactgtggagcggagttccgctctgtgacctttcgtcccactctggcttaccagagnnnnnnnnnnnnnnnnnnnnnnnnnnctagcctagtgcttnnncctcaggcac

SEQ ID NO: 1696 - DNA, 1387 bp, Macaca Fascicularis
agacttgcattgggacatcagctctgcagattttggggttgtcagcctccataatcattatctgagtcacctgcaggaccaaaatggaggagacaccacagcattgcctgtccagattgccagacaactctgccctgaagcagcaggagttacccgcccaccggctgtatttcacggccaggagagtcctcttcgtctttttcacaacaggaatattctgcctttgtatgggcatcatccttatattgtctgcaaggagcactcaggaaatagagattaattacacaagaatatgtgcaaattgtgcaaaactgcgggaaaatgcctctaattttgacaaagaatgcacctgctctattcccttttacctttcaggaaaaatgatgggtaatgtttatatgtactacaaattgtatggcttctatcagaacctgtatcgatatgttcgatccagaagtaatagacaactggtgggcaaagatgtaaaagctgttgaggactgtgccccatttaaaatgtccgacaataagacccccatcgttccttgtggtgctattgccaacagcatgttcaatgacaccataattctttcacacaacattaattcatctgtacaaatcaaagtgccaatgctaaagagtggacttacgtggtggacagataagtatgtcaaatttcagaatccaagttccaagaatcttgctgatgaatttagaggaaccacaaagcctccaaactggcccaagcctatctatgacttggataaaaaggatccaagaaacaacggcttcctcaatgatgacttcattgtgtggatgcgggcagctgcctttcccactttcaaaaaactgtatggtcgactcaatcgaacacaccattttatagaaggcttgcctgctggtaattacagtttcaacataacctataacttcccagtgaccaggttccaaggagaaaaatcagttgttctctccaccctgacatggtgtgggggtaatagccttttcttaggtcttgcctatacagtgacaggagctataacatggttggcctcctttaccatgatggcaattcacatcacactgaaaaacaagcaaatgtccttcttccatcagtgaagtcaagctttaaaaagaaaaggaggaaacaaaaatggacagtgaagtaacagaaccaaagatgtctgaaaggcttgaaatgactggaatgtttcaacaaggggaactagattgactgaactaaaatcaatttgaaatagataatgaagagaattttagagttaaaaagaagaaggaggaagaagagggcaggcataattatatgtagtaaaatgtccttggtatggggagaataaatcactcttgagctctaaaaaaaaaaaaaaaaa

SEQ ID NO: 1697 - DNA, 405 bp, Macaca Fascicularis
ttttggcccagccaaacaagcccagggcacagaatggaaccagaggggtctggtcagccaccccacattgagggcagcacaggcaccacagggtggaggagagggggaagatgctggaagcctccagatgcctgttggcgtgcaggagaaacctgtagcagatgctgttcttgcgtctgcagctgccccacatcttccacccaggccccaactctgaggctccacagccggccagccctcagatgctcacaaatgattcagtctccctccctcacatggggaaagcacagcagggatgcgcggcaagaatgtacctgtagatgtgtacataccacagtgttgtaattttgtatgtagcaatcatgtaaatacacgtatggattttataatatacatatataaaaa

SEQ ID NO: 1698 - DNA, 1608 bp, Macaca Fascicularis
  misc_feature (1)...(1608): n = A,T,C or G
agctagaaaagtgtgcggtgttaccccctgtaatgtatagctcctgccgcctttcctcctcttttagcaagatatgttagtctcagttaggggagtgatagaaaagcattgaattatatgaggactgtcaagtcttgtagccctgaaatgctagaagccaatccctgagtatgcttctctatgaaacagacgagtttctagggggttccaaggcttggcagttctgagcatgggctttaggttcaggtggggcgagctgttagacctctgtgtcccacaagttccccttcataacatggaaagtcagttaaagaagatagtgctgatagctctccgtcagggtgactctcttaactctccggtgtgtagcaccttgaacccaaagataaaagatggaaatttccactccagggtgaatttctccctggagagacttctgccctccccgtgggcaagctttggctctgagggccccgtgtcccctgatgcagttgggttgggtgccgggtgtgccaagtgcaaggccgcttctctctgtgctttcccgaagcttctaaatgcagcaggcactgcacaaggattacattgggttttgggtttaagtcttatttgatttctgcctaagtgctaagaatagaaccagaattatctgccagatgaaaaagctactagagggagggcggaaggccttggcagcaccactgcctggttccttcggcccagctttcatccccggcacacacttcagccgcaagcacccagttcacagctgagattgcattgagagaacaaagacggaggggaatgtggggatcaattgtcaaccgtaaagcgcataagctctggcgtcttgacatgcaatgtattctctttttgggagaagagcattgagcatgcagacctggcttacgggtggcccagagagagtagtatggtgagtcccttccccttagcaccagccctgtcctaagttaaggctcttatcagctgagtctaatgggaactggaggtggagggatgtggggggatatgggggacatggaatttctaaggctctgatttcagacaaggaagaagggaagaaggtgcagaaagtcagaatagttaggtgtatttattgcagattccagaacagggctgccctgtctcccaaatctaaaaattgctgcttaaactgtttcatatccattaaactgatgcctaaattccaccaatatctgttaataagtacccatccattgtccaaacttttgaggtgaataaatgcaatcgaaagctttagcatctggactgagtacagtggctcacacctgtaatcctagcactttgggaggccgaagcaggtggatcacctgaggtcaggagtttgagaccagcctggccaacatggtcaaaccccatctctctcttaaaaaaaaaaaaaaaannnnnnnnnnnnnnnnnnnnnnnnnnnnnnnnnnnnnnnnnnnnnnnnnnnnnnnnnnnnnnnnnnnnnnnnnnnnnnnnnnnnnnnnnnnnnnnnnnnnnnnnnnnnnnnnnnnnnnnnnnnnnnnnnnnnnnnnnnnnnnnnnnagagcaaaattctgtctcaaaaaaaaaaaaaaaaaa

SEQ ID NO: 1699 - DNA, 736 bp, Macaca Fascicularis
  misc_feature (1)...(736): n = A,T,C or G
acaaacgatcactattttcttgaccnnnannnacggtnntgggagatgtatttgggtttagcgtggtcgtatgttgtttactacagtccaagcgaagttcgagtggtgnnnnnnnnnnnnnnnnnnnnnnnnnnnnnnnnnnnnnnnnctgatggcaagtatgtctatgtagctgaattnnnnnnnnnnnnnnnnnnnnnnnnnnnnnnnnntgctaattggactttaactccattgaagtccctcgactttaataccctcgtggataacatannnnnnnnnnnnnnnnnnggagacctttgggttggatgccatcccaatggcatgaaagtcttcttctatgactcagagaatcctcctgcatccgaggtgcttcaaatccagaacattctaacggaagaacctaaagtgacacaggtttatgcagaaaatggcacagtgttgcaaggcagtacagttgcctctgtgtacaaagggaannnnnnnnntggcacagtgtttcacaaagctctttactgtgagctctaacagaccgnnnnnnnnnnnnnnnnnnnnnnnnnnnnnnnnnnnnnnnnnnnnnnnnnnnnnnnnnnnnnnnnnnnnnnnnnnnnnnnnnnnnnnnnnnnnnnnnnnnnnnnnnnnnnnnnnnnnnnnnnnagcactgtttaactgggagagatatgacgtgtagggctttttttggagaatacactatcaaatcagtcttggaatacct

SEQ ID NO: 1700 - DNA, 703 bp, Macaca Fascicularis
  misc_feature (1)...(703): n = A,T,C or G
gattgactggnnngctccgcaaggcaagtagtggcgnnnnnnnnnnnnnnnnnnnnnnnnnntgaccacactgctgcgggccctggcccaggccgcacatacaggacctcctggtggccggaccctccacannnnnnnnnnnnnnnnnnnnnnnnnnnnnnnnnnnnngcaggagtctaannnnnnnnnnnnnnnnnnnnnnnnnnnggcagcccgnnnnnnnnnnnggactgagctcttccgaggcctgggcatgaccctgagctacctgttccgcgaacccgccaccatcaactacccattcgagaagggcccgctgagccctcgcttccgtggggagcacgcactgcgccggtacccatccggggaggagcgctgcattgcctgcaagctctgcgaggccgtctgccccgccnnnnnnnnnnnnnnnnnnnnnnnnnnnnnnnnnnnnnnnnnnnnnnngaccacccgctatgacatcgacatgaccaagtgtatctactgcggcttctgccaggaggcctgccccgnnnnnnnnnnnntcnnnnnnnnnnnnnnnnnnnnnnnnnnnnngacgcatgagnnnnnnnnnnnnnnnnnnnnnnnnnnnnnnnncaatggggacaagtgggaggccgagnnnnnnnnnnnnnnnnnngctgactacctgtaccggtgatgccccaccggcccacaacccctg

SEQ ID NO: 1701 - DNA, 704 bp, Macaca Fascicularis
atgtgaaatgcgaatcatctcgaaagcgacacgaataatggttgtaataattgttgccacgcttgggaccctgcatcttgttttttaagttgacccgatgaactagtaattgtaggaataaactgaatgtttgccagcaggagtcactctaggcttcttaataaaaagttagtaaattaaactcttgtccttaaagccctcaaacgctgaggtgattgtgtgatatcagatagctttagggaaacactgactcttttggttaagcatagcagcattcttaaaattattccttgggccttcttttgttcaccatcggttcttggatcttgttcctttcgagattggtccctaatgcatttttaaaaagcaacgtatatgggtaagggtatcagtatcttagtattctgtattctgtatgttagttcattttggctttcttaggatgaattgactctatcccacatcatgtaacttgaaatgaatagactcatatcctttccagtgattggtgtccattctaatcatgcagcagaactcagtggagtgagctgtagtgtgaaaggagatgtccgttcatgcttttctgaaaagaatgggtcaagtgtgatgatattctgaaatatttcagcaatagccatgaaatgtaatagtttcccaagcgcacaaaactcaagaagttaattgttcatttatgtttgatactg

SEQ ID NO: 1702 - DNA, 1757 bp, Macaca Fascicularis
  misc_feature (1)...(1757): n = A,T,C or G
taagcaatgaaaaagggctttttggtatcaatctgtgttatgtatatattattaaccatatatttttatataggtgtaaatttcccaactatttttaatatgagattgtgtcctttatttagtgttaaaaagatctgacattttaaaaaatcgtggtgatagtttaatgtctttatttggtaaaaattaaaagttgacagaactatagttttgaaattttactgatcaaagaagttgaaagcttcagccataggccaaaagaaccaaattaatagctgcttgcctgggttatcaacgcagcctagataagacttgtggcactttgcttaagccgtactggcaggatggttgtccagatacatccttagagatgtttctttctaggaggagacatctgagggcttctggcattttcttttttttttttttttttgaacaagacagagtctccttgtgttgctcacgccagtctcaaactcctggcctcaagcaatccttccacttcagcctcccaagtagatgggattacaagtgcaagccacagtgttggccagcttcctgcattcaatagtattgagtcttcaaagatgaaagacagtgtgtcagatggacagccaggaaagtgggctttccacacagatgatataatacagtacttccaaaggcatgcctatgcggaagtctgatttgttggacgaactaaagtcattcaggggccagaatatgcaggtgtcttagaggagtaacgagataaaattggaagaataggcagatgtgaaattatgaaggacctagaatgtctttgtgtactgtcttattatacactataatttgactaaattcagaaaaactattgaatgcctcctctgtacaaaatgtatgatacaggagatttaaagatgaataaaatagaagactttcccctcaagaatactttagtttctgttttttaactcatattctcttggacctgaaggaagactattctaaaaagtaaaatttcaggaaaaaaacagtagtaactaatggttaacagagaaacaggttaaaaatatctttgtgagatagttgattgaaaaatggagactattttgacaggccaagagcatacacagtataaaaccacatagctccaaaaggtatattcagagatgaagtgattaagtttgtctggagtggagagatttgattaaagtttgcttttagcttccgtatttccaatattaattgtagttataccatgtcagtagtgaaatttactttaaaagcctaatcagccaaagaccaccagagacaaagcctgtagtctgacaatttcagattgttatgtaacttatttaccatattgtagaagttttgataaaaggctttatttgcctgttctttagggaacccctcaacatgcctgtgacagctgaaacccttatacaaatcctttagctaataactacagcaggcactatttgtgctatggaaataaagcatgattcttagatgacatttcctctttctcttttttttccactaacctcaatctaggctcacttatctaaagaatatgaagaggataatttcagaactatatgtgcgagataactgccaccctttcaaagccactgtgttggtttggatacagcttccaatgtggatcttcatgtcttttgctctccggaatttaagcaccggggcagcacattcagacggtaattattatataagtctcccaaagaagttctttaacagtgtctttgncaaaa

SEQ ID NO: 1703 - DNA, 546 bp, Macaca Fascicularis
  misc_feature (1)...(546): n = A,T,C or G
nnnnnnnnnnnnnnnnnnnnnnnnnnnnnnnnnnnnnnnnnnnnnnnnnnnnnnnnnnnnnnnnnnnnnnnnnnnnnnnnnnnnnnnnnnnnnnnnnnnnnnnnnnnnnnnnnnnnnnagttgatagtaggctcgtgattgacgttgatagccagaatgaggctgggcctcatagcagtcccccgcacatcaaacccgaaggtttcttcctacttgcaaacacaatnnnnnnnnnnnnnnnnnnnnnnnnnnnnnnnnnnnnnnnnnnnnnnnnnnnnnnnnnnnnnnnnnnnnnnnnnnnnnnnnnnnnnnnnnnnnnnnnnnnnnnnnnnnnnnnnnnnnnnnnnnnnnnnnnnnnnnnnnnnnnnnnnnnnnnnnnnnnnnnnnnnnnnnnnnnnnnnnnnnnnnnnnnnnnnnnnnnnnnnnnnnnnnnnnnnnnnnnnnnnnnnnnnnnnnnnnnnnnnnnnnnnnnnnnnnnnnnnnnnnnnnnnnnnnnnnnnnnnnnnnnnnnnnnnnnnnnnnnnnnnnnnnnnnnnnnnnnnnnnn

SEQ ID NO: 1704 - DNA, 3120 bp, Macaca Fascicularis
ctcaaagagcttgactcttcaaagtcagcacatctggggggctccagaggttggagaaggccctgaggctcctgaggcccagggccaggatccagtagcagaggggcttgggtccctgtcagtcacctcccagcaggctgatgtgtgggtctccaaggaagatgccttgaaccccttcttgtttcaggggagccgagatcctcccagcctctcatctgcatccccgccagggtcgagggaatcttctattcattctggtccagaagagctgcccactcccccagagcctgactttccaccgccccctctcccgccttgggccagccaccacagtgggggacccagccctccatgctctcccctgtctggagcccggcccctgaccacctcctccgcaccaccaggggagccagccttacttcctggcccccttgagccctccccacctgggggctcccctgccctacttagggaggacctcgctgcagccaccccaacctccccgcttgtgcttctgcccttggagacacgaccagctgaggagccacagcccagtgccagtccccaccccgtgaagcccctcagtgccgcccctgtggagggcagccccgacaggaagcagtcccgctccagtctgagcatagccctgagcagtgggctggagaagctcaaaacagtaacatctgggagcattcagcctgtgacccaggccccccaggctggccagatggtggacaccaagaagctgaaggactcagctgtgctggaccagtcagccaagtactaccacctgacccacgatgagctcatcagcctgctcctgcagcgggagcgggagctgagccagcgggacgagcacgtgcaggagctggagagctacatcgaccggctgctggtgcggatcatggagacctcacccacactgctgcagatccccccgggcccccccaaatagccttcctcaccccacccccaggagggttggcatggacctgctgctgcccgccctccctcctgctgaactctctcatctgcagtggggcatcgtctgtcttgccttgtcactccttgttcctctccctcctgccttgactggggctgctggaaggggggccctctggattccctttggaggcatcaggttctgtgcacaatttgtgtatctttgggagccctgggtctttcccacctgcctgttttcatacccctcagctttgggggccccagggaattggaactcttcccccaagacagagcaggggtgagctgtagcttgatgcggtaatctgggacaagactggttgctagcacatactttattaccccccaaggatggtcagccatttcttcccacagctaaagccccatccccttcacttccctccaatccctggaggggcttctagtattcctgggacagcgaccacgctgcctgtttatctgtgagttatgggcaaccagggtgcctgctcttcagcctcacacccattctcctgagagcgaggagcctgtgtggtctgggtcagtctctgccatgtcctgagtctgtttcagtctggcgctgtttgtggggcgagtgccgtgtggacagaggtggatgatgtgtgtgcttcaggctgctccctgcctcctctgacctttccacaagtgtcacatgggaaagtgtggggtgcaggggcgggtgcggggagaatacctttttgctttttgagttcttgaccacctccaatgtgtagacccctccaggctgggccttggggctgcttatgttttggggatcaagcctccatgtctattcttgttgcctgtccagatgccaaaactctgtgttactgcagggtttgaacttttggaaaccaattaaaatgtgccttttgtgtgcggggtcaagagcccctggatgtcgacctctcccgctgtgtggcgtccccctcccacctgttgagtacatagggatggctctctcagggccctgggaatgggaatgggcagccctactgtgtgctcttcccctcccctggagttaatctcttgatctggccaagttgctgctccctcaaacttcctgctgtcttctcctccttcaaccccaataggaggatcccaggataaacactgctgggcaggcgggcaggcaggcaggcttggggctgccctgctcactctcattctgtttggcctcaggacttagccatgctagaccagtcagcttgcctggaagtgggaggtcccactatgcctgtgggagacacctatacttaggaaaaagcctttgttgccctcccatccatccactaagctactgtctcagcctgtcccttctgccccaggggcttgcctgcagtgcactttgaaatgaagtgtctgtcatttggcccagcccctggtttgctcgcagaaaacgtggtaggattcctcaaggcatctgcagggaactttggcagcttggggcaccctgaattagcaaaaatggggggtgacgaggtgctgaaggaggatacttatggcttagtaaggaggcaagagctcctctgggaccaccacttcttcaggagagggcctgtgggcttgcttttggaaggcctcaggcagacacgtgcgctctgggtgatgtctgtctgccgccaggatggagcagaggagcgctacacatggaggaaagcgcctgtaacgttatctaccttaaactccactcatcaaagctgagaaaagtgtccactggtccccagggtttcagtcatgcttttgggggtcattgggtattagagaagtaagtaccttttctgagagcagggagtcaccccccctactggggattcctctgggctttattcagtcccagcccagaccctgacctttgattgtgggcctccctaatgcccagggcatggatggcttcagaggagttgttgaattgaagcccagggtccttgttgatgtttcttctcctagccacacttggaggagagttgcaggtgggttgggcagggagcaggaatggttctgctttgctgtttgtcttcctagttgtaaggctctttataaagagcttgttcttcatgttttaagcactttatgaagaataaaacattcatgtactgcaaaaaaaaaaaaaaaaaa

SEQ ID NO: 1705 - DNA, 746 bp, Macaca Fascicularis
  misc_feature (1)...(746): n = A,T,C or G
gagcacactgctaagannntgaaagccaccaatgaacccannnngacacacatggactgctcgacagagcagcctgggagcatcccaggccccgagtgtgcctcctnnnnnnnnnnnntttctccctacttcaaaaaggagccggtgtaccagctgccctgtggccacctcctgtgccgaccctgcctgggtgagaagcaacgctccctgcccatgacgtgcacagcctgccagcggctggttgctagccaggacgtgctacgggtccacttctgagtgactggcctccactggaggagacccatcgctgggaggagctgagggggaacaggagcagggccaccgcacccctgaggtctggccaggccccaggcacagagctgcctgctccctnnnnnnnnnnnnnnnnnnnnnnnnncagtgtagcacactgcttctgcgctggtggcaatagggcaacaaagccataggccggagggcggggggatgtccctgccttcccgccactccccctgcctgagcccagggcctgctggagccagccccaccctaggcaggaagatgcctgctgagggccccctatgcagttcgcataccccnnnnnnnnnnngggcactgtgggtggctcaccctagattgtggccgagatctcaggagtctctgccttcagggtcaccaaaagtggannnnnnnnnnnnnnnnngtgtctgtggaacgcatgactcagccccccaactggcagccta

SEQ ID NO: 1706 - DNA, 308 bp, Macaca Fascicularis
ctgacctgtggcgaaccacccgtcttggcctaccaaactgttgggattacaggtctgatccactgtacctgaaaaagagcatgtttttgtttgggccttgtactaatgatggaaggtcagcgctgcacctccgtggaggctctgagctcagacaggggaagggacctgcaagacctctctgagccaccaccgcacccttgaacaaaccgagttcacttcaagcatgtcatgtgcaccccacacatggcatgggtcaggcgggaggactgttcccattttacagatgaggaaactgatgctgagatggg

SEQ ID NO: 1707 - DNA, 726 bp, Macaca Fascicularis
  misc_feature (1)...(726): n = A,T,C or G
gtcataaaaacaaaattaagctaatgtttcaaattttgacaattatgaattcttcctctaagaagacattaaaaaaattttcaggcactattagataaaatacaaagagaataattctacatggatgagtgtgcagttttcccacgggggtaaagcatgcctgtaaaaggaaaactctgaattaggacgttggttcctccctagatccagcaattggacgnnnnnnnnnnnnnnnnnnnnnnntggttcttatagtttctttgtaaactcagatctaattctttcataagctattgaaagagaatgaccaggaaaaaattacaagcatattttttctatacaaaagaatccccattgtgggccagtttggtaggaaacagaaacaagcaaatataacaaaatctgtgnnnnnnnnnnnnnnnnnnnnnngtatatacaaatatgtacactatacaaatgcatggaaggcttacgctcccagccatccaagcggcattgtactcggggaaaacagcctgggttttcttcctagtatacaggcaaatgtattatatacagcatgcaggtgatagaaaattagtgcgtttgcacagaaacattctacaggtatggttgcagtcatttttctttgaaaatgaccggnnnnnnnnnnnnnnnnnnnnnnntgtttgcctttcttnnnnnnnnnnnnaacgctttccttcagagcaaggatgaatgtgattc

SEQ ID NO: 1708 - DNA, 680 bp, Macaca Fascicularis
  misc_feature (1)...(680): n = A,T,C or G
ttttttttttttgcgatggagtctcaactctgtcatannnnnnnnnnnnnnnnnnnnnnnnnnnnnnnnnnnnnnnnnnnnnnnnnnnnnnnnnnnnnnnnnnnnnnnnnnnnnnnnnnnnnnnnnnnnnnnnnnnnnnnnnnnnnnnnnnnnnnnnnnnnnnnnnnnnnnnnnnnnnnnnnnnnnnnnntgcatgttggacaggctggtctcgaacttatgacatcaagtgacgcccacctctgcctcccaaaggtcagaggtgtttgaaccagagtaactccatcttcaatacaagctgagtaaaatgaggctgagacctggtgggctgcattcccaataagttaagacattattagtcacaggatgagataggaagtcagcacaaaatacaagtcataaagaccttgctgataaaaacaggatgcagtaaagaagtcagccaatacacaccaagaccaagatggcaatgagaatgacctccggttgtcctcactggtacactcccaccagcaccatgacagtttacaaatgccatggcaacatcaggaagtcatcatatatggtctaaaaatggggaggcatgaataatccacccctgtttcccatataatgaagaaatcaccataaaaatgagcaaccagaatccctcagggctgctctgcctatggagtagccac

SEQ ID NO: 1709 - DNA, 724 bp, Macaca Fascicularis
  misc_feature (1)...(724): n = A,T,C or G
tagcactgctgtccnnnctgcactatnnntcctctctgtgatgctnnntaaaaatgtttctggtctgaacaaaaccaaagtcttgctctgaacctttttatttgtaaatgtctgacttttgcatccagtttacatttaggcatttttgcaactatgtttttctaaaaggatgtgaaaataagtgtaattaccacatcgcccagcaacttaggatggtagaggaaaaaacagatcagggtggaactctcaggggagaccaagaacaggctgaataaggcatttctatggtgggaatcaagtcatagcacttnnnnnnnnnnnnnnnnnataaatttacaaatctggggaggtattcagttgagaaaggagctgccagcaccnnnnnnnnnnnnnnnnnnnnnnnnnnnnnnnnccccagacccctcctgggcagacgggtgcctctcagaggccacctgggactggcaagcggccactggccaagcctcagccccagtcccagttgcatgtcctccatccagggcagtgagannnnnnnnnnnnnnnnnnnnnnnnnnnnnnnnnnnccactgctgttttcacatcctttgccttacccaccttcaggacagttgtcacttacgaagtcagtgctaaagccggagcagttgctttttgaaagaacatagtctgtggtgctgtggtcttgcaatggacagtaaatatggttcttgccaaaactcct

SEQ ID NO: 1710 - DNA, 707 bp, Macaca Fascicularis
  misc_feature (1)...(707): n = A,T,C or G
tccaattctatcccttcattcatactgccctgtgatacacttgaagctgtgttgattggacagacgttgatcagttaacttacctttacttggcaagatggtgaaatagtaatttagtgatgttnnnnnnnnnnnnnnnnnnnnnnnnnnnnnnnnnnnnnaaaagtgaaaaggtttcttttatgggaaattaagcttgacttgcatactctagtttgatgaggataaaaagaaacatgtaattgcagtggtgtttacaaccaattgatcacaaccaatcatagatttctttgttccttccccactctcaacacttcatttgactagaaagaaaaaatgtattcaccaaggaacaggacccaattcagacttttgttaagtttctttactaaggcaatttttgaaacaccagttactatgggttggtgggaatttttcatgcttaagaaatagagacttagggccgggcgcggtggctcaagcctgtaatcccagcactttgggaggccgagacgggcggatcacgaggtcagnnnnnnnnnnnnnnnnnnnnnnnnnnnnnnnnnnnnnnnnnnnnnnnnnnnnnnnnnnnnnnnnnnnnnnnnnnnnnnnnnnnnnnnnnnnnnnnnnnnnnnnnnnnnnnnnnnnnnnnnnnnnnnnnnnnnnnnnnnnnnnnnnnnnnnnnnnnnnnnnnnnnnnnnccggcc

SEQ ID NO: 1711 - DNA, 793 bp, Macaca Fascicularis
  misc_feature (1)...(793): n = A,T,C or G
agggaatttcccannnnnnnntgtgtgtgtgtgtgtgtgtgcgcgcgcgcatgtgtgtgtgtgagagagagagagctgcagtaaaacacttctaaagggtgaaagctcttgtatggcatagataccttcctctggtaataattaggttattcccggaagcacagtgtcattctttaaataaaagctttcctgtttaaagcttttcaaaggannnnnnnnnnnnnnnnnnnnnnnnnnnngttgatatgtatctaattcattttataaaatccttcttgtcttcattttaaagctttggctatagtcagaaatgtcctaaataacaaactattttgtatttaatttagagaagagtaaagggaagaaaaatgaaaactcagtctttatgtaagctccaaggatattagggcttagagggcttttctagttttatgagaatttgtactactgatttttatatattcttgtttttgagatgaacagatctctggggaaattgttgagttacaatggcatttcactgtgatccctctcaagctcacatcagttctgtaacccaatgacgacctgtctcttcggtttactgtcctgtgaaatgtcagctcaagtttcccagaagttgtgtgtttatgatgagtcagagtgcttttcctcggtgggannnnnnnnnnnnnnnnnaattttggtgtatgtgcttcaaagtatctaaacctccagtctgatctgtatatgctatcctgttaattgtattgattattttgattatcttgcttgaaggttcatacttttgaat

SEQ ID NO: 1712 - DNA, 157 bp, Macaca Fascicularis
catggtgaccggtgtttcctccccagtcatctctcgtgctccagagagggggggggggatgtctccatctcagtctcaactatatgcgcagagaggcgcaatttcttacttccacacagaaaataagtatgagaataaaaatgtgttttctcaaata

SEQ ID NO: 1713 - DNA, 746 bp, Macaca Fascicularis
  misc_feature (1)...(746): n = A,T,C or G
agctgggtggggctggccaagcggcgcgagcagaactacggcnnnnnntncttcagttctagcgtcaacccggtgctgtacgtcttcaccgctggagatctgctgccccgggcaggtccccgtttcctaacgcggctcttcgaaggctccggggaggcccgagggggcggccactctagggaggggaccatggagctccgaactacccctcagctgaaagtggtggggcagggccgcggcaatggagacccggggggtgggatggagaaggacggtccggaatgggacctttgaccctgctgcccttccctctccctttccatcctctcaccctctggagctcagtgttctggaacatttggggacccttctttgattagagtttggatctgactgggtaggattactatacacctcaggcaggcccaggcttctccatactgagggattatgagggtggtgatggtccctgttaaggactattgcatgcttgcaagttggcatgtacccatgtgccagcacggcttacttgttgccaatagctgttattgnnnnnnnnnnnnnnnnnnnnnnnnntgatgacttatgtgtgcctcccctggtggttcttcatgcctgagttgtactgaagccacctagttcccttctgggtcaagccagggctgggcagtgccggccttcagtggcatcttgacctgccctcctcagtccaggtgccctggttccacaggccaatccatagaacc

SEQ ID NO: 1714 - DNA, 215 bp, Macaca Fascicularis
gatactgaactccccttccccagacataaacatgaaatgacttaaaaaaatataaaatattcttctcgccaggcacacaagactgtacacccaaaccaaaaacgctgtggctgtgcaaagtgtgctcccaggcctgcacacacaagctcacttaaataaataacacgcgcacgcacggctttctccatttcaaaaaagcaaacggtctggtgagt

SEQ ID NO: 1715 - DNA, 741 bp, Macaca Fascicularis
tccaagattttttttcagatatttttgatgactgtattgtagtaaatactacagggatagcactatagtattgtcatgagacttaaagtggaaataagactatttttgacaaaagatgccattaaatttcagactgtagagccacatttataatacctcaggctaattactgttaatttgggggttgaacttttgatgacagcgagggtggattattggattgtcattagaggaaggtctagatttcctgctcttaataaaattacattgaattcatttttagaggtagtgaaaacttcctttttgagatgttagtgttaaggtcttggaatgtgaacacattgtttgtagtgctatccattcctctcctgagattttaactcactactggaaatccttaaccaattgtaatagcttttttctctttattttcaaaattatttcctttgctttgattagacactatgtgctttttttttttttaacctatagttcatcgaaatgcagctttttctgaactttaaagatagaatcccatttttaatgaactgaagtagcaaaatcatctttttcattctttaggaaatagctattgccaaagtgaaggtgtagataatacctagtcttgttacataatggggatgtggtttgcagaagaattttcttaagggatgtcagtgtttatgccatttttccagttccaaaatgattccattccattctagaaatttgaagtatgta

SEQ ID NO: 1716 - DNA, 673 bp, Macaca Fascicularis
  misc_feature (1)...(673): n = A,T,C or G
nnnnnnnnnnnnnnnnnnnnnnnnnnnnnnnnnnnnnnnnnnnnnnnnnnnnnnnnnnnnnnnnnnnnnnnnnnnnnnnnnnnnnnnnnnnnnnnnnnnnnnnnnnnnnnnnnnnnnnnnaacagggtctctatctcctgacctcgtgatccgcccgcctcggcctcccaaagcgctgggattacaggcgtgagccaccgcgcccggcctttgctgcttagttctacttaattttttgtgttgctgcttcttaaggtgagatagcataatcttaattgttttgagatggaattttaaagtaacacactaccagcaagttcaatattgctattgattttaatctgttttttttttttgttcagttgatatcttaaattccaaattttatagtgataattgtatattatttgactgctgaattctgttacagtttttttattctgttgtacattgtattatacacatcgtcacaaattaatatgaaggtgaatatatgttacatatcaagatttgtgaatttgaattatagtatgttttagtgctttagcaaaaaatgtttatttttatattatctgtgattttaatatagatgattgaactagatttctttttgagtgatagtgccattgaatgagtggtgtggaaacacgtgttacttgatattttgagcttt

SEQ ID NO: 1717 - DNA, 733 bp, Macaca Fascicularis
  misc_feature (1)...(733): n = A,T,C or G
ttttacttacagaaatttacttaaacttatacacacattaattatatatactaaatgaaaacgaccttatctgaaacaaatacattgtataatatcaaaacgtttttagtcttttttaaaaagcaaaaagtgaaaaaacaacattagttacatcatttacatttggtatcccacctaatagatacacagcttttgaaatctacaatattttacattttggtcatcatttaatgctatttgcattcctcttgctttaacattttaatagcatttgtgatatatcatgtttaactgaaagctttgggttatgtattttaaaggaatatctctttttgactaaatagttctgtaagggcctaatatttgaaaaattaacttgttacctgaagcaatgatcctccctaatcattttaaaataatgggtaaagatgcatctttgtaaatatattttgaaaacttggttagtgtattagaaacagacatcagaaacttaaaaatttatttctaggactggcatacactacagcgaattacttcaaatgttactctagagcattttttaaaatatgaagaatattgctgttctctctgagatgatcccttttttacaatgatgaaatcaaacacatttaaaaagtcttttanatattatatatagcattccagaattactgaatgaattataaaaattacagatatttctgtttggataaaatctctctcttaattctat

SEQ ID NO: 1718 - DNA, 794 bp, Macaca Fascicularis
  misc_feature (1)...(794): n = A,T,C or G
cagaacaggnnnnnnnnnnnnnnntctaccttccccaccaccnnnnnnnnnnnnnnnnnnncatgaggttttcccttcacttgattttatttttgttaatcccttcctnnnnnnnnnnnagagagtccnnnnnnnnnnnnnnnnnnnngttcacatccaaagggttggacccaccagtcattctgaatcttcctgcccctcctcnnnnnnnnnnnnnnnnnnnnncaaatataatggaagcagtggggccccctcccccaccatgtctttaagctcatcctagcaagacctctagagactctagagacttcagtccttccccaccatggcacagtggggaaagtgtcacggacgggaggtaggatcctgccactcgcgtcttagtgtttctcccccaagactttccttctgttttgttgtcttgtgnnnnnnnnnnnnnnccctcttgtgttttattctttgtttctcgtacacacacgcagttttaagggtgatgtgtgtataattaaagggacccttggcccatactttcctaattnnnnnnnnnnnnnnnntgggtttgactgaaatatgttttggtggggaatgggannnnnnnnnnnnnnnnnnnnnnnnnnnnnnnnnnnnnnnnnnnnnnaagctaaaagaaacctctgggagactggccaagacgggaaacctgattggagcattgagaatgaaaaggcagactctgaacgtttgatgaaatggactcttgtgaatattaacagtgaatattcactgttgcactgtacgaagtctctgaagtgtaa

SEQ ID NO: 1719 - DNA, 755 bp, Macaca Fascicularis
  misc_feature (1)...(755): n = A,T,C or G
aggggcttacgtgctttttgccaannnnnnnnnnnngcagcttcagtttannnnnnnnnnnnnnngtgggataatgttgaagtcgctgaagttatgggttattttatgttttgacatgggatttttctgttttcgattggaagaaggagacagaaattggagaaaatgggattatcctagggaagggcaaggagtcaagccggcacctctgagccctggggnnnnnnnnncctgaagcctggacactgggcccttcaggtcgcaagaaaaagttccctcctaaattctgttaggattttggagaatttttgcacagtaataagctccgggttgctctttgggcttctcaaaagggaaaagttcaattcaaagattgtaaactacgaagtattccagcagtgttgnnnnnnnnnnnnnnnnnnnnnnnntcaaaaaagtannnnnnnnnnnnnnncctcattgtcccaggttgtcaaatactaatgacataagagctcacnnnnnnnnnnnnnnncacttttatactagtttttcagtgctttaatatttgtaacttaaattttaaaactcgtatttacaaacactactgtaacttcagtgaaactgaattgtgtgattgaagctttttgcttatcatagtatttattacactacttaattcagtaaatatataaaagtagctttcaatttatttttatattattttacatgtttttacctgcagttgtgtatgtgaatttaccttggtaattgag

SEQ ID NO: 1720 - DNA, 635 bp, Macaca Fascicularis
agtgggaaaaagattgttctacagaaaatttgtcttgattttctgtcaagggtacattggagtctcttttaaggtttgatttaattaactcggatgctttttttagtgtttgtttgaggcacattcatttggaatcctatgtacctaaattttttttctggaaaaaggacaaaatatataacaaacagtatattcacctagaccctaaagcataaggatagcatttagaaacatcccagaggctgggtgccgtggctcatgcctgtaatcccaacactttgaggaggccaaggtgggcggatcacccgaggtcaggagttcgagaccagcccagccaacatggtgaaaccccgtctctattaaaaatacaaaatttagccagggagccgggcgcagtggctcatgcctgtaattccagccctttgggaggccaaggcgggtggatcacctgacgttaagagttaaagaccagcctggccaagatagtgaaaccccatctctactaaaaataaaaaattagctgggcatgtggcaggcgcctgtaatctcagctactcaggaggctgaggcaggagaattgcttgaacccgtgcggcagaggttgcagtgagtcaagattgcgccagtgcactcca

SEQ ID NO: 1721 - DNA, 638 bp, Macaca Fascicularis
  misc_feature (1)...(638): n = A,T,C or G
tgtgtccttgttatttaggtaannnnctttgttctgttgatttgggggggtgggggagaaccactaatagtaaannnnnnnnnnnnnnnnnnnnnnannnnnnnnnnnnnnnnnnnnnnnnnnnnnncttttagtttccaccctagaacagggactggcacatagtaggtactcagtaaactgaatgaatgaatggatggatggatgaatgaattagtgaatacataaataatctgtaggaggaaagaattcccccattcgttttatgaacaggggaaacaaaggctaagagactagaattcaaactctggcctgattccattgacattcataatttagacaccggaagacaaagggcttggcaattttagtgagagtttggactcatccaaggacgttaaacatgacaggcagacccattaagaaaacatacactataaagtgaccgtaaataaggtgctgccatttcgtagtggtggaatccacaggtcttttttaagaggaacagtgagaagaggaagtggaccatggggatggggaggggcagagatctnnnnnnnnnnnnnnnnnnnnnnnnnaaaggatttgcctagcttccccaaggagcacaacaaataaccttctaggtttcttttaca

SEQ ID NO: 1722 - DNA, 687 bp, Macaca Fascicularis
  misc_feature (1)...(687): n = A,T,C or G
tgagcacaacatgccagcacataacttttcagattgtgtttgcatagaaaaaggctaaaatcaattctttcagttactgtattgttcatttattgtaaaggtcttcctacatttgagactagaccctttaacataggctgccttagtaacaaaataaaacagatgtctcataagattaactgtcctaaagaacatgtgtcttgcaaatgccatggaactgaatatttatttccttgtgagtattacgaccgttaccaaaggactcaaccagattcggggctcttcttaattgatcatgttcagaaagggactcatttggtcccactttgtaacatgggaagagtagaagagaaaattaaatgtggaaatcataaatgcttttctaacagggttatgctattctgtaacactaaatgtctgtcttttctcttaaaagattaggttttattaatttgtcatacatttctcaatatttgaatatatcttaaccattttatgttccaaattcatttttttgtccaagacattctatcagaattttacttgcctctataatctgaaaaatgggttctagaatgtcccacttgctgtctcttagaggctgagcttcatttctatgagcaaaaagctcatttagcaatgtagttatttcnngtatttatttctattatggaatccctggggttc

SEQ ID NO: 1723 - DNA, 578 bp, Macaca Fascicularis
tctggccgtgggggtgggctggccctgccttgctccgcctggagcctggtcctgtgacgattctgcaccctcacaggctttttcctcgtgagtggggtctttgacctggagcccatcatgtatacttcacagaacatcgctctgcagctgaccctggaggacgctcagaggaacagcccccagctgaaggtggcccaggcgcagccggtggaccccacctgccgtgtgctggtggtcgtgggccagttcgactcccccgaatttcaccgacagtcctgggagttttaccagaccctgtgtcaaggagagtggaaagcctcgtttgaacagctccatgatgtggaccactttgaaatcgttgagaatctgacccagaaggacaacgtgctcacccaggtggggcctcatccctggcatccttttcggggtagacagcacggatcccgccgcagcctcttagatgcgcaaaccaggagttcgagaccagcctggccagcatggagaaactccgtctctactaaaaatacaaaaaaaattagccagatgtgatggtgcgtgcctgtgatcccagccactca

SEQ ID NO: 1724 - DNA, 745 bp, Macaca Fascicularis
  misc_feature (1)...(745): n = A,T,C or G
cccagaggtcctggccaaatatggggcctgnnnacgttggtgaaacagtgctccttatgtaaactgagccctttgttttaaaaaacaaaatgtgaaactagagaggaaagagacagcatagaatgcagcgcacacggccgctccagttcccaggggcactggggatgcttccaaagtggttgagacagagttggaaaccctcaccaactggcctcttcaccttccgccttatcctgcnnnnnnnnnnnnnnnngtctcactgcagattcagaaccagcttgggctccgtgcgttctgccttgccagccggccgaggatgtagttgttgctgccatcatcctaccacctcagggaccagagggctaggttggcactgcggccctcaccaggtcctgggctcggacccaactcctggacctttccagcctgtatnnnnnnnnnnnnnnnncgagaggacagcgnnnnnnnnnnnnnnngtttagtgacaacgtatgcctttccctcagaattcaaggaagagactgttgcctgccttcctccatcttagcgtgagaacccgtgtgtcccttcccaccacatccaccctctccatttttgaactcaaacacgaactaactgtgccctggtcctctccccagcccccaattcaccctccatccctcaccttcctccactcttaagggatatcaacactgcnnnnnnnnnnnnnnnnnnnnnnnnnnnnnnnnnatatgttttttaataa

SEQ ID NO: 1725 - DNA, 2090 bp, Macaca Fascicularis
tgaaatgtcactgaacatagtacttaaggacataagtacttacgtgttaccacatggcttaatatttgtaaaataatattgcatttttaaaagcatggcaggggtagaatgagtgaggcaaagcccacccactccacctcatgtgctctttacattctcaaggttttagtttatgggtgcatatatgtgtgttttttagtcatatcaataaatcatagtaaaagattataggaagtgagtttccaaagcacatttaagcccgcatttccttgagcaggctttctttttgcatatattcctaaagggggtaaacaaagtttttgtagttacagtgaaagctaaaagcatggcatcagaaagtgtatggagatagggaggtcttatcatgggatgtggttgctgtgagcagggctgccttcccacacaaagaacagattgtggtttaactctttccatggcctagtttaatgtgctcgcatagtaactgaattgttcaaatctctgctggaaactactgatcggtttaatgatttcctctatggcatttggttatgcctcatgctgtgatgtaatcatcagcattctgtattgttataaaattttgattcatacttattctggtgaaggaacacttacagcagtgttagaacacttttgataactacattattgattggatgggacatgtactccttccatatctgaagtacaaacagctaacatgttgcagtctgtagcattaaaactttgaatttcttcttaaaaatacattcatatctatattggattttttttgacaccttctttgttaaagagtcattagttgtactttcatcatatttacctaatggaattagttagtcttctgttaaacataatttattccacgtagttcagggtgattaacatgagtatgtaaattctaacttgggatacaatcagagttattttgtagttgggctgacaatatagtcaatatgatcagaaaagtggtggtggaagttctcatttgcttgaaatcttggcttattgcatacatacggtgtgcatgcactggacgttaagctctttctctttgaacagtaataggcgtaagcttataagacaggttttacctaaatcaggaagtaatgaaaccgactgcactgggaagtgacttgaaatatctgtaggtaaagattatccaccattcctcactgataccgtcccttaaaaaaaggcttggatgaaacaggcaggaaaaatgcaggagcctaaaggtaaactacttaattcaaaagattggtactcaataatatatgtacctgcgaattcacatgcacgtgcatatatgcacccacagttctagctgataattcatctacatggcaaatgaattatatagattccacaaaagcagtaactgaccagcagtgcactcctggtgtcaccccaccacagcatgcagagacacaaagaatgtaaagttggtgccaagttgccatttttcattgttcacctcagattgatttttaagaggtttagaataattgctatactcatgtgattggtgaacaaattaacggactctgtggggctgcatattctatagggaagctgctggaagaacattcatgtaatttttgttttcaagtttgaaaacttctatttaaaaatgcaagagtatatgtgagaaagcacaagagtgcaagtgtgtgtgtgttgggagctggcgttggtagtgtggggagagaatgcactgctcaaagtatggaaaccttctgttcaggacacagataagacgagctatgtcctttgcccactttccctcactgtataccggtttctctagttaccactcttggaatggtgctgtttcagtgttggaatgttggacgtttgataagaaaatggatcaagtttaatggcgcatgctctttgtgccaccagcagcctcttgctgagagcatgctccaaaagcgggaactgtgtggcattacactgagcatctatatgctttgtgtttctgtgccacagagaagagaaatgaactgtggcatcgctcctgccttctgaacagctctgctccgattaaaaaaaaaaaaaaaaaa

SEQ ID NO: 1726 - DNA, 769 bp, Macaca Fascicularis
  misc_feature (1)...(769): n = A,T,C or G
gnnnnnnnnnnnnnnnnnnnnncctnnnnnnnnnnnnnnnnnnnnnnnnnnnnnnnnnnnnnnnnnnnnnnnnnnnnnnnnnnnnnnnnnnnnnnnnnnnnnnnnnnnnnnnnnnnnnnnnnnnnnnnnnnnnnnnnnnnnnnnnnnnnnnnnnnnnnnnnnnnnnnnnnnnnnnnnnnnnnnnnnnnnnnnnnnnnnnnnntaatctcnnnnnnnnnnnnnnnnnnnnnnnnggcctcccaaagtgctgggattacaggtgcaagccaccgcgcctggcctacacaagccattcttacaaagcctatctggaggaaataacgtaggggaatggaggagtaaggatggggagagcctgatcgtggattctcatttcccctccctgttttnnnnnnnncccaggtctccctggaggttccacaggaagagcctgaggaggaagaggaggagatggacgtgcaggagatagggcctttggtgcttcaccatcactacttgccctatttgatgccctcctcgggtaccctgctgccctggccggcccccttcttccccgctcccgcctgtcagccccacttgcgggatgtacccaggannnnnnnnnnnnctcctgcctctagggaaagggaggcgtaagtgaggctgggtgctgccagggttctgctctggggcnnnnnnnnnnnnnnnnngcagggatgggtggttggtggagataacttgtgggtganacccanggccacctctgggcctctgatngggtcttttctct

SEQ ID NO: 1727 - DNA, 690 bp, Macaca Fascicularis
  misc_feature (1)...(690): n = A,T,C or G
cccagtagggcttacaatctaaggacatgaatcttttttttttttttttttannnnnnnnnnnnnnnnnnnnnnnnnnnnnnnnnnnnnnnnnnnnnnnnnnnnnnnnnnnnnnnnnnnnnnnnnnnnnnnnnnnnnnnnnnnnnnnnnnnnnnnnnnnnnnnnnnnnnnnnnnnnnnnnnnnnnnnnnnnnnnnnnnnnnnnnnnnnnnnnnnnnnnnnnnnnnnnnnnnnnnnnnnnnnnnnnnnnnnnctgaactcctgacctcaggtgatccacccgcctcggcctccaagagtgctgggattacaggcatgagccactgtgcccggccatgattcatttaatgttgccacgagtttgctgttcatgaaaatgaggtattaactgcactggttagtgcaggaaaagagcctaaggaatcactgactttttatgcaggcttccctatgcaagtaggcacaactgctcatctttattctcttaaagtatggttggcatttccccaaatttggtgattttgtgatgtgtataagtatctataaagatagaaccaccaaacccacatttctgataaccagggatcgaatttggcttctagtccagaagaaatgcttggttatatattcagaaaaacactattattcaaaacaggccctcaaggaaaatagtatgggagccatgttcctgc

SEQ ID NO: 1728 - DNA, 136 bp, Macaca Fascicularis
gaactttacttctttatccaatgaactgagtatcttgtgtcctggaccctttgcaagaacccttcccctagcaacagatgcgtcatctcaaaatatttttctgattggccaataagtaattgatttgcattttaat

SEQ ID NO: 1729 - DNA, 753 bp, Macaca Fascicularis
  misc_feature (1)...(753): n = A,T,C or G
gagnnnncnnnnnctagagcnnnnnnnnnnnnagtgtggtccacaagccaggagcanctgcatcacttggcagnnnnntagagatnnnnnnnnnnnnnnnnnnnnnntctgaccctgcattttcactagatcccaggtgaccagctgcactagactcaacctctaaaccatgacctcccaccctcacagtctgtggtcctttagtgaccctcagctgagtcactgtgtttgttctcgttgagcacaagcccgcttaccagggacagactggatgagnnnnnnnnnnnnnnnctatggagaggagccaagccgggnnnnnnnnnnnnnnnactaagccaggatcagagaactgactgtttcttgcactggctggcattgagcttgccactctgnnnnnnnnnnnnnnnnnccctgcatggacctgttatcagtcactgttatccgcagggctcctccaacggcagccctctccttgtttatcccccttaagcctgcgtgcaggaaggcacattaaccctgtggccccctgcaggcaggagggtgtcgggtgcccttacctaccttgccctttttcttgtaccgtaggctgtgccatttatgagtacgtgtatgtgtgtctgtgtgtgtgtctagaagtgctgcacccaccttgtattattggaggttgtgtatcccccccagctttgagcctggtctcagatgttctttttctgttctctgtccagccgttactgcccccagtctgtaataaaa

SEQ ID NO: 1730 - DNA, 1770 bp, Macaca Fascicularis
gctctcaagcagccctccagagaagatctgtgtggtgagggactgaggacccctgccagtagccaacatcaacttacacagctatatgagaagccatcttggaagtgaaacttgacttcaccctcaagagacctacagccagaactacccagtcaagctgcccctgaatttctgatcaaaagaaactgagttagcaaaagcctgtttcaagccactaaattttgggatgcttggttatgtggccatagatattactgcataggcaacttgttatagtgtgaggaatcaaaatagtgattacatttgagtgtggggagccatgggggagttgtgaaatagagcacatgcaaaggggattttgggagggcttagaagtggtacattagcattcacttgtgataatttattaaacttcgtgctcttttcttgtatgatatacttcacaatttttttaaaggctaaagaatcatctagaaagaactattctatcttatatgtaatgtacaaggttgatgaatgaataacaattttaatgatagttaatgcgttctgggttcctactgtgtcctaggcaaaattctaagtatgtttcatgagttgtgaaacgtaatgacagcctcattagaaggcatgatagaaagcaacttgctgaagctgtactgttagtaggaggcagaagtgatttgaactcaggaagtctgatcattctttgcacctgttatgtaccaagttcttgtctctgagcatagtgtgtagttccaaataaacatgcacagaatgaaagcacagtagatatgcatcttgccatcactatggatcagaaaaaaactatcaaagtgtggaactgtcaggacagggatgctctggccattctccgcatgccagagtcctgttatggcatggaagcctatctcacaaaggatggcccattcctgacagttggtgatgctgcaggtaacatctacacatttacactgcctgggttaagggatgtttctaaagttactgcatctcaatatggtattgtatttctacactgctctcctgacaagaaatggatatttgcatgtgggacatatcgtcgtaccttgccacaggtattcctcacagagtccttactgagaccatcagaaggcagtgctcctctatctacctgtctcccacataaattatgtgtcagtgcctgctggaccccaaaggtgaaaaacaggctgacactgatgtcccaaagtaaccctgaaaaaaagaatttgtcacctttgatctaacaaccaagaggactggaggccaaacagtcatccaagttggcagctcatctggagtcccctgtttggatgggagccaatgatggatatacgattgtctttaccaatgggccatacttgttactcttcagcatcactggcttcctgctgcaacgatttgaggaccaccaggcagccatcgacaacttctgggtggatcctcgctatgtgctcaccacgtccaagaactctgtgcacgtgtacatgtgggaagaaggaggccgccatccatacctcaggagctgctatcgcctggaaaacatatggcatgatcccacaacagatgactgcatctccagtgtgatgtgtgataatgcaagcatagtacttacggtgacagtaagtgaatacagcatgctggtgatgtattctttgaacacgtaatatggaaactaacaaaattgaccttgcatcatcttctgcaatgtagtaaagagaattcgtttgcaaaaaaaaaaaaaaaaaa

SEQ ID NO: 1731 - DNA, 1570 bp, Macaca Fascicularis
  misc_feature (1)...(1570): n = A,T,C or G
acttcctttcctgctccgcgtgagaagaggcgcgaagcgtgcgtaggaacgctacggcaattcctttgcggcccttcctctccttcgaagatgacaaggcctgccatcccttcttactaactttgggccgtcaggcagttggttgggacccgctccaaccctaggatatccacatggctgactacttgacttccctcaagtctttgctgaaacctcaacctcctactgagacctatcctgagcatcttttaaaaattgcttctacctgactgccctgctttccatctcctttcccctcattatttttttccatagtactttcaacttgtaacacactatataatttgcttagtttgattttgcttattacctttcctgtgaggcctaaatttttttttttttgtctgaaggagaaactattccatgtctgtgtctcaaaatacttttggctctttttacattcccttcttggaccacatgcaagcagacttcaaaaagttcatggaaaaaatgagattaaggccagannnnnnnnnnnnnnnnnnnnnnnnnnnnnnnnnnnnnnnnnnnnnnnnnnnnnnnnnnnnnnnnnnnnnnnnnnnnnnnnnnnnnnnnnnnnnnnnnnnnnnnnnnnnnnnnnnnnnnnnnnnnnnnnnnnnnnnnnnnnnnnnnnnnnnnnnnnnnnnnnnnnnnnnnnnnnnnnnnnnnnnnnnnnggacccttgagcccaggagtttgagaccagcctgggcaacataatgagaccttgcctctaacaacaacaacaaatcagcacagaagattatatgtgttgggatgtttattgctgcattgtttgcagaaaacaaaaataatctgcatgtccatcattagaagaattgctggataaatgattttatgtggaatattatgtaacaatcaaaatggattataactatttctattaaagcagaaagatatctgtgaaatagtgtgaaaagcaatgtgtacagaaacatatgatcccatttttaaaaaccctgccgcctcagcaataccccttgccatatatgtgtgtatatatttgaatgtgtattgctgagcatagagaaaaaatacagagaaatacactaggatttaacattgggtacagtctgagggagtggagagaaagcacataagactaataaaaggaaaaaattatggcataatgctgagaaaaaagaatagaatgtaaaatactagctgcagttactgcaaatttgtaaaaatggaatatgcatataggcaagaattaaatcattgttttagcgagataataggactacaggaaactttttactttggatttctattatgttaatactgtttttgcaataaaataacatttaaaaactcagagtttaacattcaggaatcaagtcacatcagcagaaatgttccttcttttgtcccactttcaactcatgttattttgtcttatttatgtagttttgtaaatgacctgaaatattatctaagtcaaagagggatataagtaagtaaataaaaataacctaactcttgtcagtctcaaaaaaaaaaaaaaaaa

SEQ ID NO: 1732 - DNA, 2112 bp, Macaca Fascicularis
aaaacgcgactctgccccggacccgggaggcgcccgaggccgtcgccgcttctgcagccaccggtgggggggggaacgaggcaataccgccgcggaggctcaccaacagcttcggcttttcccccctccgggtttcctcgactttttctgagagccggaatccgactgtagggggaagaaagactcaagagcagatgcttgaactgaaataactttattttggggggttacttcgctgacccttagcgcagggcttcctttcccttccccctcctccgccagtaccgatccaactccccatctttcttctcgtttttcctctttttctttttctctccctgttgccgctgtctccgcgtcctccccctccgtcgccgcccagggcgccgagccagactatgggtcccaggtgggggctgagcggcggcagcagcgcgggcggtccagtcacagtgcgcactgcagcggggatggaggggctcagttggctggtggttttctcttgacatggctcctgcccgtgctacgagcagcgcccccgccgccgccgccgcctcttccgccgccgccaccgctccgcccgcaggctgcggctagagggcccaaaccccgcccgagagtcggtccgtgagtcccgggcttcgcggggacagggaggggatttccctgtcacccaccctgccctaactgcctcagttccaccccctgcccctcgggaaacaaactaacgaccccaccctaaacaatccaaactctggaaacatggtctgttcaacgagagagagctaatccgggaacttaatttttgggggggagggtgggtgggcttactttagaagtaatattaacacaattattttctttttttccccactgaaccttcccatttaccctctcccgcctactccacccgggcgggaattgtttccacgatgaaatgagtgaaaacctgagtgatcctgtgtctcccgtggtgcgagtgggtcgctgccgctgaaggcaaggggtgggggtgggacctggaggggtggaaggcaggtggtctccgggcaccgcctgggatttgggagaagaacccgccacctttgcctcggcaatgctcacaagaagataaatcgcactccccatcatcttgaacgggggcaaatccacagggaagtctcccttggggaatgtaggactagttgcaggctgggggtgttgggaacccgggcattaatcaggtctaaccacagagccggagtaattaataccgtattatataccccttttccttttgccatcatgattctccttggcagcagcgttagcagccgccagagggtgaaaatgtgggtgatggggaagttggtaatgactccgctgttttttctcatggctcctttgggcaacagctgcccgcccccggtatacactgtagttgattgcagggaaaccctgtacctctccctttccttctctactgattttgcacttttctctacggctcacccaccaagtgtaatcaataacaagcactgacaatacatagcaatagtgaaatctgaaataactaagaattaggtactacagccatggagctggctgggtaaaatctaattggatatttcagtttcattcacctaccctgtttttggtgttttgttttggtttttgttttggttttgggagttttctttttgttttttgttttttggaaagcaaggatcacacttgcccccctccctgtccttttcttaatcccttttctaaaaagaggggaaaatccggaggattttagggattggtctggtgtcagctgtgttttattgcacacctaaatcctgattataggcttttcatttctccgcaaagcctttattttggcagttaagccaaatgtgttttccagaaagttagttgaagtattttctcctctttctttcctttcttccctccctttttcccgtctgaccccaaacgttattgtccaaacatgactggacagcagcttttgtttcttgaccctgtaatatgacagtctgctaatattgccagaaggtgcagtttttgggttacagtcggattttcgctattcaatcatattagcaggaaaaaaaaaaaaaaaaaaaa

SEQ ID NO: 1733 - DNA, 724 bp, Macaca Fascicularis
gcacacactctcgggcgaggttctctgatcctcaggtgtggggggccagggaagtagcgccagcactctcgggtgatgttctctggtccacgaatgcgggggccgaagaagtcacactggctcctgctggtggcagacttttatgcattggtactggaagggggagggcagtgggcgggataagggcgtgataggggcatctccgtaggcgtggccgagtaagtttcgatctcttcggattgacatcacctggtgcatgctcggttgatctgcatcttcccggggcgggctgcattttcccgcgcacgggaaagttagtgaggaagaacccggaagcaacatggattatgccttcttgttcaccttcctccatcttgtcctgtctccctcatccaaacaataaccaattaaaagaattaatgaaaaatctgattcactgcatcaccaaaagctctaacagctgcactgcacagtattccatggtgtatatgtaccaagttttctttatccagtctatcactgatgggcatttgctattgtgtctttgctattgtgaagagtgctgcaatgaacatacatgtgcctggatctttacaataaaatggtttatattcctttgggtatatacccagtaatggaattgctgggacaaatggtatttctagttctggatctttgaggaatcatcacatgcttccacaatggttgaatgaatttacattcc

SEQ ID NO: 1734 - DNA, 1980 bp, Macaca Fascicularis
caagtaaatggtaacaattaattcctttgcttttggagtcttaggtatagaaacacatttccattccacatggacttgggaatgcttcactgcatgcctgggtaatttgagctttcagcaatcctgcatacaaaaaagataaggggcattaacagatttggattaatcatgttaaatgggttattactatccaaaagaaactgaggagtttttgttggtatcctcacagatttacatttctgtagcatatcttcaagtggttttcaaatctagctatttccttccaaagccattcatagaaatagatctcttttacttttgggcaaaccttataaaaagccagtcttgaattttctctggagcttgtaggcaatgaagagttttgctaagtgtctttatcagaacagctttctgtgttccagaagacatttggtgaagacagttagtttgttttcctttccagaggagaatgttccattaatcattctaagacgccaagctgattgctctgttacgttaaggtcacagtattcttgttaacatgacccacacaacacttctgtgtcttagaacagggtttttttttttcttatggcagacttatggcatggaagcagtaagcgacagactcaaacacagtacacatgtgcaagtatgcgtgtgcacacatacacacgcacgcgcacacacacacacacacacacacaaacacacagagtagccaaagcacattttgtggaacaaatattatcacattgcattgcaggagacgagctgtgctaaatcctcaaatacttctcatttattaaacaagtaactatttctctccctgctgggctccagatagggtatcaaaagatttcacaatcaataccgagatacatagttactgctctaattattttaatgaatgaatttaaattttgcataggttcttgttattcaaagtgtgatccacaggccctcagcatcagcatcatctggaagtttgccctaaccccagaccaaatgaatcagaatctgcattttaacaagagtctctttgattcaaatgcatgtaaaagtttgacaaatagtgggcaagatcaattacttcaaacttatttgccccaactcacaataagaaacaaattttacatcgaaacccagattgtatgtacacacacacgaaacaaaagtttataaaacaatatttatgtgatgcagtctgatatttcctgttttttctttcagaaatttcagtggtagcagataaaatgattctactacacacaaataagattacgatactcagtttcaaaaatacttctaaagcaaaatttttcgtccttggtaccactgacagtttaagtcagataattctttgttgtagagtgctggtctgtgtgttgaaggatgttgagcagcatccctgttttctgctctagataccagtagcagccactgtccttttcaaaatgaagaaaatgtctccagatatggccaaatttcccccggggagcaaaatcatccccatttgagaaccactgatctgcacaagctagaaatggggttaccactaaatgtgtacaggtagcccttcctctctagatgtaatacagccctctgctacccccattatcacacaaaaacatgatgagtatgaggtagcaacaacaaagtcgagcttaggaattgttaaaatgattactcaagaagtccatgtgtccatctgggagttagcttgggagcctgtgccagtctctgaaggagattatgtttggaggacttcatgccatgatgggaaaagcttgtgagacatccaggaccctcttctcccctcactgtatccagaatagtcccacttggagccacaggaactggaacagcacgttagatcaagcaatacagcttcccgctttggcctcccttgattacttctctttcctttcctttttataattccacccggaccttgatttaaaaaaaaaaaaaaaaaaa

SEQ ID NO: 1735 - DNA, 668 bp, Macaca Fascicularis
  misc_feature (1)...(668): n = A,T,C or G
atgtgcagcagaggagagagggccagagtaagtgttctgaagcagctgtttgctgacagatgcttgagatggtcatgccctgggctcaccaagtcactcgtgaatctggagcctgtttccctgaaaagttcctgcttgcattactctgcagtttccatttgcattctctatgagtaagatgcttgttaagcagcgtggtgtgactgaaaggatactagatcagaaaatgaattttctttctgaaagggaagtctgagcaagtctcttaaatactctgggctttagcttctccagctgtgaagagctggattgatgtggcatgcctaaggaataatcatatgtattaggtttttgttttgctgtggattctttttttttttttttagagatggggtctcactttgttgcccaggctggtctcnnnnnnnnnnnnnnnnnnnnnnnnnnnnnnnnnnnnnnnnnnnnnnnnnnnnnnnnnnnnnnnnnnnnncatgcctggctttgctgtgaatccttttgggtgtcttgttttcctacatgatttatagaggatgaggggcggagagagagagaaaaaaggaatgagctagctgttagagcaaaggcttcgaagacagataatgttgattgaagggattttaaaggaaatgttgctgtgggggattcgt

SEQ ID NO: 1736 - DNA, 749 bp, Macaca Fascicularis
  misc_feature (1)...(749): n = A,T,C or G
gagacagcaaggcnnncagctgtgagtgaggatgagagaggggnnnngagatgagaagaggnttngaaatagttatttgggagactgccagaaaagggatgtgaaagtgtgatgaccggagagtagtgaaaatccacttgctggcagtnnnnnnnnnnnnnnnnnnnnnnnnnnnnnntcctgggtatagtcaaaaagggtggttcaannnnnnnnnnnnnnnnnnnnnnnnnnnnncacttggcattgtgttaggtgcagggaatacagggatgaaggaaatgtttcttgtcatcttctttaagctttagaagaggggccatnnnnnnnnnnnnnnnnnnnnnnnnnnnnntggtannnnnnnnnngggcttcactggaaggcacgagaacataaacacnnnnnnnnnnnnnnnnnnnnnnntgggggtgcgggggaggtttcctttataatgtgatgcctcaggtgagtaagatttacgggttatgaaaaattgggtgggccnnnnnnnnnnnnnnnnnnnnnnnnnnnnnnnnnnnnnnnnnnnnnnnnnnnnnnnnnnnnnnnnnnnnnnnnnnnnnnnnnnnnnnnnnnnnnnnnnnnnnnnnnnnnnnnnnnnnnnnnnnnnnnnnnnnnnnnnnnnnnnnnnnnnnnnnnnnnnnnnnnnnnnnnnnnnnnnnnnnnnnnnnnnnnnnnnnnnnnnnnnnnggaggcggaggttgcagtgagctgagatcaggccactgctc

SEQ ID NO: 1737 - DNA, 5194 bp, Macaca Fascicularis
  misc_feature (1)...(5194): n = A,T,C or G
ttctctgcttgatgctaaaacctggaggctaaaatgaatgtgtgtaattaattggagaacttcctcctgtttgtggagtgctttaccgctggtaaacggcttctctccctgaacagccctgtggggcgtcatttccatctgccatctgaggagagctgctgttcatggcccagtcctctgtccattggcccactgggtgtccctaatgtgcgctaataggctcctggcaaacggcgggcatggcagccacgaatctgcacatgagccgtgtgccctaggtctccccgggctctggttcacatgcggtgctttccaggctgcagggctttctcagcctgggtggaaggagtgacgtcagagcatttcgcaggaactgcctgccctaaagctgtggctcataaaccccttccagcttctgtggagaattctggagccccagggtatcaccagagggtttaaaagcggaggaacgtttcctgtgactgcagggtgagaggcgctgggatctgtaattccacactaggctggaatcccagaaaagcttcaatgctcgggaaatgtacgagcttcgccaggatcccctgaaggagtgtggggctttttaagcaaactgcccagcaagcctcctacagcacctgctgtccctctgcccgcagtcagggccccggcccaccagtgttggttgtgtttctgttctttgaagagaccgcgtgatgatcttctggtaggagccagaagaaggatacaaatgccattagagctgttagagtcccagatgccactggaattggagttcagggtgttgggctgtccccacccttaggcagtacccccactgcctgcaacacctccagcgcaggctgaggccacctgaggatggaagcacgtgtgggctaggccaggagggcgtgcgggaaggctctccactctgcactctgctggggctttctccttgcgtcctggtcaataacttcttctctctctggttctccttggcctcagctccctgaggagctgagccaggctgtccctgagttccctaatccggaagaagggacggccattatctttgagtgactgtcttcttgcagctgggaatctctggggctctgagcaggaggcccgtggggggccctggaagaacaggcgtgagttgaactatttacctcactgccctgtgtgccctgccccagcagaagccgtttctgctgtgtggttctgtctaggactagagccactcagggccctctgcatgctgtgggatccctttgcaaagcgcttcctaacgtgtgcttttatctgcggctcgggctgggaatggtgacttcttcacgcagtcttccccaggcctctccagcctggctcccgagatgccacgcatggtctgtgcagcccagagaagaccctgcagggggagaagggtcactttggttgcctgtctccccatctggcctgtgggccgggcgcctggcagatggggctcccatggaggtgcccccacagactcggactccacagcaggctgtggcgctggcatcgaggatgtggctgggagaacctagctgtctttttagccatttgtttcggaggccctgggggtcatacttgtgattccttgtgtatttttagatctcttatcaccatacacaccacctccatattagagtgctgtcatattcacatatggtgaaataagacacaaaagtacaattctggagttgagggtcggctttctaggattaggacaaggaggcaactttgatagtaaatggaatctttttttcccagccacccccaccctcaaagactatcttgctctaagacccagttcctgtaaaactgtctgtggggtccctggccagggtgggtgggatcccggggaaagggccgggctgtgtgctccgaacaggaatgcttctggaccaaccgttgtgggcattcctgagaagccagggagcctggatctcgtcagaggagctcgagtcagctcctccctctgctccgtcctaaccccacaggcagcagcaggagctgagagaggacacggtgggggcagcgctgcaaaacccagcagcagggccaccttccagcagcagaaagcatgagttttggttttggggttctttcatttccttccttcctttctttcttttttaaatttttgctctttgttatgaaacactgcaaccagaccgagctgtgcatggcctgctgcaagcaggtgcctttatcttgaatgaccccacatgctgggcagggagggggcgggggaggggcttgtgggaacccagaactggggtgggactgagccaacagtttaaagagccttgtacccccattacccagcctcaacaattgttcgcttccagccatttacaccccacccaggttttttgaagacaagtcagagggagatcatttcactgtactcctcagtgttttagtatcccagcagagattgcatgggcagagaagggaggcctcagagtgtaggaccccaggaacagacgagtgttcgctctttccctattggctcctgtggggtagggacagaccagcccccatggacactagtgaggaccatgacaagaagctgctgttctaatctcatcagtggaggatccagcaagcccggatcggggtgaaagaatgactcagcctgcaggccatttggggtatgcgcagtctggtctcctgagttctctgaagccctgtgcagtttttgctttgtatcccaaactccacgggcctggactctgccactgggcttgatcctctgcagcccagcccgttcctgtccccatgctggaaacagcccctcaactcgcttcctgggtttcctgttgctctccccaccccatacctgctccccacgtttctatcggagccctgtttctaaaacaaaagtcagattccgctgtgttcttaaaacccttcagtggttctgaattctttcaagacaaggttccagatatggaggctgagggcgagggtctgcaccccaggtgtctgcactcctcgtcaccagcccctggtcgcagccacccagctctgcttgtcctgtttcagggtccagcttagggctcctgtcctgcggatgccctccgcagccccccagcgttgggtcaagttctccgcagcagccccggccccacgtttcttcccccatgtggtcctcatcacatgtacattgtcaccaggcgctttgcctgtttcccgggagactggacacctaaaccgcattttggaaatccctcccaccatctcaagcggtgctgagacaccaccctgcattcacagcacagtgcgttcctgtgacctccgcgggccatggttagcccacaggctactcacagaaagtgacaagccgtgttccgaaactcttcaagcagtctgacatggctgtggcccttcatgagattttatattttacgaaagtgtcagtcaataaaggattcgtcctgcaccactggagcactggcgcaaggtgccctgatccctgagaacccgcgtctgcacagtcagcactcttcccactgtctgtcatctgctgtgccccgtcaggctgctgtgcttttcttcgcagtgtctctgtttggggaagaattttgtcaaaactgcagattttcttttctttctttctttttttnnnnnnnnnnnnnnnnnnnnnnnnnnnnnnnnnnnnnnnnnnnnnnnnnnnnnnnnnnnnnnnnnnnnnnnnnnnnnnnnnnnnnnnnnnnnnnnnnnnnnnnnnnnnnnnnnnnnnnnnnnnnnnnnnnnnnnnnnnnnnnnnnnnnnnnnnnnnnnnnnnnnnnnnnnnagtagatttttagtagagacagggtttcaccatgttggccaggctggtctcaatctcccaacctcaggtgattcgcctgcctcggcccccgcaaagtgctgggattacaggtgtgagccaccacgcctggccaactctgcagattttctttcaggcatcttaagcgagtggcaagagttattctgtggctaagtgtgtagttttgtgttcgtgaagatggtcatgcatgggttttgtgccagtttaaatgctggctcatatatttgttggtgtttagtcaggcagattccaagaattgcccgtaaactaaattgccacttccggtattgccagcgctttgttttccacatatgagtcatgtgaggattgtaagggatggagatgttctagaaggcgggggttgcaaggatttggaattgtattcagtgacaaatggacttctttctgaattctcatgtaaggtggagatcgccatagttgacctgtcctggaggtgggcgcgtgtcctcctgaggaattgatgctgtaacatggttcatccatggggttcctttgtcagcccaagcccatgtgcctcccagcaaaggtcactgttttttagtctttaaatgtcattatccccaagtgagggacgggggtagacctgttaggccgaaggcgggccatgatgggaaccttttccttggtggagggcgggcccccaagagcagctggctctgacaggacattgttttggagtcttgcgagtctggagtggggacgcctgacagggagcccccaggtggagtaccgcatgctcaggcgggcgagctctgcaaggacctttggccagacccaagcagagctaagctggattagggtggggagctgggcaggcaggcagggaagtgggtgggcatgcaggtgcctgggaccccactcagctcacagagatactttccctgtgagagcaggagtcacctcaggcttcctctccttctgttatctgctagtgtgtaataaatatccacaattcagcagcttaggataacacatagttatgatctcacagtttctgtagtcaggagtctgggcacattggccaagcgcagtggctcatgctggtaatcccagcagtttgggaggctgaggcaggcgaatagcatgaacccaggagtttgagaccagcttgggcaatgtggcannnnnnnnnnnnnnnnnnnnnnnnnnnnnnnnnnnnnnnnnnnnnnnnnnnnnnnnnnnnnnnnnnnnnnnnnnnnnnnnnnnnnnnnnnnnnnnnnnnnnnnnnnnnnnnnnnnnnnnnnnnnnnnnnnnnnnnnnnnnnnnnnnnnnnnnnnnnnnnnnnnnnnnnnnnncaaaaaaaaaaaaaaaaaa

SEQ ID NO: 1738 - DNA, 701 bp, Macaca Fascicularis
  misc_feature (1)...(701): n = A,T,C or G
ggaaatgtattnnnnnnntgaatcaaatcaggaatctnnnnngagccactggaatgaagttcacaggtctnnnngaccaggactatttgtcaatatgtggggataacctgtagctgcattcatgaggtagcaaatagcagttttggcctgtggggtgaacagttaaacagtgtcctggcatcagataacacagcacaaagggattgtgtctagctcttttggagaaaatttatgtctagtctcaggagctgtggacaataatgggaaactttgaatattcctgacaagttgccgtattaggagtcagttcttcacttctctgatattcctaggtcatccatgatttttttttttttttaatttgagacaaagccttgctcttgttgcctaggctggaatgcaatggtacgatctcagctcactgcaacctctgcctcttgggttcaagcgattctcctgcctcagcctccccagtagctgnnnnnnnnnnnnnnnnnnnnnnnnnnnnnnnnnnnnnnnnnnnnnnnnnnnnnnnnnnnnnnnnnnnnnnnnnnnnnnnnnnnnnnnnnnnnnnnnnnnnnnnnnnnnnnnnnnnnnnnnnnnnnnnnnnnnnnnnnnnnnnnnnnnnnnnnnnncgtgcccagctggtcatccatgattgtaacgtgtgggtctaaaggcctctttttctttgttaagta

SEQ ID NO: 1739 - DNA, 733 bp, Macaca Fascicularis
  misc_feature (1)...(733): n = A,T,C or G
gccnggagggagcaatataactaaggacaaaaaatgttttgtnnnnnttgtnnnnnnnnnnnnnnntacttttatgttttgtgaaatggacagtaacctgtttcctaaaagattcctgtgggtactttttgagttgtgataatagcaaaattgcctttcagtaataatatcacactaatgcttcttttaaacattaaacctattttccttttttacaaaataagggaaaatgtgataagaagtttgtatnnnnnnnnnnnnnnnaaattattatttatcttttgaaccagagttaaatggtaaaagaaaaaaaaannnnnnnnnnnnnnnnnnnnnnnnnnnnnnnnnnnnnntatcttttgacaaaggggataaagagtttcagtttacctccttttaattgtatattattttttgcttttttattgtgaaaagtgataggttttatttgtggagagagaattaaagattagagaaccagtgattttaattatgctactttttcttagagataagttgacatataattcagtnnnnnnnnnnnnatgaaaaacatgaatgttgtacaattttcttcctcaaaaaacttgttaaatgcaagtatccttggtatgtttttaaaagagaacaatgcaggtgtatttgagtattttcaagagaagaataaaaacattaatgctgtattaggttaaccagatatcaactaagccttgttaacagttaaagtattata

SEQ ID NO: 1740 - DNA, 743 bp, Macaca Fascicularis
  misc_feature (1)...(743): n = A,T,C or G
cagcacccatcaactcgtcatttacatcaggtataactcccaatgcaatccctcccccctccccccggggtgatttttcattgcaccatcattttattttagagagcttcctagcactgctgagcatgcagaatttttgcaaatgcaatccaaagacttgctatatactagctatttgaacttgtctgagcttatgtggcatggtctaaagaatactgaaatatttctggcatacctcttaattgcaatcactttctccaggttgctttatgaattaaatgagataacctactaaaggactccagtaaaaagctaaaaaggtagctagcttttgaggtgctgtggcagagactggcatctagtggccagtgataatggtgcaggatagtgtctgcacctaagtagggatagtgcaggctgtaatgtccaaacctagtggggacatcaatggggtatttgtcagagatgctccatggcatagtttggacattgtttctgactgtgcaggttcaaacccagagtctggctctcccaaagattatctgagttattctattattttataaagtttgannnnnnnnnnnnnnnnnnnnnnnnnnnnnnnnnnnnnnnnnnnnnnnnnnnnnnnnnnnnnnnnnnnnnnnnnnnnnnnnnnnnnnnnnnnnnnnnnnnnnnnnnnnnnnnnnnnnnnnnnnnnnnnnnnnnnnnnnnnnnnnnnnncaaaaaaaaaaaaaaaaaaaaaa

SEQ ID NO: 1741 - DNA, 771 bp, Macaca Fascicularis
  misc_feature (1)...(771): n = A,T,C or G
gccagtgctcagggaacaagccagagagagaaggagtcaaaggaacctcatgtccacctggttctaggtcacaggcctgccctggcctctacacaaaggagcctcctgtaggtcccagcccttccgtgaatatggctgaacatgctgtgtcttggagcagctggaacctcaggtggaccctgagagagctgcctgccaatatgttccttcagcttgagtatggagtccagccttggaggctgcacatctcctctcaaatgcaggcttgtggctctagaagctaccactgtggtcaaaatggcatcttaggttctggcagattgggccaatctcaggggttgaccctggggtacagatacctgacaatcagcaaaatccagttcaatcttttctcctttgttatttctttaaataatcttgtactaaatcccaaagcaagcaaacccatgaactgattatgcactgccaccatttgcatcagtttaaaagcaggacggctctgagggcaggtattaaagaaatagcaggccgggcgcggtggctcaagcctgtaatcccagcactttgggaggccgagacgggcggatcacaaggtcagnnnnnnnnnnnnnnnnnnnnnnnnnnnnnnnnnnnnnnnnnnnnnnnnnnnnnnnnnnnnnnnnnnnnnnnnnnnnnnnnnnnnnnnnnnnnnnnnnnnnnnnnnnnnnnnnnnnnnnnnnnnnnnnnnnnnnnnnnnnnnnnnnnnnnnnnnnnnnnnnnnnnnctggccac

SEQ ID NO: 1742 - DNA, 755 bp, Macaca Fascicularis
  misc_feature (1)...(755): n = A,T,C or G
cacacatacacacagnnnagcaaacttcaggtaactattttggattgcaaacaggataaattaaatgnnnaaacaatctgataaaataaccatttgnnnnnnnnnnnnnnntctgttcttttatnnnnnnnnnnnnnnnnnnnnnnnnnnnnnnnnnnnnnnntcaaaaccaacaaaacaaaaaaagtgtgtgtgtgtgaatacacaaacacactaactagaactcttgtgatgaaaatggcacttgaaaaaggttatatttttccactgaagttgaaggttaataaaatggtgtcaaacgtcccctggtcacacactttaatatttttttagaagtgtgatgtatgattaccataaatcagacttaattattttcccttttacaggggaacannnnnnnnnnnnnnnnagagtctttcagcaataagaagggatgttggtgagctttgatcctcttttggttttgcagttgttaggagtttttgctggcagtttgaatatgctnnnnnnnnnnnnnnnaaggaagttttaaaattgcttcttggtccttagaggactaaaaacaagaccctcattcccactttcatttccactctagcaaaaagtatggtcttgtgtttttctccaactcctcatttatatccnnnnnnnnnnnnnnnnnnnnnnnnnnnnnnnnnnnnnnnnnnnnnnnnnnnnnnnnnnnnnnnnnnnnnnnnnnnnnnnnnnnnnnnnnnnnnnntcagatattgtgcctt

SEQ ID NO: 1743 - DNA, 4564 bp, Macaca Fascicularis
aatgacaagatttctgtgttaactgtggcagataccgtccggacttgctcactagaccagtgctataagaccttcttgtctccagctaccagtgagacaaaaaggaaaatgtccacctttgttagcaacgtgaagtcttcagacagtcctacccagcacgcagtgggattccaaaaggcatttcagctgattcgaagcacaaacaataacacaaagttccaagcaaatacagacatggtcatcatttacctgtcagctggcattacatcaaaggactcttcggaagaagataaaaaagcaactctccgagtcatcaatgaagaaaatagctttctaaacaactccgtaatgattctcacctatgccctcatgaacgatggggtgactggtttgaaagaactggcttttctgagggatctagctgaacagaattcagggaagtacggtgtgccagaccggacggccttgcctgtgattaagggcagcatgatggtgctgaaccagttgagcaacctggagaccacagtgggcaggttctacacaaaccttcccaaccggatgattgatgaagccgtcttcagcctccccttctctgatgagatgggagatggtttgataatgactgtgagtaaaccctgttattttggaaacctacttctgggaattgtaggtgtggatgtgaatctggcttatattcttgaagacgtgacgtattaccaagactctttggcttcctatacttttctcatagacgacaaaggatatacacttatgcacccatctcttaccaggccatatttattatcagagcccccacttcatactgacatcatacattatgaaaatattccaaaatttgaattagttcggcaaaatatcctcagcctccctctgggcagccagattatcgcagtccctgtgaactcatccctgtcttggcacataaacaagctgagagaaactggaaaggaagcctacaatgttagctatgcctggaagatggtacaagacacttcctttattctgtgtattgtggtgatacaaccagaaatacctgtgaaacaactgaagaacctcaacactgttcccagcagcaagctgctgtaccaccggctggatctcctgggccagcccagtgcttgcctccacttcaaacagctggcaaccctagaaagtcccaccgtcatgctgtctgctggcagcttttcctccccctatgagcacctcagccagccagagacaaagcgcatggtagagcactacactgcctatctcagcgacaacacccggctcattgctaacccaggccttaaattctctgtcagaaatgaagtaatggctaccagccacgtcacagatgaatggatgacacaaatggaaatgagtagcctgaacacttacattgtccgccgttacatagcaacgcccaatggcgtcctcagaatttatcctggttccctcatggacaaagcatttgatcccactaggagacaatggtatctccatgcagtagctaatccagggttgatttctttgactggtccttatttagatgttggaggagctggttatgtcgtgacaatcagtcacacaattcattcatccagtacacagctgtcttctgggcatactgtggctgtgatgggcattgacttcacactcagatacttctacaaagttctgatggacctgttaccagtctgtaaccaagatggtggcaacaaaataaggtgcttcataatggaggacaggggttatctggtggcgcacccaactctcatcgatcctaaaggacatgcacctgtggagcagcagcacatcacccacaaggagcccctggtagcaaatgatatcctcaaccaccccaactttgtaaagaaaaacctgtgcaacagcttcagtgacagaacggtccagaggttttataaattcaacaccagccttgcgggggatttgacgaaccttgtgcatggcagccactgttccaaatacagactagcaaggatcccaggaaccaatgcgtttgttggcattgtcaatgaagcctgcgactctcttgccttctgtgcctgcagcatggtggaccggctctgtctcaactgtcaccgaatggaacaaaacgaatgtgaatgtccttgtgagtgccctctagaggtcaatgagtgcactggcaacctcaccaatgcagagaaccgaaacccaagctgcgaggtccaccaggagccggtgacatacacagctattgaccctggcctgcaagatgctcttcaccagtgtgtcaacagcaggtgcagtcagaggctggaaagcggggactgttttggggtgctggattgtgaatggtgcatggtggacagtgatggaaagactcacctggacaaatcctactgtgctccccagaaagaatgcttcggggggattgtgggagccaaaagtccctacgttgatgacatgggagcaataggtgatgaggtgatcacattaaacatgattaaaagcgcccccgtgggtcctgtggctggagggatcatgggatgcatcatggtcttggtcctggcggtgtacgcctaccgccaccagattcatcgccggagccatcagcatatgtctcctcttgctgcccaagaaatgtcagtgcgtatgtccaacctggagaatgacagagatgaaagggacgacgacagccacgaagacagaggcatcatcagcaacactcggtttatagctgcggtcatcgaacgacatgcacacagtccagaaagaaggcgccgctactggggtcgatcaggaacagaaagtgatcatggttacagcaccatgagcccgcaggaggacagtgaaaatcctccatgcaacaatgacccgttgtcagccggggtcgatgtgggaaaccatgatgaggacttagacctggataccccccctcagactgctgccctactaagtcacaagttccaccactaccggtcacaccaccctacacttcatcatagccaccacttacaggcggccgtgacggtacacactgttgatgcagaatgctaacgatctcctcacctccacgccaagatgagatctgggagctaccgaatgttctggaaagaaaaagaatcagcttaaaacccacagcaagagacctccctcatgtttgtactttgtgcagagttgtttgagtcatttcctgcctgatgacatggttaaaaatgagagaaacaacaacacagtcacatttgtgaagacgtgaggctggctctgaaatggaggggaaataagcctgatgaacgaacctgccataacactaatggaagggaacagaaggcgagcctccaaacacagagacggaacctgcaagtgaagctgagccagaggaatgttccgaagagccagaagcattcagctctccttaactggaagagagaaaaatctgcttacccagagactggaatgtggcacatgcagatacaaatgtgtgcattgaagatttcactttgtttcttagcggtacctggataccacagttgctgtatggaactcatgctctaaacgatgcacctcaaaatttctaagtaaaggattatttttctactatttattgaactttcaaatattctcaaactttggggaaaaggaaaggaaacacaggagaagctttcagcagttgccccgagctattttgtgtgtaatgaagtgattctttgattaaggagctctatttcttatttaactgatatcccactgccccactccacaaaataggaaaatgaagaaatctttccctctaacttgtttacatcatttcatggaaacacatctttatttgtaatgcagtattctttctctgtgtttgacagagatggggaggggcagaggaatctaaaaggttttaaaagaaatgttttgtttcttatgacttgtttccactcctcgcacaatgctagtcttaggtttctacgaaacctaatgttagaaccgcatcctttcagctaagggagggttggatttattttccttgttttagagactacagatttttaaatgccccatttcgactagaatactgacatataagggaagaagttttctaaattgtgaatgtctggttcttaattaaagattcttttttaaatattacagttaaaagctgctgccagttatccaagacattatccaccaaactgctttgtgatttatacagggactaatcaaatctggctactataacatggggcattgtaactttaaagtagtgttttaattacagtggtgtattttagactcacattttgtgattcaaatatgttataaagacattcttgcaccgtggtaaagaatgtgtgtggtaaatctccgtttatatgtagttggaaaaaattcactgaataatgttttaatgatagggtattatgatacagtgtaaaaaacaattggttcttcagcagtacagaaagtaaactatatatgtgctatcaggaaaccccttcatactgtgtataaaattgcaatctagtgaaataaactgtatgcaacagaccaaaaaaaaaaaaaaaaaaaaaaaaaaaaaaaa

SEQ ID NO: 1744 - DNA, 612 bp, Macaca Fascicularis
aggggctgtgttagggccacgacagatccaaacctggggatctcggtggacgtcaggcgccccgtcttacagcagcgtcgagtgggcagtgcaggaccagccggtggccccacgtcccaggaggctcccacaccaccagtctccacccaggggcagaagagagtggggaaggcagccccctgtgatgccttggcagagcctctgcgtccgtctgcatcccattggcctggacgtctgcagcacatcctaacccgaaggccacaggcctaggcaaagctgtggctgccctttaccagggaggcaggttccagtcggcagtctctgccactgcgacactggcagcaaactcctgccagcaccgagtgaagacccacagcagatgggtcaccggggccagctgctttggggccgcacgatgccgctgggctgagctctgggaggcgggcagggcccggtgatggcagcggtcctgtgcctgcggccagccgcccaccctcgcagccctcggcactcctgtcgagggatcagaccctgcagaggctcgtggagacctgcaaacagcggggcctagaaacccactgggcaggggatgaagataaagggctgctctgc

SEQ ID NO: 1745 - DNA, 725 bp, Macaca Fascicularis
agatgccttcaagaccaggcaggcatagtgcccagtagccagcaagagcacccaggccccatctaaaggaagctaggctgcccaggcttaggcaagtgttggcatgcgggaacatgggtcattgtggccagatcgctccttcttcaagaaaagccagaaatctagattgtatgggaaagctcctaatttttaagacaatttattctaaaaagttaaacatctgtctgcagtccagatgggtaaagagacatgcctgtggttggaggactataccaaggaggtggggctcatgccaggtcttgaatgatgaggaaactgagccagcagagagacaggaaggagcccacacagggtcacacaggcagtcagcagaaacaatatgggaacccaggtctgctcggctgcacagctcaccgtccgacctctcccccgatccccatgggccttgcaccacggatggccgggggaatcctggattccagcagtcccacgcccctgtggatttgaagttccttgcgggtttatctcacgtaggcccatggcacacggtccctgccctgccctgccccacccctccccgccccaccctccaattccttcacaggctcctttgaacttggtcgcaaggctcgcccacaaatcccaggaagcgtcttggatgcagaagagtttcatggtgttccttataaaagcacaacctgacatgcaaaaaaaaaaaaaaaaaa

SEQ ID NO: 1746 - DNA, 721 bp, Macaca Fascicularis
  misc_feature (1)...(721): n = A,T,C or G
acagtgtgggtggcccacaagttattctcatgaccttctactttactgttttgaatagtttaagtagtttgactgttaaaacnnnnnnnnnnnnnnncagtagaaagtgcccctatccctggctggccaagccttcatctccacagcagccacttttgtgagtttcttcttctttttttttttcttnnnnnnnnnnnnnnnnnnnnnnnnnnnnnnnnnnnnnnnnnnnnnnnnnnnnnnnnnnnnnnnnnnnnnnnnnnnnnnnnnnnnnnnnnnnnnnnnnnnnnnnnnnnnnnnnnnnnnnnnnnnnnnnnnnnnnnnnnnnnnnnnnnnnnnnnnnnnnnnnnnnnnnnnnnnnnnnnnnnnnnnnnnnnnnnnnnnnnnnnnnnnnnnnnnnnnncaaactcaactcccgacctcaggtgatctgcctgcctcggcctcctaaagtgctgggattacaggtgtgagccaccatgcctggcctcttgtgagtttcttatacagtcacgtgaagcctaaggatgttttggtcaatgatggatggtatagacaagggtggacctgtaagattatactggcgccgaaaaattcctgtcccctagtgatgtcctaatggtcatgatgttgtagtgtaatgcattactcacatgtgtggtgatgctggtgtaagcaaacctgctaccctgcctgtcatctaaaagttcagcacatatgctac

SEQ ID NO: 1747 - DNA, 751 bp, Macaca Fascicularis
  misc_feature (1)...(751): n = A,T,C or G
atggnnnnnnccagactccgtagcttctggagagaccannnnnncagccagtgagtcttcacccagcgatgtgccccagagtccccctgagtcccctccctcaggggagaagaaggagaaggcaccagagcgcagggtatcaacccctgctcggccccgggggccccgagcacagaaccgcaaagccannnnnnnnnnnnnnnnnngggcagcgtccggccctacggccctgttccggaacactannnnnnnnnnnnnnnnnnnnnnnnnnnnnnnnnnnnngctcttggagtgnnnnnnnnnnnnnnnnaaaaaatacgagcacgtnnnnnnncagaacttctcctccagctggagcagtggcatggccttctgtgccctcatccacaagttcttccctgnnnnnnnnnnnnnnnnnnnnnnnnnnnccacgaagcgccggcacaacttcaccctggccttctccacannnnnnnnnnnnnnnnnnnnnnnnnnnnnnnnnnnnnnnnnnnacatggtgcggttggctgtgcccgactccaagtgcgtctacacctnnnnnnnnnnnnnnnnnnnnagccttgtgcagaaaggactggtgaagaccaagaagaaatgaggaggtgactggctctgtgggcagagatgggcagggtgcccagcacaccagctgtggcctgggggctcccttctgctcgatggaggcaccagagccaggggcnnnnnnnagggcatnnggcgttggttaacc

SEQ ID NO: 1748 - DNA, 638 bp, Macaca Fascicularis
  misc_feature (1)...(638): n = A,T,C or G
agtgtgagattacggccattagccactgtacctggcacaattttttttgtaccctcctttatgccaagaatcagtcctaatttctttactatgtgaaggaacttttaaaagtaacagaaaaggccaggcacagtggctcatgcctgtaatcccaggcnnnnnnnnnnnnnnnnnnnnnnnnnnnnnnnnnnnnnnnnnnnnnnnnnnnnnnnnnnnnnnnnnnnnnnnnnnnnnnnnnnnnnnnnnnnnnnnnnnnnnnnnnnnnnnnnnnnnnnnnnnnnnnnnnnnnnnnnnnnnnnnnnnnnnnnnnnnnnnnnnnnnnnnnnnnnnnnnnnnnnnnnnnnnnnnnnnnnnnnnnnnnnnnnnnnnnnnnnnnnnnnnnnnnnnnnnnnnnnnnnnnnnnnnnnnnnnnnnnnnnnnnnnnnnnnnnnnnnnnnnnnnnnnnagtaaaagaagaaagagtgaaatatattagctatcttttattctgagccaaaacttgacagatgtgggaaatctccatatagtgtatgaaaatttcattgtacagggaaattattttcctctgtgtctttccttttactataaagtgattcagaattttactgttactataaaattatgcaaagtattgtgac

SEQ ID NO: 1749 - DNA, 844 bp, Macaca Fascicularis
  misc_feature (1)...(844): n = A,T,C or G
agcctggcagatgtggnannncannnnncnnntcccacnnnaggttttggctagccaaccctgcaggaaagcagtttataggccattcatacttaagttgatcacttgcccatggtggacatttttgtagtggtgatgtccattaaggaaaccagattttcaattatttagtgagagaagaattagagcaaaagacagtggtaaatgttttattccgtctccatgaggaattaaaggagttggtctccacctacggatacatttgatttagagcttgagtaattcagaggctaagctctaaacttttttctctctcattgctggaatgatttaagcagaattccttttgtgtacttttaaaattgtatctttccaggagcccctcagattgtaccttgctttctcaccagtagacacctttccaacacttttttaatgttgtagttgagcactttaacaagttgagcattccatgtttcattcttagaaccttctttaatacagggtattccctcaacagcctgtgcctctggtctacctttgaccaccactggtaactcatatattggtcacaatgactggaatgtgactagtgatctcaggagatggcactgtcctaaagtgctctcagggtggcaccactgctctctgaacaagttgccttggtcagagggactcaggtttgggacagcacaagctgaaggctggcgagtaacttgcataataggaccatacctcttcctttcccatcccacccacatatgatagacagcccctctgtggagatacggaggggatagatattggaattgggtgtgggacttgcagttacttaaaattttga

SEQ ID NO: 1750 - DNA, 691 bp, Macaca Fascicularis
taggaaagttttgagtttcaagttagtgacaagtagaaaagatttttaaaaagcaaagaaaacaaaatataaggaaaaggaacatgagaaaattaaaaataaaaagagaataataggccagtccctgtggctcatgcctgtaatgccagcacttttgggaggtcaagttgggcagatcacctgaagacaggagttagagacgatcctggccaacatggtgaaaccccattctctttgaaaaatacaaaaattagacgggcacagtggtgcacacctgtaatcccagctactcaggaggctgaggcaggagaatcccttgaacccaggaggcagaggttgcagtgagccaagattgtgccactgcactccaccctgggcaacaagagcaagactccattcaaaaaaagagaatagaagaagctactgcatgatgtcagttgccaaacctgccacgggtcctctctttttagacacacttgatagatccccacagtgagctctgataagacactagatagatccccccagtggaaacccatcctcaccaacaacccactgagccctaggcactgtcgtccctcacctccaccttctccctgccttctctcttctctcctctgagcccccaggcctttcccattttgagggaggttgtctgaagaatgttgcccacacctgagtgtgagaagcc

SEQ ID NO: 1751 - DNA, 747 bp, Macaca Fascicularis
  misc_feature (1)...(747): n = A,T,C or G
taactgaaacccttcctgtnntagggagaattgctgctagtaacgtcagtttgcaatgttcagctttagatatgtgtcggatgggagtctgaaaactgtaataaactgtattcatatcctggctgctttgtccgctgcttttggggggtggcagagaggaggcaggggagtctgttaccaagtggagacacctgtctagaaagttaaaacatctcaagccttctgcatttgcattgttgtaaccttgtaccttttctttaccaaagcccacacatctaaatcaccactcttgccgggcacgnnnnnnnnnnnnnnnnnnnnnnnnnnnnnnnnnnnnnnnnnnnnnnnnnnnnnnnnnnnnnnnnnnnnnnnnnnnnnnnnnnnnnnnnnnnnnnnnnnnnnnnnnnnnnnnnnnnnnnnnnnnnnnnnnnnnnnnnnnnnnaagtaatcctggctgctgggaaggccgaagcaggagaatcgcctgaacccgggaggtggaagttgcagtgagctgaaatcacgccactgcaccccgggctgggccacagagcaacactgtcgaaaagaaaagaaacaaacaaaaacaaaattagccgggcgtgatggcgcgcacctgtagtcccagctactcaggaggctgaggcaggagaatcacttgaacccggaaggcaaaggttgcagtgagcnnnnnnnnnnnnnnnnnnnnnnnnnnnnnacaatacagcaaggctccatctcaaaaaa

SEQ ID NO: 1752 - DNA, 1824 bp, Macaca Fascicularis
atgtatgtatggctggtcagtgaacaagggaggggtggtggtggaaaaagatgcaaggatcacgcagggtcttgctggccaaggcaaggagtttgcatcttattctaggaggcacaggaagctggaggaaacattgtaagtaaatgagtgatgtgattcccttatgtactgcaaagtttcctccagcagctgagaggttgaataatttgtacaaggtgaggtgggcacaaagaagaaagacggagggggctaaatgactcacctgccacctgggcccctctgccttgaaatccctttcccgaatactggtctattttactcgactactagtattaacagactggaaagaaagaatgcaggtaatggtcagagaggcaaaccagacttaaaaagctaaagcaaaaagttggattattttaggaaaatgaagcagggtcattcatgctaaatcctgggaagctggccttcgagtgactggcttgtgtggcccttgcagtgttgctctgtaacccaggtaaccaggtgaggaggctcctttttaaacataccactgagaacaaagcttcgtttttgggtcctcaggtacaaggaggactgatatatttgggtccccggaactctgttcctttatttcctctgccttcttgctaataacctgaattgtgcagacactgctgcggctaccagcacacaccagtgttgaaagcagcaagctttggaaggttaaggagcaagttgtgcatgaaacgcttgaccctgccctgctaaataaagaacccacatatagcctacagtgggaagaaaagagagagaggatgctccttgagaaattttttgtgtgttgcagactcttttcccctccccttcctcctcccaacccacccccagtccatctgtgatgcctgaattctttacaggctgtctttctaaagacatgctagccttaatcaccttctctgtattgtgtatcactcctgtatctatctacttatgtcagttgtttaccagttcccttcagctgtctgctttttatcatattattgatcagtcaatcttgggcgtctcaggttggaggggagagagagagccggcaaagggaagcaggagtagagaatagcggtggcggacaatcagttaagatggttccaaaaatagctcagccctgctgatgatagctctgcttgcggccaccccgtatgggatttacgcacttcactaagattctctgctgaaatggattcgaccagctgttcctgcagttggtggtggctggtggtggtggcggcagcaatgggccggctacatgttcagagaaggaattggaagcgataggtttgcggcaaggcaggctcccacacagggacgagatttattatcagaggctattaggactcaggttgtggggcatctgtgttctttgtacggtatccagtttctttttgtcctttatctcttttgaatgagatgagggaataagtgatgagaaatggttgtatttctcacccactgtatgtgtctatgttgttgctttgctctagtttactttatatataggcttttttctctactgcactttctgttgggagactcagctgtgtaaaggtcctaactttataattctttggtcttatccaagacttagatttgtcaaagaacctctgcaaagtggctgggtctaaaaatgtaatataagtaagtattcatagagggcccctgtccctcaaagactccaagtctttgctatgtggaaaatgcagtatttcttatctcatctagtaaggtgatcctctctcaggagaaaaaaaaaaaaaaaaaaaggccaca

SEQ ID NO: 1753 - DNA, 715 bp, Macaca Fascicularis
ctatattgtagaatgaagaactttgccaacctagtgccaacctagttaatgaagactcaagggaggtagatagagactcatgaggctatgcacagcaaatatgaactctttttggtctctggcttgtattataatttgacttttgaaaaaatatttcttgcatcaggttaatatataatctacttcatgcttacttctgaggtgggcataattgaactgttcattagacaaatctttaatagcatcctactatgtgtgaagcattgtactaggtgctgggatatatagtagtgtacaaaacagatcaaacccctcaatttcatggaacttacactctagagggaaatacagacagtaaggtaaatatgtaaaattcatagtatgtcagtgataagtgcttaggagacaaaggagggggagagaaggagaagtcttgcttcattttgctttttaacgatttttaaataaggtcaggccaaggtgatattttattaaataatgaaggaggtgaaggagtaagccatagagatatttggagaaagaacagtttaagcagagaaaacagcaaatgcactgaccctgaggcaggaatgggctgggtgtgttggagacccgatgtaggtggtggcaactccctgccagctctagccctgtggggcttcactgtccttgtcaagttccctgaactctgtgcacacctttgtaaatagtcccg

SEQ ID NO: 1754 - DNA, 467 bp, Macaca Fascicularis
ggaggaggaagagatcaggtggaaaaggagggagatactctcagggggcgtccagagacagagcccaggggtctgagatgtgtctcacggcgcgaaaagcgcgagagaaaagtgtggtgtgggagagagagacgggagattttcacacatcccctttgtgagatcaagagagtctggcgtctctttttgcaaaggcatatgaaagtgtgtgcgtccccgtgagagtaaaatgaggagggggagggacagcccaccccgtgtccaccacgacccccgttctcacgcggaccagagtttcttccccagtcatatttctcgttccacagagggggggggggaggtgtccatatcagtgtcaaaaatatgtgcacagagaggcaaaatcttacttccccacagaaaaaaagaatatgaaaataaaaatgtgttctcaaatatatgctatgagagggggagggagaaaaaaa

SEQ ID NO: 1755 - DNA, 738 bp, Macaca Fascicularis
  misc_feature (1)...(738): n = A,T,C or G
acatnnnnngaggtggcatttgtgtaaaataacaaattgacgattttttaaaaatagttactaatattctgtagaaaaccggacgtagacctttttgtagaaaggtaaaactttgtttttatttttattttattgcgagatctttatagtagagccagaagtgaaagtgtttagctttattttgtagtttcttcaaattgctaggaagtaattagcagctgtatttgaaatctagaatatacaatctgtgaaagcagcttagggcctaagttttgtaagcattcaaatgccacctttttgcagtttaaaaattttctacatttcaaaataatacatgatctttgtcaaagcttgcaaaattcagggattactagaaaatctttataacattttctataatcttaccacttagatttggttactgttaacattttcgcgtattttctttccagtctttttctgtgtattttttctctgcataatgaaatatattgtatgcatatgtatacacacacatatccctaagcttttcttatcattaaatatctttagataaaaaatttttactcaggaatggaaatcttttaagcgtgttatgttttcctgacaaggttgtattatttacgtcagatgaaatgcagtagttacgcttaataactactagtgtggacagaactttttctaaaagcttcttgtttcaagtacatttattactttctctgtaagacttggatcctc

SEQ ID NO: 1756 - DNA, 728 bp, Macaca Fascicularis
taagatttttgttttatcttcatatactgaaatacaaaatgaggatgcctataattaatcaaagatataatttttaccaatagatagtaaagaacaaaacactggaacaagaattccggtcctgcctttcacaatgtggttttgaggccttggccatgtcacttaaattctcatatctgtttcctcaatctataaatgatcataatacctgcactatctatctcaaattacatacgtgaaagcattttaaaggtataaaacaataaatgcaaaacattattattaaattattataccttccaatatttaatgctaaaaatgtcaagagtcctttggttaaatatataggaaatatgtcttggaaaatccatttaaaatgataaaagctaacagataagtcattttaagtgtgtggttatcttctgcatggccgatttttaaatggtaattattaatgcagttttcttgtacttattgtttccaagactccattctttccaaagttctctgaattatacttactatcctttaagtcttagggatgctcttctgagcttttgggatttgtttaattgttgtatatcatttttgtacatattttacatacatatcatagttgtacatattttgggggtacttgtgatattttgatacatgtatatagtgagtaatgatcaaatcagagtaattgtgatatccatcacttcaaacatttatctttgtatggg

SEQ ID NO: 1757 - DNA, 733 bp, Macaca Fascicularis
caggcatggtggttcatgcctgtgatcctagcactttgggaggctgagttgggcagatcactggagctcagaagtccaagactagcctgagcaacatggcaaatgccgtctctacaaaaaaaatactaaaattagcctgttgcggtgacttgtgcctgtggttccggctacttgggaggctgaggtaggagggattgcttaagcctggtagatggaggttgtagtgagctgagattgtgccattgcactctagcctgtgtgacagagcaagaccctgtctccaaaaaaaaaaaaatcttttgttcgaatgccctatagccatcctcacagcgcccaggattgtgactgactgcatttttaattattgaaacttggctttccataacatggtacatgcttcaggactacatgtgacccagagagcaaggtggctgaactatagtcgggaagccctcaggtaaagaggcgcgtctcaccacttactggttaaacaacgcgtaacagcgaacacttcctttccctggagaatgggatgtgaagcagtggaccgcagccacgccgatggttatgcagggaagaagacttcacctcttcctgttgagtttgcttggaatgctggctgcatcaggaaactctgaactgaacatttgctttgtcagaaaatctcttttattttactttgaagtttggcaaccttcatgttaccctaaagcaaaaccattgtgtcaggagt

SEQ ID NO: 1758 - DNA, 331 bp, Macaca Fascicularis
cttctcgtctcttgcctaggaactccaggcttgtcttggctccaaatggatcccaactgctcctgcaccacaggtgcctcctgtgcctgtgctcgttcctgcacgtgcaaagagtgcaaatgcacctcctgcaagaagagctgctgctcctgctgccccgtggactgtgccaagtgtgcccagggctgtgtctgcaaaggctcgtcagagaagtgccgctgctgtgcctgatgttgggagagcactgctcccaggcataaatagagcaaccagtactaacctggatttttttttttcaaactacgctgatcggtttgctatgttccttcct

SEQ ID NO: 1759 - DNA, 692 bp, Macaca Fascicularis
  misc_feature (1)...(692): n = A,T,C or G
aaatcagtgtnnannncacnntggagtatattggnnnnnccacagcttatagttttgataaaggcaaatacgtgaaaaatgaaaatgctactaatgccccaaggtgtctatcaaaatgatgtagggggtatcttaaactgtccaaaacaatcatgcattgaactttattcctatgcagagccaatagtgttgataaaatagttaaactttctaaactggagaggaggctacagtgccagagagttattgtctcttttgctttaaatggtaatcttaaaagttgcattgtgctcttcctttgtttggggatagatatatatagagagagatactataaggaagtttatttcttaggaagtgcactgaataatgcatttcttttacagtgtaatatgggggtggggatatgcaaaagaaatgtgtatttttgctagttgcctatcttctgagataaataagcacaatcttgcaatggatccaataacccagttaggtattatagattagtatttaagtttgctgtagattgtgtgtgtgtgctaagtaaaagttccatgattcacaattttagtattaacccatgttgcaaaagctgttaccggccaacagattgtaatgatgtgtaccatataacacaagcattaactaggcattaacgtttgtaaagccaaatacaccatgcagaagtcttc

SEQ ID NO: 1760 - DNA, 809 bp, Macaca Fascicularis
  misc_feature (1)...(809): n = A,T,C or G
ttgactcnnnnnnnnnnnnnnnnnnnnnnnnnnnnnnnnnnnnnnnnnnnnnnnnnnnnnnnnnnnnnnnnnntgcgcatgcgcgtgtgcacttgcacaagcttgcgtgtccgtgtttacttcatggaattttgtttttgtgaaatccccctccaatcatgtgtcagaatttacctccatgccccagtcacactgttggttctgctctctgaacccgggtgtagctcatttgaaggactctcttctgtgtttcctaacagttatttggtggtctcaagagttgaggttgtggagggttgggagaaactgaaattctgtacatttccatagagtttacatcctgcagttaaaaggcaggaagggcttagcccgggccccacagctccacgccgccccccacgggccgcccacagtgcccccgtttctccagctgaatctttttcgaacagcccaggaaaggaaagcgggttcgcttgctgattttgttcacagcggaagcaccatgttctgttccttttttaggttcagtttgttgtgtannnnnnnnnnntttctggtgtgagctttggtgattgtggcagggctcctctgaggagacggttccacctcgtggtttgaagaacaaaccagagaagagtctggtttggccagaggacccctctggcccacgtcaccctgagtacgcccctctgatgctctgctgtcaagaagcacgtttccaccagctgtattcaacactacaatgcatttttaaaactatattgcatccaagacaaaaaagaaaccttattttttttgaaaaaaaaaaa

SEQ ID NO: 1761 - DNA, 679 bp, Macaca Fascicularis
  misc_feature (1)...(679): n = A,T,C or G
ggtgaaggannnnnnnnnnnnnnnnnnnnnnnnnnnnnnnnnnnnnnnnnnnnnnnnnnnnnnnnnnnnnngaggtatggtctgtctggcagtgatgtcctggataatgtagcatatgctcgagcgttcaacacagaccatcagacccannnnnnnnnnnnnnnnnnnnnnnnnnnnntagaatctaggtatgcactgcttattgtagacagtgccannnnnnnnnnnnnnnnnnactactcgggtcnnnnnnnnnnnnnnnnnnnnnnnnnnnnnnnnnnnnnnnnnnnnnnnnnnnnnnngcgacttgctgatgagtttggtgtagcagtggtaatcactaatcaggtggtagcccaagtggatggagcagccatgtttgctgctgatcccaaaaaacctattggaggaaatatcatcgcccannnnnnnnnnnnnnnnnnnnnnntgaggaaaggaagaggnnnnnnnnnnnnnnnnaaaatctacgactctccnnnnnnnnnnnnnnnnnnnnnnnnnnnnnnnnnnnnnnnnnnnngagnnnnnnnnnnnnnnnnnnnnnnnnnnnnnnnnnnntctgttaaaaaccttaagtgctgnnnnnnnnnnnnnnnnnnnnnnnnnnnggggttctccacaggcctcnnnnnnnnnnnnctaccaggaaaaggcttcc

SEQ ID NO: 1762 - DNA, 635 bp, Macaca Fascicularis
  misc_feature (1)...(635): n = A,T,C or G
agatcaaggagcccagaaaacctccagtagtccaaacaggttttcaccatagcctacttcaacccatttntgagccaagcttcaaccatgagccttgaaaaacaagtctttttttaatttaatttttgttttttgcctcctcctcatcgtacgtagcctgaatccaaagaaaaagggctgcctggccnnnnnnnnnnnnnnnnnnnnnnnnnnnnnnnnnnnnnnnnnnnnnnnnnnnnnnnnnnnnnnnnnnnnnnnnnnnnnnnnnnnnnnnnnnnnnnnnnnnnnnnnnnnnnnnnnnnnnnnnnnnnnnnnnnnnnnnnnnnnnnnnnnnntgcatgtgtaatcccagctactcaagaggctgaggtgggagaattgcttcaatccgggaggtggaggttacagtgagccaagatggcgctactgcactccagcgtgggtaacagggagagtgtatctcaaaaaacaaaaaaaagagggctgtccatgtactcacacactcctcaaaaaaagccttttagttcctactttagccactggtttctcagaatccaaacgatcacatattctagtgtaacactgcaagaagtcttgagaaaaagattattgtagtgttcaaaatattttgcatt

SEQ ID NO: 1763 - DNA, 746 bp, Macaca Fascicularis
  misc_feature (1)...(746): n = A,T,C or G
cgcaccttntatttcaagaactnnnntattattaaggaaaatgtcacattgtgatgtattaagccagtacttcaattacgggttgacttgggatgacatattacatgctgtagttaacatttacgattttttttccttgtttgannnnnnnnnnnnnnnnnnnnnnnnnntacttggcttttctagatagctttatttgatttcgagtggcaaaatgttttttattatggcttttctattgctgtatgatacagaactcttttggcataaatatttgtgttcccagtacctcacttgtnnnnnnnnnnnnnnnnnnatatgttttgtgaaatggtcctgttttcgggtaggtgacacgtggactctagtatgtaaatgttacttnnnnnnnnnnnnnnnnnnnnngtgtggcatgtatgtgcggcctcttggatgctttatgcctgcgcagcaggagccctgtcctcacgttcccaggagggcggcttcacccttcgtaaccaggagacaaggcggccatggatttgcccttgattctattttgctaatggaagatataaaggagagaaggttttttttttttaacattctgaagatggtgctgtgtcaagaaggacctttttttcttccctctcccctattttttaagtaccttggaggaggagagattggtgacatgcatggtggggatctatggcctctggtgctttgtcctgtatttggtttaatgtttttgtcctaatctc

SEQ ID NO: 1764 - DNA, 752 bp, Macaca Fascicularis
  misc_feature (1)...(752): n = A,T,C or G
accgggccaagcaggcctcccaacatgccttgcggnnngcaccgtagccgtagaggtttgcggtggggctgggtccctggtggggacctgcaagggctttcctgtagggtctggggcttccccgtcacagcatggccttccagcttggcctgacacctggggagccccagcatgcggagcgtccagagtgcagactcccctgccttccacagtgatgggggctcagcatcgatatctctactcccacccgcctgcctccagccctggctgcaatgtctccaccacaccccagccccagggggagcaaaccctgcccctgcccccctttcggaaaagctgctctggtgggcaggggattgggccatctgtctcctggcccatctgcctcctnnnnnnnnnnnnnnnnnnactggggtgggggccnnnnnnnctggaaccagggctacaggtgcagagtctcctggggaagggaggaggaccctgccaaagatgaggctccagctgccctgaggggagggtggtggccattactagagggagcctgggtcctctccccaggggctgccagcatccaggccaggaggcctgnnnnnnnnnnnnnnnnnnnnntgagggagnnnnnnnnnnnnnnnnnnnngnctggcacggacagacggaagcagaaaggacagtttggccgctgtgtctgctacgcatgcctcctccccagaaagcacctgccacctagaaactttcttagcaaaaaaaaaata

SEQ ID NO: 1765 - DNA, 269 bp, Macaca Fascicularis
  misc_feature (1)...(269): n = A,T,C or G
ggcctatgtcaacacctggagggcacaggcctcagtgtcaacgcctggagggcacaggcctcagtgtcaacgcctggagggcacaggcctcagtgtcaacacctggagggcacaggcctatgtcaacacctggagggcacaggcctcagtgtcaacgcctggagggcacaggcctcagtgtcaacgcctggagggcacagacctcagtgtcaacgcctggagggcagacgcctcagtgnnnnnnnnnntgccctgcacatggaaagccc

SEQ ID NO: 1766 - DNA, 1998 bp, Macaca Fascicularis
attctgtaaggcaaaaggtcagggcacaagaacagccctaccacagtgaaagccacaccccagaatggacccacaccagaaccactgtttcaaaataagctgaagacaaaaagaaaatgacagaagaaacgaaaaacaacgtaagtcacaatcagaaatgtcagaaaagagaggtctgaactcggggaagaattagcaataaaataaaaaattcacacggcaagtgaagttgctaagaaggagtgtaagggaaagtccagcaagtccttgcttcgtgctgatggttccggaaacggccacaaagcaaagcaaccaccgtagaacgaagccgaattcaccatccacacaggctgccgacgggagcaagagtgacgctcccacagcactttctagtcacaagaacatcaccaaaccgccaaagaccaaaacacctctaatagtaaacattaaaataaatggaagcaatgcatacatttaagaccgagtaatagacaagttagatcataatttactgctgcagcccatccagcggctcagggcgtgaagcggggaccagccctaatcagacgtcatcgcacggcgggcggctcgtacctgcgctcactcgggacgggaagggtcagacacgccaacgccctggtgtgcacggcttcggggcatgggaggacaccagcgcccccagagaaaccacggagccgggagagcaagccacacacacagttctcccgggcagagaaccgattgttttttctcatcacctttccgacgaaatgatgttgaatgaacagttattcaaggacctgttgtaaacataacaatgtcttaaagaaacagaagatagaaaagcaaaatttgtaaataaaaaagaagactctaaggaactcttgccactcaataaaaccacccaataaaaaccaacaggcgaaagatgtgaggagacgctgccctagaggacagagcggccacaggcctcatctgcagctgcctccctgccacaaaggccacggctggttgggacagacaccatgaggcccacgcgccctgaaacagttactacctggactttaagaaaaagcctgtgagcccctgagaggttagaccaggaaaagatgctccactggtcattctcagggaagtatgagttaaaacttccaagaaactccatgccacaccgagaaggttaccatggacagcaaactccatcggcacttccttatttaaaatccaggtatctgaacttgaaatactgaaatcacttttgtaaaaatagcaaaatagaacaaaaaaagtgaagagagggaaatgagaaagatctggatctggatgaaacagtgaccacagcaggcctgctcgggagaaacacgggttcaccagaaatgcaacccgaatctgtaacgctgagacgctgggcaacaggctcattcaccgattcgacggcagcataaccgtgggaggacaccagacaggagcagcgaatcccacagtgaccaggccgctccagcagctgcagccctgacaccctgtgctgaggggaggacggccgggcagggggaggacagaggtggccttgcctcccacatccacgccaggactgccccagacacgcgtgtgtgccataaactctggccgaggcagcctccatgccagccagcaaggcagggactcggctccccacttaccaactgcgtctgctgctgcttgccttcctcgttacctaggcacatttgaacgcttacagtttacaaaatgaccaaacttaccagcaatctgtaaatttaacgtggctgcagtgtctgcactcttcacttcctttttcatactcaacaaaagcgattttaagctactgttctcttccaaagatttatctaaatgttgtcttaaatcatcctggggacacagaaaatacacttaaaatgcacaagtcaaattcagtaaaatgtgtatagaaaataaaactgaaaccttctgtgaatccccaaaaaaaaaaaaaaaaaaaaa

SEQ ID NO: 1767 - DNA, 674 bp, Macaca Fascicularis
gggatgcgtattaacgccagactcccgcaaagtcttgccttcaaaactcagccgctggggagacacgggtggaggggggactggaaacgtggcctcgacgcctctacagagcccctccagcattgggaggcctaagtacctcaaggttcaggcccccggaaggagtcgggggagggaggtccggtgctgtacgtgtgaaggagctaccccacaaacgccagggacaccgtgaggggttcttgggtttgtaacgtcttaacatcgctgatcgaccacagctgtgcaggaggggcagtaggtatctgttgctacagttaccggaacctttgccaggactagtgcagaaccacgggtgaggatagtggggaagcctgcgtggggcaagggaagggtgaagcagtgagaagagggaagggcagcagaggcctgagtggttgcaggttcacacactgagctgccagtgactgcctagctcaaacgggctcaaatccagaggccaccattgctcctcaccgctacccccaggtccagctgtccactagctctgccatgattgatactgcagctcaaacagtgccaactaagacccactctcctccgcctgctatgggcaacacggtgtggttacagctttactcctgtcctctttccccaggctggcagctcagggaggg

SEQ ID NO: 1768 - DNA, 2189 bp, Macaca Fascicularis
  misc_feature (1)...(2189): n = A,T,C or G
gagcattctccttagcaattgcgggactgcggcggcgccggcctccggggagaaacgtgaatgacaacagagctgctcaaggcgggaactctgagctgagcagtggaggtttctttggatctggagagaagagtgaccttggagccaataatgagccatcctgactacagaatgaacctccggcccctggggacccccagaggtgtgtccactgtggctggcccacatggcattggtgcttcgccaggtgacaaaaagtcaaagaacaagtccacacgagggaagaaaaagagcatatttgaaacttacatgttcaaggaggatgtttcggaaggcttgaagagaggaacactcatccagggtgtattgagaattaatccaaagaagtttcatgaagccttcattccttccccggatggtgatcgagacatttttattgatggggttgttgctcgtaatagagccttaaatggggatctggtggtcgtgaaactacttcccgaggagcagtggaaggtagttaaaccagagaacaatgacaaagaaacagaagctgcatatgaatcagatatccccgaggagctctgtggacgccatctcccgcaacagtccctgaaaagctataatgacagtcctgatgtcattatagaggctcagtttgatggcagtgactcagaagatggacatggcatcacacaaaatgtgctggttgatgatgttaagaaactctcagtttgtgtttctgaaaaaggaagagagcatggtgatgcgccagttacaaaagatgagaccacctgcatttcacaagacacaagagctttaccggagaaatccctgcaaagatcagcaaaggtcattgcctacagattttcttcacatgtccaaatggctctcacctgagctccttgttgaagatcttgtgtgattcagtcaggactgtatttgttcatttaatcagaaaagttagagcagagaatcataaaaagtgaatttaaaaaaaaactttaaacatataaatatgaatccatctgcctgcctttggataaggggtcaaggccttttctttgagtgtgggtgtgttgattggagttctatgttatctttgttgcttaaaccacacttgtaatgcctttggataaggggtcaaggccttttctttgagtgtgggtgtgttgattggagttctatgttatctttgttgcttaaaccacacttgtaatgcagcatttatcacttccagttttggtggagtgagtggagtgagaattagacactggagaagaagtatgaatatagactctctccagatttgtacagtttttgctccagtttttttttattgttaccatgcccatacctaatttaaaaataatttttaatgtcttttttagtttttccgaagtattcaatttagttacgaaacaattgtttttatattcctatttcaccattttgcacaattcacttgtattctttaattatataagctagtgtcattttcagatgtgggatgaaacacagctgacttcttcttttgtttgtttgagacggagtttcactgtttttnnnnnnnnnnnnnnnnnnnnnnnnnnnnnnnnnnnnnnnnnnnnnnnnnnnnnnnnnnnnnnnnnnnnnnnnnnnnnnnnnnnnnnnnnnnnnnnnnnnnnnnnnnnnnnnnnnnnnnnnnnnnnnnnnnnnnnnnnnnnnnnnnnnnnnntgccaggctggtatcgaactcctgacctcatgatctgcccgcctcggcctcccaaagtactgggattacaggtgtgagcccacacgcttgaccaaacacagctgacttctaactgtgcagatagctcaaagtggtagaaatggtgaagggcaaagtataaagtggcataatggcatgagactttatgtttcagaagcatccatcagtgtgtttcatctgggaatgcagtgtgcttactctacccagcaggttggttagtagagtattgctcttgcatactgacgtgaggaatttctaaattatactttgtatatttcagtactaactgtgctccaggcaacatgctaggtgtgggagattagaatgaatggaaagcctggggatggatctggctcacagacctattttgtttgaccttgcagtatttaaaaattttgacttcattgctttcagcaaaaaaaaaaaaaaaaaa

SEQ ID NO: 1769 - DNA, 676 bp, Macaca Fascicularis
  misc_feature (1)...(676): n = A,T,C or G
gcaaaactcaannnnnggaagaggaagagttctccagagncggaactgagggttggaactatacccgggaccaaactcacaaccacttgaggcctgcaaaccttcctgggaggacaggcaggccggntggcccgtgcannnnggaatgctcccaggtgtgctgtggagagaagctgaagttttggtgtatagtcagccatcatcctgggacttggagactatggcctcgcctccccacccttctcttggaattacaagccctggggtttgaagctgactgtatagctgcaaatgtgtctcctttaatctggtgcctcctcaaacccagtctcagacactaaatacagacaacaccttcctcctgcagacacctggactgagccaaggaggcctggggaggccctaggggagcaccgtaatggagaggacagagcaggggctccagcaccttctttctggactggcgttcatctccctgctcagtgcttgggctccacgggcaggggtcagagcactccctaatttatgtgctataaatatgtcagatgtatatagagatctattttttctaaaacattcccctctcccacagagtgctggactgttccaggctctccagtgggctgatgctgggaccctcaggatgggactcccggctcctttctcctgtgaatgg

SEQ ID NO: 1770 - DNA, 563 bp, Macaca Fascicularis
gccgcccttttccctttgatagatgcgtttgagataatggagtaggagtgaggccctaaggcacttctggtcaagacattccacctgcaagcagcattttgagcaaagcactgctgtggtttgccaatttatggtccatttaatgtcaggctaaagcacctttaatcatttttgttgttttaagataatatatttgtgaagtggataaacactggaaatagggtgcttcttctggaaagttcagtggaaaacacaaggctttggcgggtttatctggctttataaacaagtctgaaaaatggatgaaagctaaatatataaagcagttggttgtctatcttttatcattttaactcagatctgtatttaacacttatttatttgttagtttttacattcaaaagaatacactttgaactttggctaacattgtaggatatttttaaattgtttctacgtttttaaagcatgatttcatctttttgtaaacttagatcatttttgaattgccttttcttttccaatagaccaattaccactcatgtgtctgcagaacctcttta

SEQ ID NO: 1771 - DNA, 731 bp, Macaca Fascicularis
cacatggacacatgaaggtgaggagggtggatttattaagcaaagaaaagctctcacaaagagaggggttttcaagcaggtttccttgtcacagttgaataccagggctaccacatacaagcttaaggggccagcctcctcccctgcataaagcatgaattcctggttgctccaccccattcccctagtgcctgtgggcctccagtctgctgtgggcatgcccaggcaagtcccctgtgcaggttcccttatctgcacaaaacatctggtataaacacttgtggggagggtcagagattctctgggtacccttccctatctgcctagacctttgtctgcctcctgcctcttatcaatatgtttcctatcatatttatattgcattctatttacttagtctttctgtgtctagaaatgctcaacagaattttttaaaataattgttgaataggattctatcatataaatgtgatatggtttagctctgtccccacccaaatctcatctttaattgtagttcccataattctcacatgttgtgggaggggcccagtgggagatacttgaatcatgggagcagtttcccccatactgtttttgtggtagtgaataagtttcatgagatctgatggttttataaggggaaaccccttttgcttggttctcattttcttgtctgccaccatgaaagatgtgccttttgcctttgccgtgattgtgaggcctcccca

SEQ ID NO: 1772 - DNA, 732 bp, Macaca Fascicularis
  misc_feature (1)...(732): n = A,T,C or G
annnncatgtgctgacagcattcatattaacatactcattctnnnntctccatcacccatacccacacatacatctagtatgtttaaaatagggttctgtgttcagatattttgtttgcacactactttttaggaaacttataatgnnnnnnnnctacagtgaatccttaccagtgttcagtcctccccaaaacttggataaaaatattctcagctannnnnnnnnnnnnnnnnnnnnnnnnnnnnnnnnnnnnnnnnnnctgatgtaaccttttattttatttatgtgacagactgcatatttatgtggannnnnnnnnnnnnttgctaggcattctgtatggttttaaagaggatatattatttagaaaaatggatatatgaatatttttaaaaattgagtcttaaatttaaatgggaagggaagaaaacaccaaataagaaaaaaatttgcctttaagagttacctttattgaatgtatttgacttagttcttattttaaggctaaaaacactttgtcatatttaagtcaggcaactttctaatttaatcttagctttgtaattcatgtttttgcttttgtagactaaggtaaggacagcatttaaatatttgtgctggagtgaggggaagactcttacagaagtggaatggtttctggtggtatttctgaagttaggtaaagtgctttacttgccttggttaattgaaatagaattcagctcaagcag

SEQ ID NO: 1773 - DNA, 771 bp, Macaca Fascicularis
  misc_feature (1)...(771): n = A,T,C or G
tgactgcaggcccnnannngaccnnnnnnnccccagcagagacgtagcatcacgcgggacannnnnnnnnnnnnnnnnnnnnnnnnnnnnnnnnnnnnnnngctggagaggtctccaagtggcttcagcatctcccaggacagagatgattatgtgtnnnnnnnnnnnnnnnnnnnnagctggatgagggagaagcggtacctcgccgagggtgagacggacacagacacggaccccttcacgcccagcggatccatgcctcnnnnnnnnnnnnnnnnnnnnnnnnnnnnnnnnnnnnnnnnnnnnnnnaacaagcccatttgaaagaggtcactggctgaccccacttgtaatgtagacagactttgtatagtnnnnnnnnnnnnnnnnnnnnnnnnnnnnnnnnnnnnnnnnnnnnnnnnnnnnnnntgcatgcgtgtgtgtggtggccccacccaggcaggggcttcccacagcctcttcctccccatgtcaccacaacaaagtgcttccttttcagcatggtttgcatgaccttacactatataaatgnnnnnnnnnatctcttctaggatacacatttatctgctgttcttaacttnnnnnnnnnnnnnnnnnnnnnnnnnnnnnnnnnnnnnnnnnnnnnnnnnnnttgtctgtttggttggctggtttgggttttggtttggtaagcagagaaagtagtttaagttatttnnnnnnnnnnnnnnnnnnnnnnnnnnnnnnnnnnnnnnnnnnnnnnnnnnngaa

SEQ ID NO: 1774 - DNA, 727 bp, Macaca Fascicularis
gtgcagggtcagagctagaacctagcaggtggccagaatcattttagggtttcacctcagcattgcagcagagatcaactctctcgtgagtcagggcaccttaggccttgctgtatatccctttgttaagccagcaactagactcctagatttaattctttaattcttttcgaaatggaagaatgagctttgttttactgactgccagtgttgtctatattggatgatagcaaaaagtgtagtttgacaggttgaccacaagatggaggagtgaaaagtactagactcctttttgctctaaagcagatcctttcaggatctgagtcactgggcagtttctccaatgtgagcagacagaccctgttaaccaaggagcaaaggaaagtatatttaaagaggctgaggtgtttggccacatattcctttatgttcatctccattggtctcagtgaggacataacccctggaattcactccagtgcaaagtttaaatactaccagcatgataatgtacttgaaggtttcccaaaatgtgctagacaagagaaaaggtcccagctgagagaaaaatccacctgtctcccatctggggctctatagcctcactgatagaaaagggaaaggggcccaagctaagcttactttgagggttcataatgttcagagatgctcaggggacttctttgcttgtcctctggtgaggacattggattcatttcctcaaaat

SEQ ID NO: 1775 - DNA, 732 bp, Macaca Fascicularis
  misc_feature (1)...(732): n = A,T,C or G
agatgaaaatggagttcnnnnnnnnnnnnnnnnnnnnnnnnnnnnntcttttgggagcnnnaatagagcttatannnnnnnnnnnnnnnnnnggtggtatcgggcccctgagttactatttggagctaggatgtatggtgtgggtgtggacatgtgggctgttggctgtatattagcagagttacttctaagggttcctttnnnnnnnnnnnnnnnnnnnnnnnnncagctaacaagaatatttgaaactttgggcacaccaactnnnnnnnnnnnnncggacatgtgtagtcttccagattatgtgacatttaagagtttccctggaatcccgttgcatcacatcttcagtgcagcaggagacgacttactagatctcatacaaggcttattcttatttaatccatgtgctcgaannnnnnnnnnnnnnnnnctgaaaatgaagtatttcagnnnnnnnnnnnnnnnnnnnnnnnnnnnnnnnnngccaagaccaaactgtccagtggaaaccttaaaggnnnnnnnnnnnnnnnnnnnngcgacaaaaaggaaaagaacagaggccttagaacaaggaggannnnnnnnnaaactaattttttaaagagaacnnnnnnnnnnnnnnnnntactgaaggaaatagccaaaaaaggcaaatagtggaaaaatagtaaacattaagtaaatgctgtagaagtgagtttgtaaatattctacacatgtaaaata

SEQ ID NO: 1776 - DNA, 623 bp, Macaca Fascicularis
  misc_feature (1)...(623): n = A,T,C or G
ggtctgaatccagccagcgtcntacatcatacctgcttcagcctatgcaatggagagagcctgagattttatttcaataagaaaataagagttgcattatatcaaactaaaagggagaaacacaaacataaaaaaaaaattttaaacccagaaattccaatactaggcaaccctccaaaattggcaaagctctgtgtatattaaaaatgtattgagtccaggcatggtggctcatgcctgtaatccctgcactttgggaggccaaggcaggtgatcacttgaggtcagnnnnnnnnnnnnnnnnnnnnnnnnnnnnnnnnnnnnnnnnnnnnnnnnnnnnnnnnnnnnnnnnnnnnnnnnnnnnnnnnnnnnnnnnnnnnnnnnnnnnnnnnnnnnnnnnnnnnnnnnnnnnnnnnnnnnnnnnnnnnnnnnnnnnnnnnnnnnnnnnnnnnnnnnnnnnnnnnnnnnnnnnnnnnnnnnnnnnnnnnnnnnnnnnnnnnnnnnnnnnnnnnnnnaagaaaaagcactgaaacatgcgacatccacctttttgtaatagttcccacgacctacacaaatgcatacaaaatgcttaatattttgcttgcgctattcttttctgc

SEQ ID NO: 1777 - DNA, 2296 bp, Macaca Fascicularis
gaggcacacagggtccctgggggggcctgagggcagccatgaggaggcacagcgagacagacgtggaggagcagacccaggagctgaagaccatcactcggctccaggagcagtgtcgggcactccagatccaggggatgaaagagaatacggaccagaacaaggccacgctggctctcctgcgcagcaacatccgccgcggggcccaggactgggctttggccaagaagtatgaccagtggaccatctccaaggcctgcgggaaaaacttgcctttgcgactggcgcactgccgcagtaccatggaggtggcgcgggagaagctgcgcaagtacgtcttcgaccgcgtgaacacgcacaacctactgatccacctggtgcggcggcgcgggcagaagctggagagcatgcagctggagctggccagcctgcggagccagccggacgccagcaaggaggagctgcggctgctgcagatcatccgccagctggagaacaacatcgagaagacaatgatcaagatcatcaccagccagaacatccacctgctgtatttggacctgctggattatctgaagacagtgctggcaggataccccatcgagctggacaagttgcagaacctcgtggtcaactactgcgcggagctgtcggatatgaagatcatgtcccaagacgccatgatgatcacggatgaggtcaagaggaacatgaggcaaagggaggcgtccttcatcgaggagcgcagggcaagggagaaccggctcaaccagcagaagaagctgatcgacaagatccacacgaaggagaccagcgagaagtaccgccggggccagatggatttggacttcccctcccacctgatgagcatggagaccttgaaattaaggaaacaagagacctccacagcggaaatggaataccaggcgggcgtgactgctgtggtggagaaggtcaagagcgctgtacggtgctctcacgtctgggacatcgctggccgcttcctggcccagaggaacacggaggagaacctggagctgcagatggaggactgtgaggagcggcggctgcagctgaaggccctggtgaagcagctggagctggaggaggctgtgctcaagttccgccagcagcctagctccatcaggtgccccgggcttccggggctgtgggtcacccaccatggtctcatgaaggcccctgggctgcagccaggctgggagctgggagtgtacccactgccaacaagcctgtgtgtcccacagaggggccgggggacttgcacacacctgagcttctgagtccctgactctaacacggaacccaactcaagaccgggctcctgggtggcccaccatggccctcgggcctgtgcccctcactgctgtgtccctattgccttctgcagcttcaagtccattgaggagaagatgcacaagcaggaggagaagatacgggagcaggagaagaagaggcaggagcaggaagagaagatgtggaggcaggaggagaagatacgggagcaggaggagaagatgcacgagcaggagaagaagataaaggagcagaagaagaagatacaagagcaggagaagaagaggcaggagcaggaggagatttggaggcaggaggagaagatgcatgagcaggaggagaagacacaggagaaggaggagaagaggcgggagcagaaagagaagatgtgggagcaggcggagaagatttggaggcaggaggagaagatgcgtgagcaggaggagaaaatacaggagcaggaacagaagatacaggagcaggaggagaagatacgggagcagatgtggaggcaggaggagaagatacaggagcagaaggagaatatgcacaatcaggaggagaagatacgggagcaggagaataagatgcatgagcaggaggagaagatacaggagcagaaggagaagatgcacaatcaggaggagaagatacaggagcaggaggagaagatacaggagcaggaggagaagatacatgagcaggaggagatgataagggagcaggaggagaagatgcacaagcaggaggagaagatacgggagcaggagaagaagaggcaggagcaggaagagaagatgtggaggcaggaggagaagatacgggagcaggaggagaagatgcacgagcaggagaagaagataaaggagcagaagaaacaaaatactttctaaggagaaaaaaaagtcttattcctgcaaaaaaaaaaaaaaaaaaaaaaaaaaaaaaaaaaaaaaaaaaaaaaaaaaaaaaaaaaaaaaaa

SEQ ID NO: 1778 - DNA, 728 bp, Macaca Fascicularis
  misc_feature (1)...(728): n = A,T,C or G
cacgaaaccaaggtggctatggtggttctagtagcaacagtagctacggccattgctactgttttgttttgttttgttttgtctttgtttctgtttttgttttgtcattgttgttttgnnnnnnnnnnnnnnnnnnnnnnnnnnnnnnnnnnnnnnnnnnnnnnnnnnnnnnnnnnnnnnnnnnnnnnnnnnnnnnnnnnnnnnnnnnnnnnnnnnnnnnnnnnnnnnnnnnnnnnnnnnnnnnnnnnnnnnnnnnnnnnnnnnnnnnnnnnnnnnnnnnnnnnnnnnnnnnnnnnnnnnnnnnnnnnnnnnnnnnnnnnnnnnnnnnnnnnnnnnnnnnnnnnnnnnnnnnnnnnnnnnnnnnnnnnnnnnnnnnnnnnnnnnnnnntgtgcccggccagaagattttaattactgccacaagacaaagcttagcaggagaggacagctggaaacgtgacaaggaaactacaggttacaacagatttttgaactcagtcacgcacagtagtagcaggacctagctgctacaaagaagacatgtttttgacaatattcatgtgtatgggcaaaaatctcaaggactgtagttgtgaccaattgtacaatggtttatttcagtttctgttctgtagaaagtataaagcttgcctataaaaggttttaatgtcaattattttttgcacnnnntgctgttgattgctaaatgtaatagtctgatcatgatg

SEQ ID NO: 1779 - DNA, 731 bp, Macaca Fascicularis
  misc_feature (1)...(731): n = A,T,C or G
acacacggatttaannnnnctgggtannncccagaagtgagattgctggatcatatggtaattctactttaaacttttcaaggaatgtccatacagttttccgtaatggctgtactaatttacattcccaccaacagtgtacaggggtttccttttctctacatccttgccaacacttgctatcttttctttttgataacagccattctgacaggtgtgaaatgatatctcattgttttaatttgcatttctccaatgattagtgatgttgaacatttttttcataaatatgttagccatcagcacatatttattgagtgccaactctgggctaggtaggcatcgtggattattatagaagtctgctttgaaatagttttctagcttagtgatctcttttcagtatgagtgtccattcttatatatgtacatttagttatttataaattgtattcttgagctatttgtaccctacaaacatatagctaattgtataaactataaaacattcacaataataggaattttaaaagatgaggtaaatatgaaaataagtacgttaactattttatttattgactacaacaattcatttgacctcattaactgtaaataatatctagaaggagcatctttgtgatataatgatttgaagatctgggtttagctccaattgatttcggtgttttgtcatagctgaaaaagataccacacaaagatattagatccaa

SEQ ID NO: 1780 - DNA, 699 bp, Macaca Fascicularis
acatagggatctcttgcatgtgctcatgggtgcacagtgcacccacacatggttaaacatgtgtccataagcacagtactcttattagcaagaaagaataagtactctatttactgggtatatagacacatgtattcatgccctggtcatttcacgtgcatatgggattacttgtgtacctgcgggcacagcacatcaataaacagggctagggtcccaaactctcttgcatttattcagaagcagaagcagtagggaacccttacttatgggcagtctcccatgtctttgccctcctgcagaagcaatcccttgctttccatgtatgccctgcaacacagcctatcatgattttgcatactctactctctccatgaacatcacagcccattctccaggtcttgcttctttctccaggcctggctccttattcacaccccgcttccaaccccaaccacttttcaggatatctttttcactcttcttgggggttcctgcagcaacccccagcctatgttctgctgctgtctttactgctctcaacttcacttctcaacttcctgctttttattcccaccctgttcctccaacaactacaacagattgtctcattttcccagggggtgggtcatgggctctaaactgctcttctgtctgtctgagcttatgaacacccccacgggtagaagtggggagaaa

SEQ ID NO: 1781 - DNA, 732 bp, Macaca Fascicularis
  misc_feature (1)...(732): n = A,T,C or G
tacaggctcatttcatgcaanttnnntcctagagccaaataaataaagacttaggtaaattagtatgtcttgtttctnnnnnnnnnnnnnnnnnnnnnnnnnnnnnnnnctataaagaattgaacactttcaagactgaagaatgggaaaacaaaggatgtttttccaagaccagttaccgcaggggaaaagctaaggtgatccttgacagtatttttataaaataaaagtggcagccgtgcacnnnnnnnnnnnnnnnnnnnnnnnnnnnnnnnnnnnnnnnnnnnnnnnnnnnnnnnnnnnnnnnnnnnnnnnnnnnnnnnnnnnncaatgnnnnnnnnnnnnnnnnttataaaaacacaaaaattannnnnnnnnnnnnnnnnnnnnnnnnnnnnnnnnnnnnnnnnnnnnnnnnnnnnnnnnnnnnnnnnnnnnnnnnnnnnnnnnnnnnnnnnnnnnnnnnnntattctgaaagactaattgctctctgaagaaaaaagggatctnnnnnnnnnnnnnnnnnnnnnnnnncgaagtatagagctccttcagcatggaaaaaggagaaacgaatagtatttggacaggaaatcaaagattctaaaatacatagtgttaggtctggtgggcagtgagctacaccgagaatgacaatatagtggtactttatgagaagaaaaaaannnnnnnnnnnnnnnnnnnnnnnnnnntaaaatctaagtataaaa

SEQ ID NO: 1782 - DNA, 765 bp, Macaca Fascicularis
  misc_feature (1)...(765): n = A,T,C or G
gtgttaagcagaaagtaaaaccagagccaggcacagtggctcgtgcctgtaatcccagctatttaggaagctgaggcaagaggatcgtgtgaggccaagagttcagggctagcctgggcaacatagagagaccctgcctctaaaaaattttcttttaattagcaaggtatggggccatgagcaaattgcttgggcccaggagtttgaggctgtggtgagttgtgatcacaccactgcgttccagcctatctgacagggcaagacctcctctctaaaaaataaagagaaagcagagtaaaactggactgtgagatatgactaaagttctgtgtgatacgtgtgccttatttagctcaagacatttctagagcacatataaaaactgacttgtcatccaggctgtgtctctttttagctttgtaatctttggcaaggccattggattcttcagctgtacaattaggagacttgatcaggtgatttcctttgncagctgtcagttctttaatttcaggcttggtagcttgtgggaaccgaaaanggcaatttaaacctttataaacgcaaactaaatcatgaattacagaaaaagtccattgttccataacttggtgttaccacacttaagagtttaaaaattacgaagtcgactgtggaaaggattctgcgtatattctattgtgcacattcagaaacatttttcttggaaaaagcacccaacattttttataactgcacatattaatttattgccagaataaattg

SEQ ID NO: 1783 - DNA, 719 bp, Macaca Fascicularis
  misc_feature (1)...(719): n = A,T,C or G
cttttgacatcgcccgcnngacagtcaacgctgacgtggnnnattactcctggaggtgtcnnaagcccctgaagnnccgnnnnnnnnnnnnnntccgctcctggctccccatgggcgatgattacatcattatgaactactcagtcaaacatcccaaatacccacctcggaaagacttggtccgagctgtgtccatccagacgggctacctcatccagagcacggggcccaagagctgcgtcatcacttacctggcccaggtggaccccaaaggctccttacccaagtgggtggtgaataaatcttctcagttcctggctcccaaggnnnnnnnnnnnnnnnacaaggcgtgcctcaagtaccccgagtggaagcagaagcacctgcctcacttcaagccgtggctgcacccggagcagnnnnnnnnnnnnnnnnnnnnnnnnnnnnnnnnnnnnnnnnnnnnngcggactcactggagaacatcgacgagagcgcggtggccgagagccgagaggagcggatgggcggcgcgggcggcgagggcagcgacgacgacacctcgctcacctgagcgccannnnnnnnnnnnnnnnnnnnnnnnnnnnnnnnnnnnnnggggcggcggctactcctgcactttctcccctcccccacctggcgcctcctggtggcaccgggccgggcccaggcgggcgctgcagccnnnntggacacagcc

SEQ ID NO: 1784 - DNA, 750 bp, Macaca Fascicularis
  misc_feature (1)...(750): n = A,T,C or G
ataggcactnnntgcattaaaggtatggaaggtgataggggtcagaattttaaaattttaattttnnnnnnnnnnnnnnncccctcatttccagagtgtatgcaattgtgtcctgctttgataactgttagaggatggctatgcaaaagcataatgattcaaggaaacaaagtacacgtagtttttgagctgacaccagcaaaggtaccataagtcaaaatattggttttggtggagatgatcgatgtgtgtgtgtgagagagagctatgtttctgaccaagggcctgatgtttnnnnnnnnnnnnnnnccagagacctacaagatgtgggaatcagcataacagggcaatgcagaaattaaccccactttgttttctgtagttcctttttgtttcattttcttctgtctcatcgcgttagaaaannnnnnnnnnnnnnnagttgtccagtgcaggacaggggacccaagggtctcaagcttgcaagtccagaaggtgacaaacccaggagcactgggagttaagctttccttggggaaggaagagccttgaggtccagcacacagcctggctctaaaggcnnnnnnnnnnnnnnnnnnnnnnnnnnnnnnnnnnnnnnnnnnnnnnnnnnnnnnnnnnnnnnnnnnnnnnnnnnnnnnnnnnngctgtcctcagacctggctttttcctcagtccctgttcataccatctctgcacccccaatcacactgatttttcaaatttattttg

SEQ ID NO: 1785 - DNA, 552 bp, Macaca Fascicularis
  misc_feature (1)...(552): n = A,T,C or G
ccccgggcagcnnnatcccgagacgcnntggatgcagggtccaagactgggcacaggggtaggaggtgcattgggctgggggctccctgggagtcatttgctccccacaggcctagagaagttttcagggaaggccagaagagctcctggctgtgctgggcggggcaggaaacccctagaccttcacacatgcccaggcagcatctcaggccctttatggggcagggaaactgaggcagtaagagggcaggcagagctggaggcccttcaggcccagtcagcactctggcctcccgccaccccatgccaccccagcccctcacaccactcaggagagggatatcctagggtccgaaggtcaggagggcagggctggggctgactcaggcccctcccagctgtggccacctgggtgttatgagggcagaggtgcaggcacccagggcccccccatttgcccaacgtgggggctgtccttggcacccattcacgaaattatttaaaggagtttggccaggctcccaccagggcctgggtgggaaggtacaggcg

SEQ ID NO: 1786 - DNA, 660 bp, Macaca Fascicularis
cagaatctacattcaacaggatctccagaccgtgttcttatatgtggcagagaacctggctcctagcagctgcagcttgcaactgcatgtattcgccatctggaaggaaaaagctcttcacctccttgactcttacagcatgctgccctcatccaagctcctgtttgaaaagcttcagagaacaagcttgactggcctttctctaatcgtgttctcaccctatttaccaattacagagttaggaatgtgggatactatgatgggtccagcttggagcacttgcagtgtggcctctgaagccagcatgctgtaactggtagctccgcctagatccatgtgcttggtgtcaggaaaggaacagtttctccaccaaaagggaataaatactttgatcagaggtaggggaggcggggagtagtctggtaagaacactgaattgcattatctaccttgtgtgcctatacttataaaggtttcctttatgtcacattgatatgataaaagcaagaaactaaaattatgaacaagatactgactaggtattttatgactcattagttcagaattagaacctgggctctggaaagaaaataacacagccatttcattataaatttgtaaactttgcagcagtttaaccatgagagttggcatataggt

SEQ ID NO: 1787 - DNA, 696 bp, Macaca Fascicularis
  misc_feature (1)...(696): n = A,T,C or G
atgaacgtgatgaaatgtgtcaaacacagacatgcacttagatgctctatttagatgtttaattatctttgcttcagttaaaaggctccttgtatctgtgttcattcagttaaaattctaactctagctgccatttattaagtgccaattatatgcaaggaattttacatgcattatctctgttcttcacaaggtattttttnnnnnnnnnnnnnnnggaaacaagctcaaggaggtcaaataacttgccccaaatcctataattactaagtgatagagcctttggagtctttctgcctctaaaacctttgcatcttctcactgtggttggtctctgttcctctcagggttgggaactgttgtcagtatgccagccccttcctgcagtggctgtctcctgttctaatgtcatgttcccatctcttcatgaccgcagaatcaagtcaccaaacctgttggaggtaatggaaaaaacattggcataggaaccaaacgacctggcttctagccccaagnnnnnnnnnnnnnnnnnnnnnnnnnnnnngctcctggaattgagagccttacttctttcctgcctgggatgggcatttgtcacgaatgtgtgagaatctgcatatgctcnnnnnnnnnnnnnnnnnnnnnnnnnnnnnnnnnnnnnnnnnnnnnnnnnaactttttttctgatgcatatag

SEQ ID NO: 1788 - DNA, 412 bp, Macaca Fascicularis
  misc_feature (1)...(412): n = A,T,C or G
cccctttcatgcnnnntccggccaatgagtttgtcacagtacaggcagccagacttatctttccnnnnnnnnnnnnnnnnactgggtcatcttagtgtctttttcttgctttttacttttactattatagattaagatgttttaaaaggtgcttgaataaaaattattccttataatgagatgacacttattagaagagtgtggggaactgaaaaattctggaattaagaaaacttattttttacttacagatgttttcttgtgggaaaattagagaaaattcaattttttttctaagaaccttttttttattaaattagtatgccattgagtgtataaatacagtttaaaattgtactttntaaagagacaaatccaaattgtacacgagtgcagttnnnnnnnnaagaca

SEQ ID NO: 1789 - DNA, 730 bp, Macaca Fascicularis
cgctgtcgagtgaggaatggaacgccttgtggcttttcgaaattttggacttgggaatggcggacagggcctgggacctgtgccggccacttagagcggtgacagggggaatcaggctggggcgtggcaggcattcgtgctgagactggctccaaggaagtgctctgtaaatgcaattattgtttgtctgatgaaaagacggggctaggggacgttcatagcacattcagccagtgtccatagcgtgctttctccgtgtggcgtcctgggaacacagcgaacaggacagacagaaatccttatgaggcatcccttcccatcccttcctctttcccttcaaggtaggacagcagtatggtcagtggtgtcagcaggtgccgtggggatgggaggggaagcgacagctaccatgggggcacggttggctctcaggggtgtggcatacccttagcgttgaggcccaggggaggatttggagaagggaacccacagggagagtggcagggtagaagccggggggagtgtctgggcaggacctgcatgccagcagcctcatacaccttttcttcctgtcctctccaggcagccaagctgaaggccaaactgactttgatggaggggtggctgcaagggtccaactgtggcagtccctggggaccactagacattctgctgggagaggccccgaggggggacatctaccagggccaccacctgcttccaggtacag

SEQ ID NO: 1790 - DNA, 698 bp, Macaca Fascicularis
  misc_feature (1)...(698): n = A,T,C or G
gccattattaggaaannnnnnnnnnnnnnnnggagtacccaggccacttgnctcccagtcnngttncntgtcnncgccggccaacgcgggacatgggtcggattcccctcannnnnnnnnnnnnnnnccttgaaccgaaagtgtttacaaagatgccttttnngatgtagaaaggtgnagttttctgaactccactgattttattgcannngaagaaaaaaaaaaaaaaaaagctattccaaagatttcaagctgttgtgcgaacatcttctgatgactttacttcctaagaggcaatgtttttactttatgcataattcattgttgccgaggaatatgtgaagaaacagcaccttttaatatataggtcnnnnnnnnnnnnncctaaattggaaagagaaaactgtgataattttcatattctcattttttaaaaaatgctattcttaactaacagttcttttgagaataagttacacgcaatggccacagcagtttgtctttaatagtatagtgcctatacttatgtaatcagttactcactactgcctttaaaaacannnnnnnnnnnnnnnnnnnnnnnnnnnataggattatagtgccttaaccgatatattttgtgattaaaaatatatatatttaaaactgctcttctgctctagtaccatgcttagtgcaaatgattatttctatgtaca

SEQ ID NO: 1791 - DNA, 2221 bp, Macaca Fascicularis
agtgtggtgcccagccaaccagctatacctattttgaagattttaagaacttagcctcctgaacagtcttcttcgaaagtgaaaagtggtaacagctgaggagtatcaagaaattattttctgcaaaggggcagagttaattgtatttggaacccgtaacagcacctattggggaaagacttctaagtgaggagaaacggctctacaggtcatgaaactatggaaatgaaatggtttttgtcgaagattcaggatgactttagaggtggaaaaattaatctagaaaaaactcagaggttacttgaaaaattagatattcggtgcagttatattcatgtgaaacggatatttaaggacaatgacaggctgaaacaaggaagaatcaccatagaagaatttagagcaatttatcgaattctcacgcacagagaagaaattgttgagattttcaacgcatattctgaaaaccggaaaattcttttagaaaataatctggttcaatttctgacacaagaacaatatacaactgagatgagtaaaactattgcttttgagatcattcagaaatatgaacctatcgaagaagttaggaaagcacgccaaatgtcattagaaggttttacaagatatatggattcacgtgaatgtcaactatttaaaaatgaatgtagaaaagtttatcaagatatgactcatccattaaatgattattttatttcatcttcacataacacatatttggtatctgatcaattagtgggaccaagtgacctttggggatatgtaagtgcccttgtgaaaggatgccgttgtttggagattgattgctgggatggagcacaaaatgaacctgttgtatatcatggctacacactcaccagcaaacttctgtttaaaactgttatccaagctatacacaagtacgcattcatgacatctgactacccagtggtgctctctttggaaaatcactgctcccctgcccagcaagaaataatggcagacaatttgcagacgacttttggagagtccttgctttctgatatgcttgctgattttcctgatactctaccatcaccagaggcactaaaattcaaagtattagttaaaaataagaaaataggaaccttaaaggaaacccatgaaagaaaaggttctgataagcgtggtaaggtggaggaatgggaagaagaagtggcagatctggaggaggaggaggaggaggaggagaaattcaaagaatcagaaatattcgaatctgttttaggagaaaatcaagacaaggaaacaggggtaaaaaagttatctggagtaacgcttttcaagaaaaagaagaccaggaagctaaaaattgctctggccttatctgatcttgtcatttatactaaagctgagaagttcaaaagctttcaacattcaagattatatcagcaatttaatgaaaataattctattggggagacacaagcccgaaaactttcaaaattgagagcccatgagtttatttttcacaccaggaagttcattaccagaatatatcccaaagcaacaagagcagactcttctaattttaatccccaagaattttggaatataggttgtcaaatggtggctttaaatttccagacccctggtctgcctatggatctgcaaaatgggaaatttttggataatggtggttctggatatattttgaaaccacatttcttaagagagagtgaatcatactttaacccaagtgacataaaagacagtatgccaattacacttacaataaggctcatcagtggtatccagttgcctcttactcattcatcatctaacaaaggtgatacattagtaattatagaagtttttggtgttccaaatgatcaaatgaagcagcagactcgtgtaattaaaaaaaatgcttttagtccaagatggaatgaaacatttacatttattattcatgtcccagaattggcattgatacgttttgttgttgaaagtcaaggtttaatagcaggaaatgaatttcttgggcaatatactttgccacttctatgcatgaacaaaggctatcgtcgtgttcctctgttttcccgaatgggtgagagccttgagcctgcttcactgtttgtttatgtttggtacgtcagataacagctaatgataaatgacatatcattagctatgcatcgcaataaaacagccaaaatgaaaaaaaaaaaaaaaaaaa

SEQ ID NO: 1792 - DNA, 680 bp, Macaca Fascicularis
ggcaccgtggatctacagcacgtttggagcactggtacccgctgggtccgccggctgccactgagcccgagcaggtggcagagctgtgcttctctctccggtacgtgcccagctcaggccggctgaccgtggtggtgctggaggctcgaggcctgcgtccaggactggcagagccctacgtgaaggtccagctcatgctgaaccagaggaagtggaagaagagaaagacagccaccagaaagggcacggctgccccctacttcaatgaggccttcaccttcctggtgcccttcagtcaggtccaggtgggtctccgggaggcaggggcagagcgggacccagtgccggaccacgaagaccacagtctttctcctccaactccgacacgtggcctgtctctgcacagaatgtggacctggtgctggccgtctgggaccgcggcctgccgctccgggctgagcccgtgggcaaggtgcacctgggtgcccgggcctcggggcagcccctgcaacactgggcagacatgctggcccacgcccggcggcccattgcccagtggcaccccctgcagccagccagggaggtggaccgcgtgctggccctgcagccccgcctgcgcctgcacctgcccttgccccactcctgaacgcgccgcgtacctcggtctccccgctgagccc

SEQ ID NO: 1793 - DNA, 288 bp, Macaca Fascicularis
  misc_feature (1)...(288): n = A,T,C or G
aaaaaaaaaaaaacaaaaaaaaaaaaaaaaaaaaaaaaaaaaaaaaaaaaaaaaaaaaaaaaaaaaaaaaaaaaaaaaaaaaaaaaaaaaaaaaaaaaaaaaaaaaaaaaaaaaaaaaaaaaaaaaaaaaaaaaaaaaaaaaaaaaaaaaaaaaaaaaaaaaaaaaaaaaaaaaaaagccacatgccctcccctctctgcaacgtactgtggaaaagaaacacgcacttagtctctaaagagtttattttaagnnngtgtttgtgtttgtgtgtgtgtttgttctttt

SEQ ID NO: 1794 - DNA, 205 bp, Macaca Fascicularis
atccaaataaagcaccatattcccacctcgccaaattaacctggacaacaatgctggcgtatttgcgtccactgtttctattaactaaggtaaaatttacgtatggtgagatgcatgctcttcagcggggaccccagcccctagaaggtccctccagcccttcctgttggcgtcccttccctcattagtggctattgacttaagc

SEQ ID NO: 1795 - DNA, 633 bp, Macaca Fascicularis
  misc_feature (1)...(633): n = A,T,C or G
acatttcagnnnaagccagcaggaaagggctaggacaggcgcctgggagcccacatggagggagttgggcaagatttgattcggagcaggtgtcaagacacgttggggaaactgaggcccagtggaagagaagccagtagaggaggaatctagaggcctcctagattaaggcctgcctggaatggattgggggtgggtctttggaaaaggaggggacccacctctagcccagtctctcaactgcccctcctttacagtgagtgagatcattggccgagacctgagtggcttccctgcacctcctggagacgagcctcctgcttgaaccacctgaactgtcatcacacggcaaccccagccccagcctcagccctgccccctttccctccttcctggagtggtggctacagaagcttggggccaatcctggctcctctttccccagcttctgtttatctcactgtcttccctcccctcccccagctgaggtgtggcccccaggcctggtgctgccttggagggctgggggaagtagctgtggaggagggaggagggtggagactgaggctaggtgccagaatggactggagtgaaggcatgtctagagtnnnngcagnnnnnnngctgggaagc

SEQ ID NO: 1796 - DNA, 717 bp, Macaca Fascicularis
  misc_feature (1)...(717): n = A,T,C or G
catttctttctctatttaattctcctgcctccttactgtagaannnaagcttctggcttaggtttgcaagtcttattgcttggccctcctcattcaatgagaggtgaagataggctgaccccctgtcctcnnnnnnnnnnnnnnnnnnnnnnnnnnnnnnnnnttctggaaagtctcaggaccctacagcaccagggcactgaatgacttctnnnnnnnnnnnaagacagtacagttttccaaagtagcctaattcatctggacagctagcaggcactttggaaggttggttcagttactactatgaggccataatatatttgctagtattaaaattcttcagaattggaattattatttgaaataatattttggttgacttaagtnnnnnnnnnnnnntctaaaactgatctagagactcattcaatagcaatgtgaccttttaaaaacttacattaagtaaaactgccagtagattaaatcatatatatatatatatgtgtgtgtgtaagagcttcctctatttactactgttgaacttcagtaatttttagaggctaaatgatggtcaaatgtttttaagtgtgctcttttatnnnnnnnnnnnnnnnnntttgtaattcagtacagaaaagtttaaccttgtacattttgtatgtaaaaagtcttttaagtagccttatccttatttaaataaacagaataaaattaccttga

SEQ ID NO: 1797 - DNA, 778 bp, Macaca Fascicularis
  misc_feature (1)...(778): n = A,T,C or G
agatatagtatacagtnnnagcnnnngagtgtgccacctcttatgatcgtnnctaagtgaagaaacatttggctgcattcacatagacctgtatgttttgttttcagttgaaaacttgcctccttgggcaatattcataaatgaagcagaatttttttttctcttttttccgaatatgttagtttcgttcttgtaagatgtatcatgggtattggtgctgtgtagtgaacaatgaattttaattagcatgtggttcagaatatacaatgttaggtttttaaaaatatcttgatggttcttttctatttataatnnnnnnntttcataaagtgtaccaagaatttcataaatttgttttcagtgaactgctttttgttatggtaggtcattaaacacagcacgtactcttaaaaatgaaaatttctgattgtctaggatattgacacatttcaatttgcagtatctttttgactggatatattaacgttcctctgaatggcattgacagatggttcagaagagaaactcaatgaaataaagagaataatatttattcatggcgattaattaaattatttgcctaacttaagcaaactaactgctgtgcttaactctcagtttgtgcttaactccatttaacatgaggtgacagaagagtctgagtctacctgtggattatgttggtttattttcagtgcttgaannnnnnnnnnnnnnnnnnnnnnnnnnnnnnnnnnnnnnnnnnnnnnnnnnnnnnnnnnnnnnnnnnnnnngtttt

SEQ ID NO: 1798 - DNA, 742 bp, Macaca Fascicularis
  misc_feature (1)...(742): n = A,T,C or G
tgagaaattcnggnnnnnnnnnnnnnnntaaataatctttggctgtctgtctttatctaaaaagtttttgtcactttttataggtggtcacaaacaacgttttagggttataataatgtttcaaacacattggaaaatacttaaaagatcatgcttttttcctccatctgtcatgtgtctcttacctccatgtcttcctggcaaactcctgtgttcattctttcaaatgtaactcagattatcattcaccctagaagtnnnnnnnnnnnnnnnnnnncttactctactctagccagtcgttctctttcttatgatgccgcccctgcctcatgtacttttaatttgcagagcaataaaatttaaaggaagaaagtcagaaaaccaattcaaagtttccagcttttaattttgttaagaaaacagattttaaaaannnnnnnnnnnnnnnnnnnnnnagaacattttaaactctctctacaagaaaaaatacaccaagcgcannnnnnnnnnnnnnnnnnnnnnnnnnnnnnnnnnnnnnnnnnnnnnnnnnnnnnnnnnnnnnnnnnnnnnnnnnnnnnnnnnnnnnnnnnnnnnnnnnnnnnnnnnnnnnnnnnnnnnnnnnnnnnnnnnnnnnnnnnnnnnnnnnnnnnnnnnnnnnnnnnnnnnnnnnnnnnnnnnnnnnnnnnnnnnnnnnnnnnnnnngaaagtggcagtgagccaagatcgtgccatccactccagc

SEQ ID NO: 1799 - DNA, 758 bp, Macaca Fascicularis
  misc_feature (1)...(758): n = A,T,C or G
tcgagtatacaccagccnnnnngtggctnnnnncgaaactgttgatattagctaaagtgtataacnnnnnnnnnnnnnnnnnnnnnnnnnnnnnnnnnnnnnnnnnnnnnnnnnnnnnnnnnnnnnnnnnnnnnnnnnnnnnnnnnnnnngatcatctaaacttgccgcctcctaaatatttcactgaatcctggcgttcgtgttgaagtagacaaaatgtgaaaggaggagtnnnnnnnnnnnnnnnnnnnngcttttttcgttcaagttctatgtctttatctgctcttgactgtgatnnnnnnnnnnttcaaccttgggagtgggaagaatatgaacagataacccttggcctaacagctccatcaaacctccttgagagcaaccaccnnnnnnnnnnnnnnnnnnnnnnnnngaggaaactggtcagaaggttccctcaactccttcctggtcctcctggaggctgcagaaaannnnnnnnnnnnnnnnnnnnnaggccaattgctctccctccttccctgccccaccgggaaaggaataacgtccacaaacttgaagcagatagagaattcgatctgtnnnnnnnnnnnnnnnnnnnnnnnnnnnnnnnnnacaaatatttctcaagttgggannnnnnnnnnnnnnnnnnnnnnnagggagtggtttggggggaagatgaagacgtggaggaggaagaagagaaggaagcccttgccatataaaattcatgcggactaaacagnnnnnnnnc

SEQ ID NO: 1800 - DNA, 199 bp, Macaca Fascicularis
  misc_feature (1)...(199): n = A,T,C or G
ccagttgattcagaatcaggcaagatccctgccctttggcacattcactgaaaggccacacagcacnnnccgagttgagcnntttcattgaatgtgcccaacggcaaggatcttgccnnattcggaatcgactggccggatggagttcactggagaatgacgcaatcaaaaaaaaaaaaaaaaagggcggccactcgcg

SEQ ID NO: 1801 - DNA, 4054 bp, Macaca Fascicularis
gtttctagaccttattgcagtaagagagtcgtgattgtttggttgccttctcttcatagcttactccatttttgttttgcttgtggcactttcttacttattggagttcctgagccattgtgttcactgattaagaaagattcataaaggctatttttatgtgttttttttccttccctcctgctttgcttggagctccccgtggctgagggttttctcctgtggccgtggtgctggctgtcatgccaggtgccgtgggagcctgctttgacacacagacccgagtcagaccttaaaaatcagggcaaaccgtcttgccttgttcttctaatcaccgtcactttagtattctggatttgtcctgcctgcctttaatttgcgtctccagcattttttttgtttgtttgtttatcgggttcctggttttcttttaagacatagtcaattgtgtggacctgtaggtttggggcagcaaccaattccattgttttcctttttgtcaaatccaagagaaaatataccattaggagctagaagattctagttcacagccttttgaatcttcatggcctttgaatcctcacggcctctgatatctgaatcagttttctcccaggaggtctctgggggctgagctgctacaggggcagagggtggggtgggcttgggtgggagaatcatcccggcacttcatcgtgcatgctatttggggcagtatctttttttttttcttttttttttttttttcccctgatgctcgagttatgaatgaggatgacctctgcaatcatgatgtctcccatagactctgttgcttgttcctttgccagctttctcatgcatggtcctaacacttccatgatttactttgctccagacccatcgtcttcagccgcctcagcaataacttgtttgagcattaaaaggaagtaaatcaggaacaacttgttgccatctcattttcattagaaatcagacatcttagagatgtcaagaaagcagctggcaactagagggtagggggacctgtactctcacactgcggtgtgtcagaccagacctgatcctggagcctaagaccctggagagccctgatctctgtaactcttgccacgttgttgctgaggcagctgaagtccccatctcccaccgtaacaatcacaaatagacagtagtggagccagcatccccaagcccctttttgtgtaagcagaaagggagctatgagccttgccctgtttccaggtgccaagtgcctctccctgcctgtacctctgcccttcctctgagcagagctttggtacctgttgccaatgcaaagaaatgtaaagcagcaaaagaagatagcaggttctgacctgaggagggaaaccaaatttatcccacaaaggcccattaccccgcccccctcgcctcccacccccagactggatccactactggcccaagaatactgatgagaaaccttgtctggattgggtcggaagctggaattcggtgctgtgcagaccagtgctcaaaattgtggttatttttgaggactcgccttcaatccagaacatttgcgtttcaccttcctcgcccagatccagttaacaaggtagctcatcacttcttgcatctgttgagtgacatgctggattttaatttttattgtggttgtacttggatgcaaggaatatgttttgttcctcccaatttagcgcaccatcctgggaagtgcatgtctcagacaaactcctgtgatgtgtgcaacagcaccgatcttccggaagtcgagatcattagcctgctggaggagcagctgccccattataagttaagagccgacaccatctacggttatgaccacgacgactggctccatacacctctcatttctccagatgccaacattgacctcacaaccgagcaaattgaagagaccctaaaatacttccttttatgtgctgaaagagttggccagatgactaagatatataatgacatagatgctgtcactcggcttcttgaggagaaagagcgggatttagaattggccgctcgcatcggccagtcgttgttgaagaaaaacaagaccctaaccgagaggaacgagctgctggaggagcaggtggaacacatcagggaggaggtgtctcagctccggcatgagctgtccatgaaggatgagctgcttcagttctacaccagcgctgcggaggagagcgagcccgagtccgtttgctcaaccccgttgaagaggaatgagtcgtcctcctcagtccagaattactttcatttggattctcttcaaaagaagctgaaagaccttgaagaggagaatgttgtacttcgatccgaggccagccagctgaagacagagaccatcacctatgaggagaaggaacagcagctggtcaacgactgcgtgaaggagctgagggatgccaatgtccagattgctagtatctcagaggaattggccaagaagacggaagatgctgcccgccagcaagaggagatcacacacctgctatcgcaaatcgttgatttgcagaaaaaggcgaaagcttgtgcagttgaaaatgaagaactcgtccagcatctgggggctgctaaggatgcccagcggcagctcacggccgagctgcgtgagctggaggacaagtatgcagagtgcatggagatgctacatgaggcgcaggaggagctgaagaacctccggaacaaaaccatgcccaataccacgtctcggcgctaccactcgctgggcctgtttcccatggactccttggcagcagagattgagggaacaatgcgcaaggagctgcagttggaagaggccgagtctccagacatcactcaccagaagcgtgtctttgagacagtaagaaacatcaaccaggtcgtcaagcagagatctctgaccccttctcctatgaacattcctggctccaaccagtcctcggccatgaactccctcctgtccagctgtgtcagcacgccccggtccagcttctacggcagcgacataggtaacgtcgtcctcgacaacaagaccaacagcatcattctggaaacagaggcagccgacctgggaaatgatgagcggagtaagaagctggggacgccgggcaccccaggctcccacgacctggagacagcgctgaggcggctgtccctgcgccgggagaactacctctccgagaggaggttctttgaggaggagcaagagaggaagctccaggagctggcggagaagggcgagctgcgcagcggctccctcacacccactgagagcatcatgtccctgggcacgcactcccgcttctccgagttcaccggcttctccggcatgtccttcagcagccgctcctacctgcccgagaagctccagatcgtgaagccgctggaaggttctgccacccttcaccactggcagcagttggcccagcctcaccttgggggcatcctggacccccggcctggtgtggtcaccaagggcttccggacactggatgttgacctggacgaagtgtactgccttaacgactttgaagaagatgacacaggtgaccacatttctctcccgcgcctagctacctccacgccagttcagcacccagaggcctcaggtgagaggtcccgagcccgtgtgactgtctcaggcagcagaagttacccgagccggcctcaggcttccccagaggagatgcaggagccagcggccacggaggaggaggaggaggaggaggaggaggaggggtctggtgagggcaccatgataagtcctgtaaacttggcacctttcccggaggcagagttttgggccattctcacctctattccaggcaccatccgtagtggctctctgtctgtagcttccgctcgtctgtgtgggtgatgattaaagcattctcattgcacagtactgtttttaaatacagagtctgatgactcctatttgtaacaatggatgtggctcccctgcccatcttggaggtgcatggcccagcagggatcgtaaagtgggagcaggaaaggctgctaaaaaaaaaaaaaaaaaaaaaaa

SEQ ID NO: 1802 - DNA, 735 bp, Macaca Fascicularis
  misc_feature (1)...(735): n = A,T,C or G
tgcagggtcctnnnnnnnnnnnaggagcagccattaacctagtgattaatgtgggagacattaccatnnnnnnnnnnnnnnnntccctttgtcaaacttggttacacatttgcctnnnnnnnnnnnnnnnnnnnnnnnnnnnnnnnnnataacagttgaatactcattttaggtaccaaaccttttgagttcaactgatcaaaccaaaggaaaagtattgctagagaaaattagggaaaaggtgaaaaagaaaaaatggtagtaattgagcagaaaaaaaattactctaatttatatgtgtattgattggtaaccagatttatctaagtagaactgaattggctaggaaaaaagaaaaactacatgttaatcgttttcctaagctgtctttttgaggtttagtcattgggaaaatgtttaggattattccttgctattagtactcattttatgtatgttacccttcagtaagttctccccattttagttttctaggattgaaaggcttcttttatacattattcatgtgtgttgtcatatttggcttttgctatatactttaacttcattgttaaatttttgtatagtttctttggtgtatcttaaaacctatttttgaaaaacaaacttagcttgataatcatttgggcagcttgggtaagtatgcaacttacttttccaccaaagaactgtcannnnnnnnnnnnnnnnnnnnnnnnnnnnnaccctgttgac

SEQ ID NO: 1803 - DNA, 1372 bp, Macaca Fascicularis
  misc_feature (1)...(1372): n = A,T,C or G
gacaagtacatgactatatcaggattcaantgaggaaaccattgaccgggagacttctggcaatttggagcaactactccttgctgtcgtgaaatctattcgaagtatccctgcctaccttgcggagaccctctattatgctatgaagggagctgggacagatnnnnnnnnnnnnnnnngagtcatggtatccaggagtgagattgatctgcttaanntcaggaaggagtttaggaagaattttgccacctctctttattccatgattaagggagatacgtctggagactataagaaagcttttttgctgctctgtggaggagaagactaatgtgtcacggggaagagctccctgctgtgtgcctctgccgccccactgccttccttcagcacctctagctgcatttgtatgccagggcttgacacgttgccttattcatactagcatgctcacgaacaacacatacgcatcatagaagaaaatagtggtgcttccttctgatctctggtggagatctctttgactgctctagtacttaagtatacttatgttactaagtttaatgcctggccattttccatttatatatttttctttannnnnnnnnnnnnnntttagccttttttaaaaacttcatttatattacatttgtaaccatgataccttaatcagaagcttagccgtgaaattgtgaactcttggaaatgttattagtccaagttcgcagctaaactaaacctgtaaaattatggtgattgtattcaaaagattaatgaaaaataaacatttctgtccccctgaattatgtgtacatgcgtgtttagatttattgttaaatttatctgtttaacaatgatatctctttttaagctaataattgacactgttgttagttgagaactgaatttacagttggtcttttgggcaataagaaatgcaacaccatggactgaatttccttcatagtatatgatttttcctaaatataggaaagattgaaggggtctctggtttatttgcaccatgtttatttacgcatctattaaagcaatgcttgtggtgctacttgnnnnnnnnnnnnnnnnnnnnnnnnnnnnnnnnnnnnnnnnnnnnnnnnnacctttctttcctctttcctgttgtgaacttccctcccatttaccgtctgtcactttctttgagataaataaaaaagacaataattttttctagaaagcagtttatcaatctcttctaatatttacctttcagttttctgttttcaaactgctattcagttggtgtcatttttctttttgtacttatgcccttccggatgcattttttttttaaagcaaannntaattgacattaataagattttaaaataaa

SEQ ID NO: 1804 - DNA, 1597 bp, Macaca Fascicularis
attagaatttcattaccaggctctccttctcaccacttttttctggcctcaccaagtaatttgttaatacgaaaattttggaggaaccagttgaaaacacacttccagtctagatgatgctttgtgtgatacattaatttcttattttgaattgaaaaaagttttccatttgatacttctctaaattaaataaattatagaatgttgttgggtgaattttggggtgcccatatagtaatgaaaagctgcaataattcgttttagtacagcttgaatatttgctatataggaatatagtatggaaagtttttggtcttactgtagctactgtgcgggtcacagtttctcccagcgattatgattgggacattctttggtagataccatttgctactagtttattttgtggctagaaagtcaggtttttttgggttttttttttaagtgccaaattaactttcatcagaatgtgagcagatggctaagttctctcctccccagaatggattaacagctgcgtggaaagtgggggagagagtggatggagacttttagagacattgaaactgcagtagaattaaatgagtcagggagcttccgttagaaaataaagttaaggcagttgttgcgaagataattaatatggttagggctggagtgcactggtctttttgctcattcattttgcatggttttaaaattaaaaataattccaaagatacgccagctcacaaatgaaagcgtcaccctctgtcctaccctccctcctgcccaaagtggatttggtgcccgtaaaagaactgtttacaccacttacctttctcccagcatgtactcactgtgggtagatgcaccaatacatggtaatcctcttactcattttaagacttaagaaacttaatattcttctctaacccatatacgattaccagtggagctagccattggtaatggctattataagctcttcgcttatgatgatatctgggatttctgtggaacttagcaaattttcagagcaccttcactcgcataatgtcatttggacctcacagtgttcttgggatggagtcagttgttcagggttcctgtgcgtgtgataagcagtgctggctggctgtcttcaggactcttggaaatctttatgcatttgagtgctgaccactttgagcagggcagccttcatgtagatgacttgctgttctttatgacagggatcagtggcatttgtttccgagcagtatttagcacctttttgccaccttggtgaacagaaaattgtattttcctgtctttcatggctgaaaacaaaagtaatgggaattatgtgtttgcagaaactgcccttcccctcactgagggtcactgctcaagagtgcagaagtggactctccactgaggggtctccctccccaccctggtttccaccccaggctggctagctccattggtttgaagactgacagccagcctgactcattctcattattggctagttagctttctttatcaacctgctcactcacaaatgtatgtcctcagccagagagtaagacagcccaaatccgttacagcttttaaaaaaaaaaaaaaaaaa

SEQ ID NO: 1805 - DNA, 788 bp, Macaca Fascicularis
  misc_feature (1)...(788): n = A,T,C or G
tccagtaggaccagtggngnnnntgttaccgtggcagctagcagggaggattgctgacaaacggcagtttgaggctacagtgaactgtgatcatgccactgcactccagcctgggcaacggagtgagactctgtctcaaaagaaagaaaatggccaggtgtggtacctccactgggaccactggaccccctgttaccatagcagctggctctctggagacctccactgggaccactggaccccctgttaccatgacaactggctctctggagccctccaatgtgaacactggaccctctgttaccatgacaactggctctctggagccctccagtggggccagtggaccccaggtctctagtgtaaaactatccacgatgatgactccaacgacctccagcctgggcgacagagcaagactctatctcggaaaaaaatttttaaaaagaaaatataaaatatggtataagattaaatatattagttatgaaaataattgtaaaagacttattgaacttacagtcactaaaagtcatgtttttgaaaattatgtaatgactttggaaaataccagcaatataatgctaagtggggaaaaaagcaagttactcctctgtaaatacatatgattctagttttgtaataaaaattcctaaccatataggcacttatagggaaacaaaggaaccattccaaatgtttaccatgcttatctcgaaagtggtgagtttgtgtgtgatttttattttgtttatgctcttctgtgttttccgaattcnatacaataa

SEQ ID NO: 1806 - DNA, 760 bp, Macaca Fascicularis
  misc_feature (1)...(760): n = A,T,C or G
agagagtgtgtatggtttggagaagtctcntccccagaaaatgaagnnnnnnnnnnnnnnnncataccagctctgatttctctcactggtttcttgacacctagtccaggctgttcccaaggatccatttcaaagttgactaaactggacctggttttctcaactctagcactgttgacatttggggtcggatagtttttgttgtggggactgtcctctgcattgtaggatatttaacagcatgcctcagcagcatcccctcatgggattctacccatcnnnnnnnnnnntcatgacaatnnnnnnnnnnnnnnnnnnnnnnnnnnacctccnnnnnnnnnnnnnnnnnnnnnnnnnngagaaccactgcgctagaccatgagacctaggcnnnnnnnnnnnnnnngccgccttcccttcaggtgcctgtgtctattaagtgannnnnnnnnnnnnnnnnttggattttctttctactaaattgttttcactcaagactcagcaaaagaagaaccgtttatagtgtacannnnnnnnnnnnnacatgnnnnnnnnnnnnnnnnnnnnnnnnnnnnnnnnnnnnnnnnnnnnnnnnnnnnnggaatagaaagagtaggcnnnnnnnnnnnnnnngatgtggaggaaannnnnnnnnnnnnnnnnntttccctctgcccctccctgtgtccccttttccaatgttggtttacagattcttgctgttgcttttagcattattgttattttataaagaaatgga

SEQ ID NO: 1807 - DNA, 2418 bp, Macaca Fascicularis
  misc_feature (1)...(2418): n = A,T,C or G
aacatttggttgtggtgccggagacggacccctttagatttcggggcggctgaggagcgcagcggctgctctgtggctgagtgaggggggtgggcggaatggcgggggaagggaaggtgactgtgcctcgagggccgagccgcccggcctcgccagcccgccgccgcctcagcgttcggccgggggcggggccgcaggagtaaataagtgttctaagtggcaatgcagaaaatatagaaagaaaagaaatcctatatcaaggaatcttggctgaattttgaaacggagttgggaacagtctgtcacagagctaaagaagaagaacaaggtccaggaaagaataagcagccagggaagctggcaacctggagcacagccaagatggtccctgccctaggtacagtcttcagaggaccgcacacctcagaagtcatctctatgctgtgggctgtgaaccccaccatacctacaatgatctcagcatcctgcctttttgtgtcactccctcgaggttgaaagcccttggcaagaacatttgcagatgccccagctgtcagagaaaaaagattatcttcctccttcagcttctacggtgggatgtgtgaccctgcctcctgcctattttaggactctgcctaaacaaagtgttctggtgctaggtgaccaaaaccaaaaatccatgaacatgttctaacaaaataatgctgtgaaggtttcctgatgatccatgttactcccatagtatctcctctcttcctccctactacttaccagcaagagaccatatcacctatttaggatcaatgtaaagcagagctaatatctgaaatcccaatttcttttcaaatgcttgccttcccaaatttgaagtcagaagagacaatgtattcctgctgatgtcaataagacttcctcagctgggcatcgtggctcacacctgtaatcccagcactttttgagaccgaggtgggcagatcagttgaagtcaggagtttannnnnnnnnnnnnnnnnnnnnnnnnnnnnnnnnnnnnnnnnnnnnnnnnnnnnnnnnnnnnnnnnnnnnnnnnnnnnnnnnnnnnnnnnnnnnnnnnnnnnnnnnnnnnnnnnnnnnnnnnnnnnnnnnnnnnnnnnnnnnnnnnnnnnnnnnnnnnnnnnnnnnnnnnnnnnnnnnnnnnnnnnnnnnnnnnnnnnnnncaaaacaaacaaacaaacaaacaaacaaaaacaaaaaactctaccaaagcagaactggtgataatcttaagacttggaaaagaaatatccctagtagagatatttgatttttaaattacaaggaatttagttctaagggataatctatatatttcatagataaatggaaatctctctagatatcagatgatagaagatcttgagcagtgatggattactgctaatggatttctgtctgctactctgagcacaagttcaggctcaagtgcagaactaacatgaagggtttgagaatttagtcaaaatctggaagtaggcaagtggtcacaggctaagtaagggttcataacaggatgcagtcattgaaggacaattgtgaagaaaaaatgctgatggtgaagcgaatgcaaaaaccacaaacacattgaagaggcctatattcctgggaacaaagaggaagattatcaatgatgtgcttgtagaaaacatattaatactggaatattgtcttctttcccatcatttcagatcagttagcttagattactattcagctagaaaaaaacaaattacacccttgcaaggactctgaacaatattggaattcagctgttttgtttctaataaaacatggtttaactgttacctggatagaagttccttataagtgcaaattacttcagagaatcagtgctaaagattctgttcattggtacactaagtgttcttcatgacccagtgttttatttcttataatttaacttttttctcagataatttaatgaaaattatggcagtctgctcattgttcaacaaaatccatttcctcttctccttgaacacaaaacttgactatgtttcctagatgacccttgcagttagatggggccatgtgactgggttctagcttgttgattataagtggaagtgatgctgccacttaaaggcttgaaagtgccactgcatactgactgagatgcagtgacccttggaaaccttgtgtttatgaggtggaccccctctcaggctgtatctcttaagagtcatttcagcaacctatttacttgcccaccaagagatgaattgtgaccaagaaacttttatggggctgtgccattatgtgcttgtatctgtttgttactgtagcctatgctagtaactagtacaataataaaggtttttttcggtaaaaaaaaaaaaaaaaaaaaaaaaaaaaaaaaaa

SEQ ID NO: 1808 - DNA, 643 bp, Macaca Fascicularis
aaatgcaaatctcaccagatatgcgcgaaatggaagcaaagaaggttcatcgtgtggtcttgggcagcacgagaaaggactaaggctatggcagtgtgaggaaaagtcggggcttggtaagggttgagatatgttggtagccctggatcacatgggggcagcaccaggcaatgcctctgaaagcagagcgaggtctcgaacttcccttgtgtataacagttcttagtgtctgacaatgaggaaatggcaaagcatggttagaaaactgtgacaaaaatttttacatctggcactgttaccactcacatgccaaacactggctgcaccggtgtagctttatttgtaattaacatcaaaagagtagatatgaagccttccatgaatgagaggccattcatagggcatttttgaaacaaaacactgtacaggtatcagcctctccactcttgatcgggttggtgctgaacagtcagggattgttcttggactagccttttgatgctgcttgcagtctcctttcatcagtccccgaaatacacaaaataaacaaatataataacaaatagtaattaaatgaatttcaggataacgtctagttgttcggatttcacctttcacaggtgtgtgtgtgtgtgtgtttaaa

SEQ ID NO: 1809 - DNA, 1480 bp, Macaca Fascicularis
gaggggctcagcagggaggtaggtctaggattccagatgaacttcttccatgatttttgagcacgtactgatgtgacccccaagaggacgtggctttcttgattaaagttaatatttcttttattaaatcctagaaaagatagggacgtcagagctggccgagtcagactcctggggcatgttgatggtatccagatgccattctgcagaggaatcctggaaaacaggagcaagtctagaggaaaggccgcgggtggttagtgggcaggaggtcataatgaaaatagtggaagagcctgagatatttagcttgcagagaagaagacagggttgggttttgttttagggcataggggtggtggaaagtaaatgaccttcagattaaagggtagtgaggaaagagtgaaactagatctgtttggatgcccagccatcacacccagcatcaagcgctctgtggggcctccaggctgggaggctttgactttgtataaaataatcgtattggtttggagaggagcgcactggtttggaaggtcctccttttggggtttgagctgagcaatttatccacgatttctcagctggtgagtggcagagccaagatctgaacccaggcagggaggttggtctccgccagctggacatgtccttgctctgccaactatacagtctctacgagtcgattcaggaatacaagggggtgtgccaggcagcctccagcccagactgcacttatgctctggattctggagtccatctagagggtcttgggagggatgtgactgttgggaagctcttcatactggacacactgtcagcatttgctgcttctcttgcaagaaagcacctccgttttggatggtcctcgggcacaggggatgagtgctaccagtttcatttgtaggcagggagttctccgcggacgcatggtggcagtctgctttgatggcagcagtttttgcttaggtgacctagaggtcctcagcagtatcctccacacctttctattgaggtgcacctgctggggattcatagtgagaatataacaagaggatctcggtgaaaggcctcagtgggtgttttgtgtgaggtggcttgtagccagctgcttccttgtggatggtagagtattccaatcctctttgtgctagggttcttgcttccagtttgggatgtgttagaaccaccatttcactgcttcccttcctcaatatgctctgcagcttttcttgctgtttaatgagcttttaagcctctcacttcagctttatttatttgtaagctgcattactaactgcccagtgattcggcgaaggctttttactgaaaaagttcacatttctagtcaccccaatcaactggcttttttcaaccaaaaatttatatcattctttgtctatgaggtacaagaggaaggaagataatacaaagacatgttgaatagtaaaaaaaaaaaaaaaaaaaaaaaaaaaaaaaa

SEQ ID NO: 1810 - DNA, 2105 bp, Macaca Fascicularis
agttggatgtgaaaagtgaccaccagtagatgatgacatctcatagcccagagtgggaagcagcctttcctcccctactcattatccatctctcttgctcatagaacgctgctttcctttaggggaatgatgagagaggacttagggttttccaggaggcagatcctccatttccccattgctttgtccaagagtgcaggaagaagatctaagactggtcaattggatgctctttcccaggactttggcttgagagagagagactctagcaagaagggaacagattgttgtgctatgccttgtatgactaagacctcttaccaagaatacctgtcagaccataaaaccactgccaaggagtgcaggggtggcaatgaaacagcccaacagggagcatggtcttgggagtggtacttgaaagaacagaaggctgtcgcagcacctgttgagctgttttccaaggatcagtcctttcccgagcatgaaaatggttttcagattggaatgagattagaaggcattgatccccgacatccatcagtattctgtgtgctttctgtagcggaggtttgtggttaccgtctaagacttcattttgatggttatttaagttgctatgatttttggaccaatgctggttcccctgacattcatccagtaggatggtgtgaaaagaccaaacatgaattgcacatccctaagggttatagaaaagataaatttgtttggatggattacctgaaggcctgcaaattgcaaaatgctccgaagaaattattcaggaacagaagtcctaatgggccaatgcctaaagaatttcaggttggaatgaagctggaagccgtcgacaggaagaacccttccttggtgtgtgtggcgaccatagcagatattgttgaagatcgcttactagtgcattttgacaactgggatgatagttacgattactggtgtgatgttaatagcccttacgtccagccagttggttggtgtcaggagaatggaagaactctgatagcaccccaaggttatcccaatccagaaaagttttcctggacagaatacctggaagctactcaaaccaatgcagttcctgccaaagtttttaaaatgaggttgcctcatggttttctgccaaatatgaaacttgaagttgtggataaacggaaccccaggttaattcgtgttgctacgattgtagatgttgatgaccaaagagtaaaggttcattttgatggttgggaccataagtatgactactgggtggaggcagacagccctgacatccacccgatcggatggtgtgatgtcacagggcatccactggaagtgccgcagcgatggaatgacctgaagatccttccaggtcaagctgtctgtcctactcccgggtgccgaggaataggccatatccgtggtccacgttattcaggacatcacagtgcttttggctgcccatattcagacatgaacttgaaaaaggaggcaacacttcatgatcgtttgagagaacaaacacaggcaaatttggaatcagactcttcacattcgaaatcaaaaaacctctgtagtttgaacttcaatggaaaacatgaaaaggtgaacagtcaacccagacttgtacagcaggcaaagtgtttgaaaatcaaaggaaaagaagatattgacttggataatctcttcagagaatactcagcggtccagtgccaatgattcagaggcttaggcccatctgtgggtttggtttatgaacattgttatctttggtgggatctgttcagctctaatgtgtttgcaagacagaccaaagaagcccacacatccacctttattcttctccgtcaccagaaaagaaaccattttccatttacaagcataacactctcaagtggtaaaatattagaaaagcagtgttcatgaatacattgttaatgtttttaccagaacaacgtcgagcttggctcagatctgccatgaagcacagctagtctaagacctagaggcctggtgctttcaaaagacttcacgtgagatttttgtgtactttactcaggaaagtgtgaatctctaaaaaataataataataagcacaaaaaaaaaaaaaa

SEQ ID NO: 1811 - DNA, 733 bp, Macaca Fascicularis
  misc_feature (1)...(733): n = A,T,C or G
tcagagcagtgnntnnnaaagtgtggccgggcagcattggcagcatnttaatttcctgggacnnnnnnaaagatgcaaattctcagccccaccctagtcgtactgaattgggaaactggtgtgggacnnnnnnnnnnnnnnnntaacgtgttctccaggtgattctgatgcctgttcaaacttgggaaacacttttagagcacttgaggaacctaaaagatgactggttcaacattttgtgtggtagataagaaaatgacaaaaaatcagaaatgaacagtgagagaaaaataggacccagacagttgataccttccgtttgctgttttaaaagtgtaagcctgccaagtcaacaagtatacctttagcgcacatgtaaatagcctgcacttcctaaatcttgtgtggcctcccatagttacattcctcaaaggtaaattgagttcagaggnnnnnnnnnnnnnnnnaagagaagggctgaaaaagattgtgtgtgggtgtgtgtgggtgtgtgtgtgtaattggnnnnnnnnnnnnnnnnnnaatcataataaaaaaaaaaccattttgccacattctgtaactgtttagttaaggtcaaattaagtttaccctatggattttgtttcatctttggtttcgtgtatatattgtttgcctttttcataaaaatcttggatttgttatatattgttcctgttatttttgacatctttgctatgtaaataaatac

SEQ ID NO: 1812 - DNA, 2347 bp, Macaca Fascicularis
  misc_feature (1)...(2347): n = A,T,C or G
ataaaaatacagagaacagtaaagttgtaattcagtaaacttcatagaagattggcagtttaggtagctgaatcttgaccctgtcagtaatttgtggaattttgtgtaattaccgattttacccccttaaatagacaggaagtgttttactatcagggtgggatagggacagtgaaaatagaaaaagtatttctgcacccttttccctaaagcctaatggaagaaatctcactagtcatacagatacaatcacaacaggctgattctgagaggatccagactaacctattactgtgggcaaatttttatttattggtcctcagtttaaattatcttttgatagtttatcagtctttactcttttaaattattttgttggtaaattctgtatcatgtagtaaaaatgcatgagctttggaatcagacagttttggctttatatataagtcctacaattatctaactggacagcagtaagcaagttactttgtctgtcccaatttcatcatatataaagagggcacaaatggtacttcccccataggaatattataagaattaaaggagccactatatcaccagcaataccactgccaccgtcatcattattgccaccctaacagctaacacttcaaaggcacttgaaacaatgctttgttgatcattgttttgcaatgctatctccatagaatcttttcattctctgggttcctaatcttgtaaaattatattattatattttagggtacctaacagtaaaacttaagagttaattttaaaagcctatgtgcttactaagctctacatcttatatgcttttcattatgctatttcctttgctcccaaagagttttatccacaaatattgtcacttgtcagagtccctttgttccttctgtgttagaaggggtcagtgtatccactgtttgtatgtatagtatttttgtcatcatggtatttcttatattttcttgtaccttatcattactaggatacaaagttttgtacaggtatgggtttgtcacctcatatctgtattacctgtatgtgcattgcatactatgttcttcactaggaagattatttaattgaaatatttgtgaaaatgaataactttagacttggaaaatctcttttctagattaaatataagacacctcaacctataggagaagtatattttgcagaaacttttgatagtggaaggttggctggatgggtcttatcaaaagcaaagaaagatgacatggatgaggagatttcgatatacgatggaagatgggaaattgaagagttgaaagaaaaccaggtacctggtgacagaggactggtattaaaatctagagcaaagcatcatgcaatatctgctgtattagcaaaacccttcatttttgctgataaacccttgatagttcagtaagtgttgctatattttggaatactttttctgaattttgtattagctttggcttctgaatatagcttgtattttgaaaatggatgtaaaaatctagatcttccttttccgtttcacttagttaaatacacaaatgtgcatatacacacaaacatacccgtgtctttaatgaaaagcaggtaaatgataaaataatataaagatcaaccattcttatggcctagaactaatatttatatttatttcaaagaattgtatgtgggctattaagcagtgtatttcctttggtctgagtcatgtattgactaaatgaggagtaaatagtttggctctcttaaaaaaattttaaaattatgtgatatatactgtaatatatacaattctgctgccgtaaactatataatgcatagtaaaaatcatgtttgttttactcttaaaattacttcttatcaaactattaaacttaatatattcagaatagaatcataaatattgctattaaaccactgataagattcaaaggcagaacgtttatttcgaaaataaatgtttatgaataccagtgtctttcaagcatggaccccttttaaaggtcacattctcatagataatcctttccttcaacctctccacctccccattatgcctggcatgnnnnnnnnnnnnnnnnnnnnnnnnnnnnnnnnnnnnnnnnnnnnnnnnnnnnnnnnnnnnnnnnnnnnnnnnnnnnnnnnnnnnnnnnnnnnnnnnnnnnnnnnnnnnnnnnnnnnnnnnnnnnnnnnnnnnnnnnnnnnnnnnnnnnnnnnnnnncactaatctggaggctgaggtgggaggatcacctaagcccaggaagtggaggctgcagtgagccaaggtcacaccaatgcattgcagcctgggtgacagatgagatcttgcctcaaaaaa

SEQ ID NO: 1813 - DNA, 746 bp, Macaca Fascicularis
  misc_feature (1)...(746): n = A,T,C or G
agacctgaaccacaaagctggacaccaacatgaagggcaggtaataatgatgttggatttgtaaatcatccttgtctgttaaagctggatttccttatttgtattatggattgaaagccatcaaaaagcacacacctttggactcagtaatcctaattctaggagnnnnnnnnnnnnnnncatgtnnnnnnnnnnnnnnnnnnnnncctaagttccttgagatgttaatgagtgcaagaaaccaaaggggaggttccatnnnnnnnnnnnnnnnnnnnnncataggctggcctgaacataaagttcnnnnnnnnnnnnnnnnnnnnnnnnngagtgtctgctgtattaatgcttttgtaagtctccaagagaggggagggagatggaggcccagtttcccaaggtgtggcctgtttcttctgatgcttagtcaaggaaggagtggagatgcagcannnnnnnnnnnnnnnnnnnnnnnnnnnnnnnncccttgttaagttatgatatacgtcagtaacttgaaacannnnnnnnnnnnnnnnnnnnnnnnnnnnnnnnnnnnnnnnnnnnnnnnnnnnngagattttactatggaacaaagtaggcatatgactttttttttttaaagggtgctgagtatatgacttttaatattcattaactagttatttctacatggggggttacggggtttctttggaggagttttttnnnnnnnnnnnnnnnttttctacaattaacattac

SEQ ID NO: 1814 - DNA, 745 bp, Macaca Fascicularis
  misc_feature (1)...(745): n = A,T,C or G
tnnnnnnnnnnnnnnnnnnnnnnnnnnntggctatagtgggatnnnnnnnnnnngtctgaaactgggttatcccctctaccacatatgggaannnnnnnnnnnnnnntcccaaggacccacttgggtttcttacacnnnnnnnnnnnnnnnnnnnnaaatgnnnnnnnnnnnnnnnnnctctataccaatatgagcaccaacttgcacctacccttnnnnnnnnnnnnnnccaaaatgtccaannnnnnnnnnnnntttaatgtgaagtgtttactgcaaaccttcacagagataggctagttcctgtgagctctnnnnnnnnnnnnnnnacttgctcaacttccttgccaaattttaggcctgtggtaggaattaagcagaactagttgaaataatggattatttacattacggaagctactcattttaatgcaggctcccttttggnnnnnnnnnnnnaactgtttacaaaggaaagaaagaatttggcaaataatgaggacctgttctgaaatcttaaacctactgtttgcagaggcttctgcccaaccaggaaggagctagttggggtccatggacagcttggattggtcccagatgggtcctattgcagtgagtgccatttgttaatataaggaaggccagacttgtcttccttgcactgctctcaacaatcaaaatcagcccgcagtttacaccagaaagcatgagtnnnnnnnnnnnnnnnnnnnnnnnnnnnnnnnt

SEQ ID NO: 1815 - DNA, 2187 bp, Macaca Fascicularis
  misc_feature (1)...(2187): n = A,T,C or G
attaccctctacctgtttagcattcttgattctttgggcaatattttatttgatttgaaagttagtttcatgaatgattttataacctccaaaactttcttcttattatttttttaattatgctgcaagttcacttctgctgtattgctgaatcattcattcccatgaaaaaaagatgatttaggaagtgattcaggaagtctacctctgaccatcttagaaacctgaaccccatatacacagagagtactgtattattttcacatagcattaggccatccatctgccaattctgataaataacctgaggttcacagctcagaaaacagacattgatgttctcccagctggaagcatgtagtgatgacagcagctaagtagacttcatggttactgagggtggtttacctttagagtgctaaaacaacattgccttcagattttctttatataattgctcagaagatggtagctaatgaagatgagatctgagatctgagatcttttttttctatttaatatgatgttctttttgtttgtatgtttgtgttttttattgtgttctaactccttgatttataccgtagtctttttgttttgttttgttttgtttgagacagggtctcactctgttccccagtctggactacagtggttcaatcatgtctcactgtagcctcaaccctttgggctcaagggatcctcttacttcaagctcctgagtagctgaaactagagttttgtgccaccgtgcccagctaattttcaaatattttttgcagagacaaagtctcacgatgtttcccaggctagtctggaactcctgggctcgagtgatcttcttgccttggcctcccgtgctgggattactgtgcccagctgatggatgccatactcgcaggaaaattaattttattttcatttttcctgctaataagttacattcatacggtcaaggaattattagtgtttcagtcaataaaatctacttacttttgcaacaacaaaagtgttgattccatgatgatatgagaggttgtttaaaatctatttttagaaataacagattatgttactaccaggaactttgaatttatttccacatttgccacctaaaattttaagtcatgagtatattgtataataatagtattacagtagggttttttgatgtgtcaatattttgcaactcctcttgtctagtggtgaaatatatttcgtcacacaatccatctaggagtgtaatttcccttccttgggccaattatgtgttaacaaatgtggtgccagcagagacttgaaaagtgttttcacattggattttgccctgtttattgctgtgaaccttgatacgtctgtaccaagtagcctgggctagcctcctggaggaagagagccccaaccatttgatgttgctgcaaaggcaaacaggtgcacacttagatcttctctcaggaatgcatatgatgtcacagtgattactttgttccaaaaagcattgcttgggttgaaaaccagactcaatgaaaatgaacaatctataatttaatttctaaattttaaattttagttaatgtannnnnnnnnnnnnnnnnnnnnnnnnnnnnnnnnnnnnnnnnnnnnnnnnnnnnnnnnnnnnnnccattacatagcattacttcggatcactgatattttttcattttgcaaatattgtatcattaatctgtcattatgctgatactttccctacttttagtttatttatactcatttctccctgtatctattgaataatctaaataaagctattagccatcatttagttaacaggggtatcctctgactcttatttgtgaatgcattcccttgctcctgtctcatagctagaacttttcaataaggtctttgtttgatgtgggttgaaatggagcaagcttatctcacagagatataatgtgctaacccaatagtcttgaccaaagataaatcactcatttaatgggctctgcttgaaatgcagaggttgaccacaaaagaccactttttgtctctttgtcttaggtccaaaccgagactgaatttgttggtcatatattcttattctaagatcatttgttcacctctgcacactgcaatacagtctaatgtaattgctagtcctagaaaagaaaagaaaagaaaaaaaaaaaaaaaaaaaaaaaaaaa

SEQ ID NO: 1816 - DNA, 2900 bp, Macaca Fascicularis
atgattggctgcggtctcttcgtagtgcagtctaggcctccgcctccgttaccctggagcccaggttacggccgctgccacccaggatccgcggtcctcgcccctgtcccatccctgtgttcaaacctcccgcagcctggcaacctcggcacccgccccgcagcctccgcaggagccaggcacccactctttggcggccagacgccgaggccccagggcaaaaaagtttatcttctggatgctaatgtgaattgtggtctacaaatacattgtggagaaaatagattgcacagaaatgaatattatcaggatctgaagactgtgaaaatgtttttcagtattgtcatagtctcctctggagaaaataatctgtgaaactatgtgaatagaaaccatttttcaaaacaatgggggaaagagcaagaagtccaggtactgatcaagaaagaaagtcaggcaaacaccattgttcttattcatctgattttgaaacgccacagtcttctggccgatcatcactggtcagttcttcacctgcaagtgttaagagaaaaaatcctaaaagacaaacttcagatggccaagtacatcaccaagcccctcggaaaccaagccctaagggtctaccaaacagaaagggagtccgagtgggatttcgctcccagagcctcaatagagagccacttcggaaagatactgatcttgttacaaaacggattctgtctgcaagactgctaaaaatcaatgagttgcagaatgaagtatctgaactccaggtcaagttagctgagctgctaaaagaaaataaatctttgaaaaggcttcaatacagacaggagaaagccctgaataagtttgaagatgctgaaaatgaaatctcacagcttatatttcgtcataacaatgagattacagcactcaaagaacgcttaagaaaatctcaagagaaagaacgggcaactgagaaaagggtaaaagatacagaaagtgaactatttaggacaaaattttccttacagaaactgaaagagatctctgaagctagacacctacctgaacgagatgatttggcaaagaaactagtttcagcagagttaaagttagatgacacagagagaagaattaaggaactatcaaaaaaccttgagctgagtactaacagtttccaacgacagttgcttgctgaaaggaaaagggcatatgaggcttatgatgaaaataaagttcttcaaaaggagatacagcgactatatcacaaattaaaggaaaaggagagagaactggatataaaaaatatatattctaatcgtctgccaaagtcctctccaaataaagaaaaagaacttgcattaagaaaaaatgctgcatgccagagtgattttgcagacctgtgtacaaaaggagtacaaacgatggaagacttcaagccagaagaatatcctttaacaccagaaacaattatgtgttatgaaaacaaatgggaagaaccagaacatcttactttggacttgcagtctcagaagcaagatgggcatggagaagcagggattctaaacccaattgtggaaagagaggaaaattttgttaaaggtgaagaactccatgtcgtaaaacaggaggttgaaaagctggaggatggtaagaaaaagaatttgtttaagcatgtaacaagtcagcattccttgggaaagaaagagtgagcgtcctctaatatcttccaacttaagtgtgaattggttaggtagaacaaagaaaggtggatacagtggtaggggatggcttatcaggagctgtacacatttgaataatgttattaaggaaagaaaaaaatggaacactccaagtcatttgctatttagggttagggaataaggacgagttgcattcagaaaattctgatgaagtagaattcagatgccatttactaaagttactatacttgtagtgttcttacatattttaatatttttaattttttcatttggaagtagtttcaaagttaaagttgcgagagtagctaaagaactatttgtgagtgagttgtgtatctcatgcccatacctttaaatatttctatgtatatttccccaaactaggatattatcttagaccatattccaatgtagttttcaacttcaggaaatttaattttgacgcaacacattaatctatcattcatattattttgtcagttgatacaatattgttcttgatagcattttcttccttctgttacaagatcatgaattgcatttagttttcatatctcttcagtcttctttaatctggagatttttgttacacacacacacacacacacatatatatatttgtacagagagggaaaaagagaatgtgtgtgagagattaatatttttgatgaatatagacccatttttaaaaacagaatgttcttcattttgggtttgtctgaagttttctcttaattagattcaagtcaatgcatcttctgtcagaatatcacataagtcatatctcaggatatgacatccaaaggtttcatttatttttaagtgtagagtctttactccatctatccatccatccccaccgtacagcattatgttagttgtaaaaaaataggcaaaaaacctttcttctctaccagtatcttgaagaacaaattttttttataaatgagaatcttaaatgcaatgcatattaaatatattattctctgttcccagaatatcaagtaaaaatgaaatttatgatatcttttctcacttgacttattatacccaaattaaatatggttgttttataaaacttgatagttttcctgtttaaaaatactgactgttacaaaatcccattaaaaaaaatttgatttcatacagaatgggaaagagaagaacttgataaaaaaaaaaaaaaaa

SEQ ID NO: 1817 - DNA, 713 bp, Macaca Fascicularis
tgaactcttctatctgcagtcttttgttattctgcaggctacacccttaattgcagaggccattttgttttgtttgtttgatgctgaagctgttgttgaaatgccctaaactccaaggcagattgtctgtataatacgctatagcttttcaccatgtggtgtttaccagctgttactctgtattttaaaaagccagagatttcttctgtctaaactgtttctatagcattttctaaacaaaaaaaaaaatggttttttccttatcttggaataagattgtaaatccatttcttgcgtgtgttcttagtgggcatgattgtgtgtgtgtgtggggtgctcacacgcgtgccagtctttttgtactgtaactacctcatggttcgaatgattgtactgctggttgtgttaacagagcacattttgttgggtgaatcctatgtgatttttttcatgtttgttttatctggggtggttcatgaaactgacagatgtttttctaaaaaggactattatcagtttccaaatacaatacttctctcttctggtttttcctgaatgagcctgattttgttgctggtttttatcatctatgagggtaaaaagagtacccttaaaatccctgtggccagtttgaacacccctattgtattcttttctctgttcagtgtgtcagctattttgtgaagatgcttagatgtatagttttgataacc

SEQ ID NO: 1818 - DNA, 167 bp, Macaca Fascicularis
gttcgcttctagccagctgcctgcagcttccccacaccaacagcccccacttggggtgcacctgaagccttctcttttttcacaatttgccttcccactcctctgcctgcctttgagtctctgccaaatgcaggtgctgatggctgcttcccttggtctcgaaagtg

SEQ ID NO: 1819 - DNA, 743 bp, Macaca Fascicularis
  misc_feature (1)...(743): n = A,T,C or G
gtgaaaagaaccatgaatgcaacaagggaggctggtcctgttgctgtcgccgattaaatttttaacttttatttattatttatgtctgcgntatntaaaataaacattctcgttccttccagttccagtcatagtgtgtctgtggcattccagtccaaccacgtaacttatttattctaatttgagggctgcactgtacatcatggtgtcccgtgacactgtgnnnnnnnnnnnnnnnnnnnnnnnnnnnnncatgtaaatgaaactgtcgttctgtgtcctccctcgcagcagaagatgtgtccttccattgagtgagggtgaccttatgtccagcagggatactttgagaaagcccctaaggagcaagcctcagnnnnnnnnnnnnnnnnnatttattctctgaacacaagagtattggttaattacgttctcagctctccttgctgttacatgtgtgcactcactgcaagtaacttatatctttttatttgaatgtattttaaagcagtagatagaataacaaaggaatatgaannnnnnnnnnnnnnnnnnnnncattttatgtattcagagagaggagccnnnnnnnnnnnnnnnntataccatgtaaaaattggcagttcagaggttgcaatatttagtatagtaaataaataaacgatcaacattgtgcaaccactaccaaaaagtgtgttgtaaagcatcaaaaatcaacaaaatttantcactaatgagtatca

SEQ ID NO: 1820 - DNA, 737 bp, Macaca Fascicularis
  misc_feature (1)...(737): n = A,T,C or G
gcaggacagctcgctctccacagagagccatctggctccaacagactcacgcggatgctaatctattggtttcttnnncttttattctttnnnnnnnnnnnnnnnnnnnnnnnnnnnnnnnnnnnnnnnngcagctgtaaattcagacctggccccgtgaaggcgagcgttcattcgtgcatttatttattcctgcattatgccccctcgccccctctcctctggcgttctggttggagaaaggagatggaggcatgctcgnnnnnnnnnnnctacctgatgaagcactgtcatgtctnnnnnnnnnnnnnnnnnnnnnnnnnnnnnnnnnnagtatcaatggtgtgtaatatcagtgttatttaatttcagaggtatccgcctgggaattcaagttgaaaaacatggcgacaatatcattgtggctattgttggttgatgcttgttttgcgtcaagcacccagctaaatattctccatatgtggcctcctatagtcctgtgagtgtgatgtacatagtattattatccatgtttcacagaggggaaaatgaggcatgggctaagtggaagaagtggccttcagacctagctctgcccaactctgaccttagctctcagccactgggccccagtcctccctaatgtttcaacaggaagaaaggtaactactcactcacaccctgtataaacactttcataatgtcagacacatagagttggagtgaactaaacagga

SEQ ID NO: 1821 - DNA, 2785 bp, Macaca Fascicularis
atgggtttcatgacgatgcctgcctcccaggagcacaccccgcacccctgccgcagtgccatggccccacggtccctctcctgccactcggtgggcagcatggacagtgtcgggggtggccctggtgggggcggtggaggcctcacagaggacagcagcatccgaagaccccctgccaagccccggagacaccccagcaccaagcttagcatggtggggcccgggtcgggggcaaagacgccccccagcaagaaagcaggctcacagaagccaaccccagagggccgagagtccagccggaaggttcctccacagaagcccaggcgaagccctaacacccagctctctgtctccttcgatgagtcctgccccccaggcccctctcctcgaggggggaacctgcctcttcagcgcctcactagggggtcccgagtagctggggaccctgatgtgggtgcccaggaagagcctgtgtacattgagatggtgggggacgtctttagaggaggaggacgaagtggaggaggcctggctgggccccctcttgggggtgggggcccgacccctccagcgggcgccgactcggactctgaagagagtgaggccatctatgaggagatgaagtacccgctgccggaagaggccggggaaggccgggccaatggccctccaccattgaccgcaacatccccgccacaacagcctcacgcccttccgccccatgcccaccgccgcccagcttcagcccttccgagccggagggatgggacgcccaccaagaccattccttgtgaaatccccccacccttcccaaacctccttcagcaccggcctccactcctggccttcccccaagccaagtctgcttcccgaacccctggcgatggggtctcgaggctacctgtcctctgccactccaaggagccagccggctccaccccagctccccaagtgcctgcacgggagcgggagacgcctcccccaccgcctccacctcctgctgccaacctgctgctgctgggaccatcgggccgggcccggagccactcgacaccgttgccaccccagggctctggccagccccggggggagcgggagctccccaactcccacagcatgatctgccctaaggcggcgggggcgccggcagccccccctgccccggccgccttgctccccggcccccccaaggacaaggccgtgtcttacaccatggtgtactcggcggtcaaggtgaccacgcactctgtcctgccagccggtccacccctgggtgttggggagccaaagacggagaaggagatctcagtcctccatgggatgctgtgtaccagctcgaggccccccatgccagggaagtccagcccccacagtggggccatgggcgcagcagctggggtcctccaccaccgcggctgcctggcctccccccacagccttccagacccaactgcaggccccctgaccccgctgtggacctacccagccacagcagctgggcttaagagaccccctgcctatgagagcctcaaggctgggggggtgctgaataagggctgtggtgtgggggccccgtcccccatggtcaagattcagaatgcaggagcaagggaccgatgggggtgcttttgccaccatctcctgtgcccacgtcatcgccagtgcagggacaccagaggaggaagaggaggagatgggcgccgcgacatttggggcaggctgggccctgcagagaaaggtcctctatggagggagaaaagcaaaggagttggacacagaggtcgaggatggtgcccgggcctggaatggcagtgccgagggtccaggcaaggtggagcgtgaggacaggggcccggtgacatcagggatcccagtgaggagccagggggcagagggcctgctggccaggattcaccacggagaccgaggagggagccgcaccgcgctgcccattccttgccagaccttccctgcctgccaccgcaatggagacttcacgggaggctaccgcctagggcgctcggcctccacctccggagtccggcaggttgcgctccacacaccccggccctgcagccagcccagggatgccccgagccagccccacccggcgctgccgctgccgctgcccctaccgcccctgccgccccagccggcccgcgaacgcgacgggaagctgctggaggtgatcgagcgcaagcgctgcgtatgcaaggagatcaaggcgcgccaccgcccggaccgaggcctctgcaaacaggagagcatgcctatcctccccagctggcggcgggggcccgagccccgcaagtccggcaccccgccctgccgccggcagcacacggtcctctgggacaccgccatctgaggcgggcggggggacctgggcgcctggactggggcgggggcgggcacgcctggctctcccgggagcctcgccttgagagacattgaaggaccacgtgggagagtgccagggagaacccctgccctccaccgtaccccctgggatggagagagtctgccaggcccattgggcttagggtgccagcagcgctgctgagaaacttggaggaggaggagggtttgcttgaggttggggcgaggcgctctggctgttctcccccctgggcgctatgcgtgtctcctcctgaaccaagccagaggtcagcatggggaagggaggaaggaagggatgggaggaagaggggggtgggtgagctcaaagagagggactagagtgccagatggaggagctcttttctagagagccgggagttgggga

SEQ ID NO: 1822 - DNA, 112 bp, Macaca Fascicularis
ttccactattaaacacgcacgcactaatctcgcacagtatattctcacagtgtatatatatatcgcttttttctgcagcgcgatttctcttttgataatgccccctagggca

SEQ ID NO: 1823 - DNA, 710 bp, Macaca Fascicularis
  misc_feature (1)...(710): n = A,T,C or G
atgacacccgttggcattatcagaannncntgcaggcaaaatagattnnnnnagacatttgnnnnnnnnnnnnnnnnnnnnnattaagaaactgctcgtggttgacagaacaaggcgattaggaaacatgaagaacggggcaaatgatgtgaaannnnnnnnnnggttccactctgtggactgggaagcnnnnnnnnnnnnnnnnnnnnnnnnncccatcgtgcccaagatannnnnnnncggcgacacttccaacttcgaaacttaccccgagaatgactggnnnnnnnnnnnnnnnnnnnnncagaaggatttagaaatcttcaagaatttctgaggacaggagctcacatctggaagagatggggtttcaccgtgttgcccaggctggtctccaactcctgggctcaagagatctgcttgccttggcctcccaaactgctgggattccagggctttatcctgacttggcaaagctcctcatattggagaggaaaattnnnnnnnnnnnnnnnnnnnnnnnnnnnnnnnnnnnnnnnnagcccattctccgcagacatacaatgcatgaggcatcctcagtgatttgatgatgtaaggtaactactggaagataggaatgtgtaattttactaaagtttttctcttcctattaatttagcttctcacatctcatcctgccgttnnnnnngatttaaatattatttgtc

SEQ ID NO: 1824 - DNA, 700 bp, Macaca Fascicularis
  misc_feature (1)...(700): n = A,T,C or G
ctgcaggaaggggacaacatnnnctgaagaccataggaacaagataatgactgcatgaagacagcccaagacctgaggaccatagaagatagggagctggagctatgtgtttgtcacacttcaatatgcatgcacccttttcataacttttctagatattttctttcatcttttttggtttatggtttgctttgttgacagacagcatgttacctcaactagagtaactataagcaatgatttcttagagccagatagaaccggcttatgagaatcaattgttaaattgtcaggaatcttaccagatggttgtgaaaccactgatggcttgaaatcagtctacaggaacatgcacacaatggaaatcagaaaacagttttatttgttcttacaatgtgtgtctggaaaatgttactgccagtgttctatgttccaaagttatttgaagtaatcatttcccctgtgtgattaggttttatattcaggtctgtttgtttgtttatttttgtgttcaattgtttgtttgtgtttaatttgattttttcccatttgacttaattttggtttttgaatatgtgagtcatttacacgattgaaaaataaaaactgtataaagatactcagagagctctcgctctcacaccctgttccctattcccatctcacccatnnttcagaagtagccatttccattttcaac

SEQ ID NO: 1825 - DNA, 358 bp, Macaca Fascicularis
acgtcgtaagctcaaagggtcaattctttttcctttgtaacaccagcagagagattccccagtgtttcatgaagaattgtttaatattttcttctttcttttaccctaacctcttcgattatacccttgtttcagtataccaaggacaagcactgcatttatttctaagagacaaaatattaacacatccattcatgctgtgttattgggcttattttgttcatttctagattcacgatgttaaccagggaggtggagcagtggttaaaaagcgaatgcatcttcacacaatatccccttatgacagacttgcacatgtatcccctggatctaaaatttaaaaaaaaaaaaaaaaaaa

SEQ ID NO: 1826 - DNA, 715 bp, Macaca Fascicularis
  misc_feature (1)...(715): n = A,T,C or G
cccaggttcccttgggtaagcggggactggggggaaagtggtaaagacggaagcaactctcctgccctcatgagtccacaggcccttgcggttcacaaacaggcacttacgaagggtcttcactttcatttcacaaggttcatttcaccttacaaccatgtgcccagccaccccagatggaaaggaaagaaactattatccccattgtgcatgcaggggaaactgaggctcgcaggtaaagttacttacacttgcctagcttgcaagtggtaaagctggcactagagcaaaagacttatggcttccaactattctatcattcaggaagaataaatactccctgacactgtgtctccaatactgttctaggtgccggagatacaaagggatcaaggtggatatggtcctgacctcgggggcttatcttctagtgggaagagatggataacaaataagtaaacaagcttaaaagtgagaagaagggggccnnnnnnnnnnnnnnnnnnnnnnnnnnnnnnnnnnnnnnnnnnnnnnnnnnnnnnnnnnnnnnnnnnnnnnnnnnnnnnnnnnnnnnnnnnnnnnnnnnnnnnnnnnnnnnnnnnnnnnnnnnnnnnnnnnnnnnnnnnnnnnnnnnnnnnnnnnnnnnnnnnnnnnnnnnnnnnnnnnnnnnnnnnnnnnnnnnnnnnnnnnnnnnnnnnnnnnnnnnnnnnnnntg

SEQ ID NO: 1827 - DNA, 253 bp, Macaca Fascicularis
caacaaggcatgtagtttcttgtaatatatatgtacactattacattgtacagaatctgtacttatgtttggtgtgtaatataccaattagttttatataatatcctcataagctattctaatttttgagagaaacacaaaaagttatagattgatagtctgtataatagacaaaatagtaagctttataaaaagttatttttggtaaatggtaaagaatttggagtggaatgtgatgagattaaaatgtagc

SEQ ID NO: 1828 - DNA, 673 bp, Macaca Fascicularis
  misc_feature (1)...(673): n = A,T,C or G
ataacttcaccatttgttcaaattacctcctgtattatttgctgagttttgtggttgttttcttttagatacattggaagttcgtcattttaatgaaagtagaataacaaacattctgaagttttaaagaattacatttaaaaaaaatacagccttttcctctttcgcttgctgtctccccttcccctcctcctccttctttcctcaaatggagggagttctttttttcttcttccgtctcatctactcaatcatggagccgctgcagccgctgcccgctgcccgccgcccgctgcccgccgcccgctgcccgccgcccgctgcccgctgcacacacagagcagagtcccagggtccaggagccagagcagcgccgctcggagaccggatggttccgtgggttgtggaggagcacaggagagcggaggccgggccacatagccccccggacccagcagcccaaacccagcggacccagcagcagctctgggagtcgccacccccggaagccgcctgtgccgggagcctccatttccaggacccgccaccgctgggagctgccacagccgggagccgccaccgccnnaagcctccatctcctnnnagccgccacctccaagagccactacggccgccgggagccatcaccgccgggaacctccatctcctggag

SEQ ID NO: 1829 - DNA, 198 bp, Macaca Fascicularis
gcaatattgcccctgtgagaatgcctgttataaggtaaggttgtgcttgttaaagacccaagacattattgggttccatagtctccaaaggaagagggcgggttagtttgtttttcttattattttaaaattgtataattggggtccttcttagagttccgaacaaggtatggcttactcttttttgattatttattt

SEQ ID NO: 1830 - DNA, 502 bp, Macaca Fascicularis
ggtgcccagaagcccaggaagccggtcagtgcccgccccaggtaagctggtgcggtggggttggcaaggacagtcgccccaggaacctgggggcaagcaggcagaggccagctcggggccagcacctgtgtgccagggacaaggccggggaggtcaagcccagggggagctgagcgcactgcatgggctcttttgggtggctgcttgcctgctttcccgaagctggttccagggcttgagacccagcatgctatgccccaggttcccagccaaggcattccggtgaaggggctggaccccgccgaggcgtggtccctgagctgcctctgcctctcccaatccctgctggggactgtggctggaggcaggcagtagagcgcttggaggcctgccttttctgttcggtaggtggcaggagtggggctgatgctcccagagccaaaggtcacaggcgctgtggttgggggtggcaggaagtgagccccagaagggtcagagcttt

SEQ ID NO: 1831 - DNA, 796 bp, Macaca Fascicularis
  misc_feature (1)...(796): n = A,T,C or G
aattcatgcaannnnnnnntcagaaatggtatagtgacccgnnnnannnnntccaagctcacgaccttggagccccgtggagctggactgaggaggaggctgcacagcgggagagcagctggtccagaccagccttgcagcccccctgagctggcagccagatggccctgcaaggcctccagggatggccccgagctgcgggccctggctgaggtctctgggtcgggcagtgacaggtataggtaggaagcactgaaaatagcnnnnnnnnnnnnnnnnnnnnnnnnnnnnnnaagagggacgacacctnnggtttttctatnncaattacatggaacttttctgtaataggtacaacgaagaagtttctaaaaacacacacaaagcacattaggccaactatttagtaagcccggatggacttattgccagaaacaaaaagtagctttcaaaagaaatttaagttatatgagaaattccttagtcatggtgttgtctaaatcatattttagctgcacagtgttaccccacacagcgttacccnnnnnnnnnnnnnnnnnnnnngttactgacatgtaacnnnntggtnnnnnnnnnnnnnnnnnntgttgccctggcattaannngcattttacccttgcagttttactaaaacactgaaaaatattccaagcttcatattaaccctacctgtcaacgtaacgatttcatgaacattattatattgtcgaattcctactgacaacattataactgtatgggagcttaactttataaggaaatgtatttgacactg

SEQ ID NO: 1832 - DNA, 640 bp, Macaca Fascicularis
  misc_feature (1)...(640): n = A,T,C or G
agtctccagcacctntgggatgcaggcagttcttgcccaggccttctcggaaccctcactcccctagcccactcttgcgctacctacaggaggctgccaacctggtgcactctgacaagcctcccacccaaatctctctcctgccattgtgtccaaaatcccgccattagaggatcttgtagggaggagagtttcttgaaggcttttaggccttccagagtcaggacggaagtcagacaacagcaggaagtccccaagccttttcaaagttccaaaccaagctctcctgattttaatgtagagatcataccaacccaggtggggaggagggtccccagccccaggtagcagccatcaccccctccactgaaaacgatgttggaggctgctttgggactgcccttctcagccccctgagtctgttttgtaatgcctgtggtgctctccctcccggacctttcctctcgggggtcaccacactttgctaactcttgtgtgcacatattttataatagagtagcgagggaatggtgccgcctccagcttccataagctgcccgggctctggggtctctgggacaatcggggctgggaagtgactgtgctcttattgtacactctttatttctctgtatctttg

SEQ ID NO: 1833 - DNA, 697 bp, Macaca Fascicularis
agacagcccagacttcctccacagtggtccagggagcagtcctcagtgggggcaggtgtgggccctacccctaagctagaatgtggttgtcagaaccctgaaagtattagttctaaaaaaaaaaaaagatatatactagaaataattgttttatcaattcattgtataataaacaggagtgagacttcattgtatgacttcagttaaaatgctattttgtatgcattctttattcacttaagaagcttgtctgcaataataaagccacgtcatgtcttcttttgggagggagagagtcgatggcaggagggggttgtgggtgggccactgaaaagggggaccgaataggttgtgtggtgaaattctcctgtgtcttggaactggaattgagtttcgatgttgatgaactgattcaaccaggtgttgaaggcacgacggccactgctctacgaaaagggagagtatgtttttcccttctggttgtaacctggttaagagcttcccctttatcagattggcagctaaacagttgtattagataatccttaaatttgacatccagcctgttatgctctaggtttcgctgcttggcctgcatttgctttttattgtgtatccattcccctcctacggtgtgctcctaaatgaaggtttctatgtaagcagatgatgattttacctgtcaataccagcactg

SEQ ID NO: 1834 - DNA, 697 bp, Macaca Fascicularis
  misc_feature (1)...(697): n = A,T,C or G
aaattatatttcagnnnnnnntcgtttgnnnncagtgggaagtggagaaactaaagatcatgttttgggaatgcttttgaatttctctaaaaatccatatatgacaaaagacttgnncattgccaatgcannnacatcactgattaacatttttagcacgaaagagacaaaggagaatattcttaatgctctttcactatttgaaaatataaattaccatcttaaaagaagagcaaaagcatttacccaggacaaattcagtaaaaattccccttatttcctattccaacgacataaagcatgtgccaagaaacttcgagccctagcagcagaatgcaatgaccccgaggtgaaagagagagttgaactattaataagtaaactctgnnnnnnnntatgttcccaaacaaatttgagtaacactttggttttgcactctggaagtaatgcacattgtaaattgcattataacttcgaaaatgatgttacatatgatggtgtatagccagaccattttatgaacaccaaatgaattcaagcttgtactaaaaatacatgtgttgatttttatcttgtctggattgagatatttttagtatgnnnnnnnnnnnnnnnctgaacggattcttcataagtaaggtaatctttggtcccttgtgtggacttatgtttatacatttaagactttatttttatg

SEQ ID NO: 1835 - DNA, 707 bp, Macaca Fascicularis
cacacacacacacacacacacacaccccaaatctatatatgcaaacaagggtttgggttttagttttttgttttgttttgttttgttttaggtgaagactcagaaaatcaaaagggctagtagaaacagtgttatgttgggaagcagggtacccccaaaaatgttccctgtaggtcacggcactcccgaaagcacacaagcacatacagacatacgcatccccacacacacccatgcacaaacgtggatcatcgcacagactttacgggaggtttagtggtgcatttctcctctgttttctttttaatatacatttaaaatacagtattatcactttataaagcatatattaaacccaataaatggaccaataagccaaactatcagtattttgtatatcctgcataaactctgatgtagttcctcaacatattttcagtgtttatgcagacctttagagttaagcctttgtatttccatgttattcaacaatatgcaatatttctgagtagtttctgctgtgatattcgtatgaagaaaaggggcacctttctgtccactaggagagaattcagccgaagatatgagaataatgagagacattttccagtcattggatcgtgttttcttttgtccattattgtactgtgctgtaccacatttatttctatattcattttgtaaaaaatttaaaagtgctattttgt

SEQ ID NO: 1836 - DNA, 715 bp, Macaca Fascicularis
  misc_feature (1)...(715): n = A,T,C or G
tttagcagaataacagagattagcactnnngcaggcccccaccgcnnnnnnnnnnnnnnnnnnctgacctagctgtgttagcatcgattgagaaatgcaaggtcctaaattttaagttgcctttcttacaaacacaaagaaactatagaaaatgggttaagagtatatgcatttcatcaaacacagagagagaaaaaaaatccttcattttagagttaaataactcagctttgtgtagcagagttagctctccagtatctaacaatctcaaaatcatctctgaaaactggtaactatgcttccatttttaattttgtcctaaatatcagatgtctttgatgtaagggtagggaatggagaaatattttcaattgtgtatttgtattacaaagaacttgaaatttactttcttagttgattatattaaatgatgtatatattatatgtggtttataagctcaacactggccatttttttagttttattgttaaatggtatttttctatgtttaattataatagatttggctttttctgggtagcataaagatcactgatatatatatataaaagaaacaagagttctattttagcacaaaagcattttatattatttattgaatccctaagtttgttgtcatcaaaaacattccatattatttctgctcctttttatttgtatagtttgttatttaaagnnnnnnnnnnnnnttcc

SEQ ID NO: 1837 - DNA, 602 bp, Macaca Fascicularis
  misc_feature (1)...(602): n = A,T,C or G
ggcagctctggggcntggacagcccagctnnnnannnaggaggtcagactaccatggatcctagggcagggctagaggtgagctgggctctcttctccaccagccacagcttgacagactcccagcctgccagggcccaagaccctgggtccacatgacctcaggaagtcccccacctgctgcagggggtccagcaccccacagggggcagccccagagctgtggggaccagcacgacctttgtccagcctccctgtccaaccaagcactttagactaagccacttcctcctcggggagcccaggcctccgtgggttgggctgggttgggggggtctcaggttgcccccgaaggtctctgcactcctcctgcccttcccctgacacatgaacagatgccttaacttcgtggagctgccagcctggtgagccactggcccctgcctgccaccaaggtcctgtagtcatggccagctctgcctgggccccactggggctgcctgcaccnnnnnnnnnnnnnnntgggaggtcagagggcccgaggcccaagccctgtgtcctccagcagtggtacggcctacagcagggtggcactccggccag

SEQ ID NO: 1838 - DNA, 770 bp, Macaca Fascicularis
  misc_feature (1)...(770): n = A,T,C or G
cacgacacatacatgacatcagtatctatatactgatgtgnnnnngtgtgcctttatgttcagccgaactctgtaaccaaaaattggatcatggattgtgaaggaagaactcatttcttttctctggtggagcactcagtaggcatttctgccctttgggttcaaatgagaaagttgccttagcttgaggcagaaagaagattgtgaatattattattcttatcattattattattattaatattatagagataaggtcttgatatgttgcccaggctggagtgcagtgattattcacagctgtgatcatagtgtcctacattcttgaacttctgggctctgttaatgttcctgcctcagcctcctgagtagctgggactacaggtgcatgccaccatgtctggcctcatttcattgttattttacttcaaatgttttattttaaatgttaaaatatatgtttttatattggaaaagtgaaaccctatttgatcacagcagactttaaaatgcacagacagaaacatcacttatgcctttctttaaaaaatcactgctattatattgttgaacctctgtagactgaagtgcaaatggtggtccctggagctgtcttgtgcagtggtgctcattttcattttgttattttctgtatatatatatttatatatgctgtcattttacaaagttgcattcatatgttatgggttatcttggatgttgctttttgaatgtattattatacaannnagttttnnnntgttataaac

SEQ ID NO: 1839 - DNA, 713 bp, Macaca Fascicularis
tatttataattatccttcaaccttttatgattggaagatgttgggaattgcgttgaagacatacagagaaatatgtggaaaaatggggcatatggatataacaaagagatttactccacttgcttctagcttagatttctgatacctttcctcacaaactgtttattctcattttaaaaattataaacttacatctggaattaaagactttttgtaaactacaatacatgaaaagaaaatgatcaaagtgtaaatacacagcattaaaaattgttatgtgcaaataggtagctatcatacagaccaagaaatatgatttcggcagaattccagaaatatctcccgccacacccacatgtctcttcccatcatcagttcctccatgccacagtaatcatgactcacttttatgatcatcactatgcacgcctaaatactgactttttgaactttctctaaatggcatcattgaatatatatcttttgtgtctgatttcttttattcaatcttatgtttttagaatttatccatggtgtggtatgctatgatgcattcattttccattcattttcattgctgtgttaaatttcactgtttgaataaatcccaattacttattcattttattatttatggacatttgagtagtttccagtttggacctcccctgcccctcactttttcagtcagtcttgttgctctttagtaatgc

SEQ ID NO: 1840 - DNA, 770 bp, Macaca Fascicularis
  misc_feature (1)...(770): n = A,T,C or G
gtactagaaatgtagaaannnnnnnnnnnnnnnnntcccaattacacattggtcagtgggaaaactgagaaaggnnnccaacaggcaaattcagggagaggtaggtttnnnnnnnnnnnnnnnnacttaatattagtggtctttaagtannnnnnnnnnnnnattggtttgggaggggcagtgataatgacttctgaaacaaaatttggatttccnnnnnnnnnnnnnnnnnnnnnnnnnnttacaagtctaacaggagataggagagagtcactcataaaaaatgcaaattgatgaacatactattgtgaaacattagttgaatggatgaaacttttttnnnnnnnnnnnnnnattcccataatgatgaatttgtgatgagggataacctggaagtggtattcacacattatgctacaataaaaggttctaccgtggagaggattttgacacattctgtaactaatggaacacaccgtcaacatgaatttgcaccttacatgacagaattgattcagggattcctatgaatagaaatgctgagaaggaacgcannnnnnnnnnnnnnnnnnnnnnnnnnnnnnnnnnnnnnnnnnnnnnnnnnnnnnnatgtttcttaatcctgttaaatgtttgattgtttggaatatgttattgtaaagatgtcatgcagtatatgtgtatattgtctgttgtaaaatgttaacgaatactttgttcagggctcactttctctttgtcatgaaagccagctccttgtggcgaggtaa

SEQ ID NO: 1841 - DNA, 767 bp, Macaca Fascicularis
  misc_feature (1)...(767): n = A,T,C or G
tagacagctatagataaagaattctggttagttaattgaacttttgtgatgtatttaaaaacaaatcatatttattgaacaaatggcaaggnnnnnnnnnnnnnnnnattgtatttaagttttgaagatttttttaaaaagtgaaaatgaatatatattagtatcctctattttaaagtcaattgtaaaccagaagtactgttattttggtgattaaaatccaaaactttagctgtatttcagtaacaaaaacatatcttactagactgagtgcgatggctcacacctgtaatcccagtgctttgggaggctgaggtgggaagattctttgagcccaggagttcaaggctgcagtgaactctgatcgcaccactgaacttcagcccggatgacagagagagaccctgtttctaaaaccaaaacaaacaaacaaacaaggtatcttactgactaaactggaatggaactcataattagtcttgtatttttccacaaaatagtgaattggtacttgggagacttctgttttttgttgaaaaaattgcttttgttttcaaattatatcacctgtgttctgaactaaaatgatgggagttcattttgtatttactttgcagtatatatcatgtaaatatgcaaatgttgaatgtaatgtagattgtgtcctcattgagtttttgggtgatacagtttataaatataccaattatataccctcatnnnnnnnnnnnnnnnnnagcttgtaacatgagaactgcttttacaca

SEQ ID NO: 1842 - DNA, 2679 bp, Macaca Fascicularis
tacttgataatcagaatgcaggggctgcagaacagaacactttctcatgtccttctcagattttaagaacactcaagactttactgatgaaaactcaggaaattctctatcacaaagaggtttggcaactaaactaagacattaaaaggaaaataccagatgccactctgcacgttgcaataactactatttactggatacattcaaatcctccagaatcaacggttatcaggtaaccaacaagaaatgcaagccatcgacaacctcacgtctgcgcctgggaacaccagtctgtgcaccagagactacaaaatcacccaggtcctcttcccactgctctacactgtcctgttttttgttggactcatcacaaatagcctggcgatgaggattttctttcaaattcggagtaaatcaaactttattatttttcttaagaacacagtcatttccgatcttctcatgattctgacttttccattcaaaattcttagtgatgccaaactgggaacaggaccactgagaacttttgtgtgtcaagttacctccgtcatattttatttcacaatgtatatcagtatttcattcctgggactgataactatcgatcgctaccagaagaccaccaggccatttaaaacatccaaccccaaaaatctcttgggggctaagattctctctgttctcatctgggcattcatgttcttactctctttgcctaacatgattctgaccaacaggcggccaagagacaagaatgtgaagaaatgctctttccttaaatcagagttcggcctagtctggcatgaaatagtaaattacatctgtcaagtcattttctggattaatttcttaattgtcattgtatgttacacactcattacaaaagaactgtaccggtcatatgtaagaacaaggggtgtaggtaaagtccccaggaaaaaggtgaacgtcaaagttttcattatcattgctgtattctttatttgttttgttcctttccattttgcccgaattccttataccctgagccaaacccgggatgtctttgactgcgccgctgaaaatactctgttctatgtgaaagagagtactctgtggttaacttccttaaatgcatgcctggatccgttcatctattttttcctttgcaagtccttcagaaattccttgataagtatgctgaagtgccccaattctgcaacatctcagtcccaggacaataggaaaaaagaacaggatggtggtgacccaaatgaagagactccaatgtaaacatattaactgaggaaatatgtcaatctctttgcgttcagaactcattaaagcaaagcgctacgtaaaaatattaactgacgaagaagcaactgagttaataacaatgactcttaaaacaagtaatagaagatttacaaaagcaattttcatttacctttccagtatgaaaagctatgttaaaatatagaaaactaatctaacctgtagctgtatagtatcaaaacaaatgacatccaattggcatgctgcatgcaaaactacacagaattcacgttttgcagagttttgccaaaatgagtagtcatataatatctaccgtaatgtttaaaatacattattgctcacgattttatttcttcataatcaactaaggaagaattatcaattggatacaatcttcttacaaaaaatgacacttaaaatgtatatatatcctagcccctaaccaaatcctgacctattgggatacttataaaaatttgagtaagtgggatacacaaagaataataactattaactttaaattatgagcaaaaacctaagggttaaatttaaactaattgaaactgtatttgattggacttaatttttttgtttattaagaagacacttgaagaagacctttacaataaagagaagaaatatcaaagtcattaaaataaggagagttacttttatgatattctaacactaaacaatatagaaatatttccttaattctagagaaactagttttactaattttttacaacctcaataataccatcattgacacttacctttattaactagcttctagaaaatacctgctaattaggttaatgaacattttatgttagtgaaaaaaattaattaaatatgattacaaagttgcacagcataactactgaaagtgattgatccatttgtaattatttgtttgtactggtgtgtataaaatacaaaatttacattaaactctaaatcaccctttggtgtaaattctttgttgaaagatattagataccatgacacaccttaccatatacaactacatcgaatccagttaagaaagaactaatgccaacacttttattacatgttattgtgcaaagtctcttctaaagatgacatctcatttcaataagttcaaatgtaaatgataaaacaggtcagacttatgacatgcagtctaattccacacaagacatattcgctattttaacataaacaaaacatataacacatgtggaagtttacatcacttatctcaattttgtatgatcctcagaggtgactctcaaaggaggaacagatatcaacacctaaatataatgccagaagaaataaaagggtgtattgttgtataaagttcactgaactttaataataatcacttttatcgaaaaaaaaaaaaaaaaa

SEQ ID NO: 1843 - DNA, 702 bp, Macaca Fascicularis
  misc_feature (1)...(702): n = A,T,C or G
tgtcagaatgannnnnnnnngatggctccacgcatttcccttcgtggaaaagggcagcaaacgaacctctcaaaacccacagagaataagggaaggcagcagagggtctccaagggcatcactgggtctgctggcttctacactgggttctgctactccccagacctcagggacaactgccgggggttcagggttggtagcagggtacccagtgcctgcagggctgggcctgttctgcctcttggccctacgcccnnnnnnnnnnnnnnngcaagggaagagtttgcctgtacccttatctgggtgccttaaggagagagattgtgttcctcctctnnnnnnnnnnnnnnnnnnnnnnnnnnnnnnnnnnnnnnnnnnnnnngttcttttgtcttaggtttcttttcctgtccctcttcccatccccgagatatgatcccataaaaatatttcctgagttggccagacgcgatggctcacacctgtaatcccaacactttgggaggctgaggcaggcagatcacgaggtcaggagttcgagaccagcnnnnnnnnnnnnnnnnnnnnnccatctctactaaaaatacaaaaattagnnnnnnnnnnnnnnnnnnnnnnnnnnnnnnnnnnnnnnnnnnnnnnnnnnnnnnnnnnnnnnnnnnnnnnnnnnnnnnnnnnnnnnnnnnnnnnnnnnnnnngccg

SEQ ID NO: 1844 - DNA, 776 bp, Macaca Fascicularis
  misc_feature (1)...(776): n = A,T,C or G
ctacctctccccanaagaatgtgaggcattgtcaccttgttacagctatgtgaagcagagctctcacaactcttcctnnnnacaggcaggaaaaccaggatggagaagggcgagttgcttattaggataggagtgatcagaaccagtgaagtttccatttttcatccattgctgccctgtgtgtgaacaaatgtgactccatgtttattatacagcaaggactgctgtgcgtgggtgtgttcctcagaccatctctactctttggttaggacactaggttcttcccagcatatgagtgagaatatcagtggcattttgggctcctctactgcacaagggccagtccccaagtctactctgattgtcacgggcacccacacagatcaggacaccctttgaatttttgtttgacatgaactatttaggtgttccaaaaccttggaatctcaatgtgcaaactccttggactccagacccctgtctggttggcactcccagaagcatgtggtttcnnnnnnnnnnnnnnncagcaggggtnnnnnnnnnnnnnnnnnnaggtgggaaacctccgtagcatcgaaggccagcctgcatctcgcggtgtgtgtccacttctcccctcactttcccctcacccattcttttaaagtgattggctgtgaggagcacagagggtggcaattccatctgttatgggctcagaagacatagccgccnnngttgattcacattaaactgtgtaaaatgtggaaaagactcagcatgttggtcaaaca

SEQ ID NO: 1845 - DNA, 708 bp, Macaca Fascicularis
  misc_feature (1)...(708): n = A,T,C or G
ctgtannnnnnnnnnnnnnnnnnnnnnnnnnnncaaccaatgcatttcctggagaatacatcnntactgtctttgacaannnnnnnnncaatgttatggtagatggaaaaccggtgaatctgggcttatgggatacagctggacaagaagattatgacagattacgccccctatcctatccnnnnnnnnnnnnnnnnnnnnnnnnnnnttcccttgtgagtcctgcatcatttgaaaatgtccgtgnnnnnnnnnnnnnnnnnnnnnnnnnnnnctgtcccaacactcccatcatcttagtgggaactaaacttgatcttagggatgataaagacccgatcgagaaactgaaggagaagaagctgactcccatcacctatccannnnnnnnnnnnnnnnnnnnnnnnnnnnnnnnnnnnnnnnnnnnnnngtgctcggcgnnnnnnnnnnnnnnnnnnnnnnnnnnnnnnnnnnnnnnnnnnnnnncagtcctctgcccacctcccgtgaagaagaggaagnnnnnnnnnnnnnnnttgtaaacgtctgagcccctcgttcttggtcctgtcccttggaacctttgtacgctttgctcaaaaaaaaaaaaaaaacggtggagccttcgcactcaatgccaactttttgttacagattgnnnnnnnnntaaaaccattnnnnnnnnnnnnnnnnnnnnnnnnnnnntgt

SEQ ID NO: 1846 - DNA, 113 bp, Macaca Fascicularis
agtagcagtaattttaataatctacatgatctgagaggcctaggcttcaaaacgtaaagtactactaatcgaacaaccccttactaacctggaaagactaaagggctgccccc

SEQ ID NO: 1847 - DNA, 684 bp, Macaca Fascicularis
  misc_feature (1)...(684): n = A,T,C or G
gtgtgtagcgccngnnnangggggggatacaagaggaggagtgagcactggaaatacttnnnaaagaaaaaaaaaaaaacatgaaggaataaaagaaattcctatcaaaaatcaaagcgaaataatannnnnnnnnnnnnnnnnnnnnnnnnnnnnnnnnnnnnnnnnnnnnntaatttatttgagggcagagtgtaaaatttaattcaaaatggtggctataatcactacagataaatttcatactctttcgtctttggagattccattgtggacagtaatacgcagttacagggtgtagtctgtttagattccgtagtttgtgggtatcagtttcggtagaggtgcagcatcgtgnnnnnnnnnntaacaggtaccacttctgatcaccctgtacatacatgagccgaaaggcacaatcactgtttcagagttaaaattattagtgtgtttgnnnnnnnnnnnnnnnnnnnnnnnnnnnnnncagtcaccacgaggagagaaaatttaaaaaataaaaataaaaacaaaaaaaattttaaaaataaaaaaaaacaaaaacaaaaaaagtctaataagaactttggtacaggaacttttttgtaatatacatgtatgannnnnnnnnnnngtttttatattaattttaatttgctgctaagcaaagactagggacaggctaaa

SEQ ID NO: 1848 - DNA, 716 bp, Macaca Fascicularis
gggtgatccccacattccgtgtcaagttcctgctgcggctgctgcgtgggaggctggaggtggacctggacaaggacaagctcctgtttaagcacatgtgctacgaaatggagaggctccacaacggtggcgacgtcaccttccacgacgtcctgaggtacaaggcaggcttttgcagggttgaacggggccagaaactacagccgtcagccttcaaggcctctgcagtgtgtttccaacccaaatgccacatctgctgtggtcgtgaagcggggtcacatgtcccaggtgctaagtgccctttcccgctgccctccagtgatcatttccaagtaggtgcctcgcaggggagggctgggcagccatgccctgacgtcccacaggggcccctgcccacggaggtgctccctgagggaagaggttgaagggatctgggagagcacagttccaccccttccctatgatgtgggagctgcccggaagagctgaatgacttgcttgtggttacagggctctggcaaagctgggactaacacgtagagtgcctcacttgcacaggtctgataagaattcgcctgacctgctctgtgatggttgccccattggctaaaacaccagattttccacacatttcatgagcacccagacaggacagagggtcaaatggagtctctgccttttcttctccctgggagactctgtatttgtttccttgg

SEQ ID NO: 1849 - DNA, 1226 bp, Macaca Fascicularis
  misc_feature (1)...(1226): n = A,T,C or G
atgtcatgtctctncnnacagagggtggaagagcccgaggatagacttgagtgccgtgatggctgcggtccagttttgtgattctgcttttacgtgttacttggtaacagtcagctagacacactcaggaggactactgaggctctgcgaccttcaggacctgagcctgcctctctcctttagatgacagaccttcatctgagaatgtgctgagccagcaccctcagatgatttccctccaaactgctgactaggtcaccctctgtctggtagagacattgacatctttgcttttattctataccctcggtacttttgaccaaaaaatgaccaaaataagaaaatgcaactttaaaaaatagactaaggatgcctttgcagaacaccaaagcatcccaaggaaccggtagggaaatgatgcctgtctcctggggtagaagaggcctgctccctggctctgggtctgctgggggcacagtaaatcagtcttggcacccacatccaggtcagagaggtctgtggttctcagcatcagaaggcagcgcagcccctctccaggctacagggttgtcacctgctgagtcctcaagctgtttggcctctctggtccgtcttgggcattagattctccagcagagctctggccagctgcctcctctttaactgggaacacaggctctcacaagatcagaacccccactcacccctgagatcttatctagcaagcctgtagtattccgtttctgttgtaggaagagcgcgaggcatccctgaattccatgcatctgctnnnnnnnnnnnnnnnnnnnnnnnnnnnncccgcgcccccatgcccctctgagtcacacgggacagaggaggcagagcttccgcccactgttatcttcaatttctttgtccagtcttttgtttttaataagcagtgcccctccccactcttctttttaatgatttttgtagttgatttgtctgaactgtggctactgtgcattccttgaataatcacttgtaaaaattgtcagtgcttgaagctgtttcctttactcacattgaagggactttgttggttttttggagtcttggttttgactccaagaacagagtcaggaagaccccaagcatagacttgggtaccgtgaaaatggctgcagtccnnnnnnnnattccgcttttatgtgtcccttgataacagtgacttaacaatatacattcctcataaaaaaaaa

SEQ ID NO: 1850 - DNA, 2372 bp, Macaca Fascicularis
gaagaagaagtatgttattttttttttccacttattcttacccttaatcgttcgtagcttttatataaaatgtgatttttgtggctgtgattttaacataaaacttttattcctgacccatagtccaggcaggggatatcagataaatgcaaacaactttaaattttctggataatgagaagaactgtggattgctaattcaaaaagaatatatgaaaatcatatatatactccatttttatttacccttagagacaataattattcattagctttttatccacaggaaatcttgtaatatcttaagttttagggtaatctattctcagttgctttattaacatttcaactttcctttattttaattcatatatcattttagtcattagaatgaatgcctgttatatggtagataactgtcataggcacaaaaatgaataagacacggtccctatctatcatcaaggagcttataatctgaaaaggggggtggtggcagacacataagaaactagttacaataaaagtcagactgataacgctgaataaagatttgaacaacatgctctggaaactcagaggaaggagtgattgtttccatcccggaaaattttaaaggaggtattgacagtggaactgggccctgagcaataaaatagctttcataatctagaactggagctgggaatataattgagaggtattttagatggagggataagcatcaggaaaaatggaagtgtgcatttttctttgagtaacaacaattagtctgatggctaagaggtacgggccagtgaagtggtagaaccctttgaaagcaaaaacttaaaagtaaacaactcttatttaatcaccaaataaactttaggagaaagtttaacttaagaaataaaggtaaggtggggaaactaaatgattccatgttttaccttcatagtggcacttcattttgtttgaagagcatttcaaggctgttatacatatccatagtcaaatgcaagaataaaaatgtatattttgaaactcatatacatgatttgtcattttatattttagattatacctttgtccttccatgagtttgaattgaatggggagaaaagcaggagagctcctggtattaggtattttgaaaagtttgaaatagcagtctgagaagtgtttacgaagggaatggggaaaagaaaggaatgcaatattagaaaatgtttgttgcatacagcagaaaataaatataaatataaatcctggtagaattttatacaagtcattggttgattttagtattcaaggttaggagggtaaattagagaaaacttactgttttcttttttaaaaaagtttgaccaatattttaaagttacagaagatggcataatttgctaaagagaggcaggaaaaaatggcatgtacaaaggcttaatttgataatttgtttagtgtgtttcatgcaagcaatagaatagatcatatagagaaaccatcgagtggttaaatgtcgcttttccttgttttgtgaatgttctagctataaaaatgccttttgcattcaactctgttgagagagatcagtatttaaaagtgtcaccttttttttcttttcttctttttttttgggtaaattcctaaatacattttaacctaaagtttcaggaagagtctttggtggatgactcattacttcaagatgatgatgaagaagaagaggacaatgaatctcgttcttggagaagatgatttgactgatcattgatctacatatgctagaactctacctgtgtttcattagtattatctaatgtacttttacatatttgtaaaaacaatttttggtaaaatgtgatgaagatgggtttcacaaatagacaaaaaagaagaaaactaccttctgatcttgtattttgaaagattgatgtttgcattttatttcagtaaacaattgctaaagacatcacactagaaacatatgcaatgtttttattacatacttctactggacattacagaattctttgggttctttgtaatttaatgaataggtctgaaaacttatgaccaatacttgttataacttagaggattttgttttattccaaataaggaatgaatttgcatttaaaatcttaatgaatgttttcaaaactgaatagataacatagtactctaactaaagtctccaagttatgtattataatattacatagtagtatgcttaggctttactatgtattagccttttgttggactgtgtatgtattttaccatatgggttttaatgataatggtgtatgactgctttacatgagtccttatgcatccggatgttataataaagtggaatggtctcttaaaaaaaaaaaaaaaaaaaa

SEQ ID NO: 1851 - DNA, 667 bp, Macaca Fascicularis
  misc_feature (1)...(667): n = A,T,C or G
caannnnnnnngagagcaatgccnnnancaccccagggtgccatggtcccaggagagtccaaacctatcaccacctgttgggtatagccagagcttttcccacccagtcagggcatgnnncagcaaccccccacatgtgaacccatcattcctaaaccctgggtgggctctatgccaagtaacggcagnnnnnnnnnnnnnnnaggaatttggctgtggagtaggagggnnnnnnnnnnnnnnnnnnnnnnnntgaccctaccagagtttggaaaacaaacttgggcagccggagcacgtcactattctagacnnnnnnnnnnnnnnnnnnnncctttgaactttccaaagtgcagccacaaatacaatgctgttaaatcctcccacattcttggatgccccttcaccttgtgtggacagtatctggtttctccattttacggacaggaaaactgagcttcagacagaggataggttttggccaaggacacatacatttggttgagagctgatggggccggannnnnnnnnnnnnnnnnnnnnnnnnnnnnnnnnnnnntgcagagtccctgagcccacctcccagccctctcctcattctctgaacccactgtggtgagaagaatttgctccggccaaattggccgttagccacctgggtccacat

SEQ ID NO: 1852 - DNA, 798 bp, Macaca Fascicularis
  misc_feature (1)...(798): n = A,T,C or G
cccagcccaggacggtatcagtagcttcnatnnncttnnncctcactggtatgggttcagagcaatgcctagagccccnnnnngntcccctgcctagtggggtggtagtggctacctctcagccccaatagtccctgctcctcttagaatcttcaccaagtggcaggccacctctgggcgggaccacctgcgtgtggcacccaggaggtgaggcagacaccatggttaggtgtctgaacccagttggggagacagaggggttcagacttgggaagaatctgtcagtgtgcatggagtgaggtgtgtgtgtgtggatggatgtgcacgtgtgcatgccttttttctttttgccatgaggacagttgaatttggggcgtttttctacaagaagcagtcagccttctctcccccgtaaggactggctgtaaccttaagcccatcaaagttacttccagcctggagagaacctcaccaaacagctggtgtggcctgagggtggtcatggtgggaaatgggcatgagaataaatacctccccaaattcaatctgagcccagcaggagaggatggtagggttgccagggctcagaagtgcaagctggttccccaccccaccccgcctcaccgcacttttcctttgtttccttgggtgaatgcaggagcagcagtggctgcccttcccacctggacagtggtgtgtgtagaaagccannntggatgtttgtggtggggcctcatggtgcctaggaggagataaagatgaggaggtttttccttattgtataanngaaacgcccca

SEQ ID NO: 1853 - DNA, 1979 bp, Macaca Fascicularis
tttatcattccactgttacagctttctattcctggctctgtctccaacatcctctctcacataccttttgagaccttgagcccaataagcttagcagtgacattgtgtatgtgtgttgtctttattaatcctagcagagcacgtgagggattttcagtagatggtttttgaattaatggacatgtgaaatcaagaatagaggtggttgggactgctcaaatatcctatcttttcccaaatgggaaaaggagaattggaaaactaatgtgagatgagctggaattttcctaaggtctgtagaattctgagatcttcctgcaactttccactttcatgtcctgccatcttcttatgccatgtgcaaaattgtttgaggctgagattggcttcgtctctttcctcttcaagtttctccgtggggtgtgtctggaaggggagtataactggattttctattgttatagctgtctggtttccttcccagagttcctgagattgattattgatgacttttttaaacatttttgaatggttgtccatttctccttctacttcttgatatgcttctttcttctctgtttattccctgcaagtcagtggggtttagaaaggtctgaagttgaagaaaggtaagcagaagaagaacctattcaatgtgactctctttcctcccccttattcaccaccactaactgaagcatatcttttaaaaagacttgaagggacatgtagagaagtttctattcttgcttttcttataaaggacagctttggcatttttttcatttaatgtctgtaaagcttctctgcataagtaccatgtgaaacacagagattagtgttgttaatttaatgcagtaagcttagagtctttataagatatcatctccttttgaactttatgttcaaatcagtagagaccagaacagagtttttcagaagaatattaactttcctacttcataaattaagcaaatagaagggccagggaaaaaaataaatacgtgggctcatacactggcataaatcatcctgatatgtaagagagtaggtatttttaatttgttcttttctctcataaactgttggggaaatcaaatgaacttgctgtacacataatggatacagtaatgtggggagatgatccgttgcaatgatgcatttgggtaggctctaatgaagtaaagactcaacttattgatgacaaaaagaaaacaatggttatgtataaagtatcatatatcttctcatcaagctgtcccactgaatgagagatgcagtgttacttacgtaatgcattatgttttcatcttttaaaaaggaacaaagctgagacatttccacttgatttttatgcattctctttcaggtaacttcttaacttggcaccagtagaatgtttgaaaggaaactaaaattcttatataggcaggagcaacagagaaatccttgcaggaaaatgtcagccaaggaaaataacttggctttagtcactgattttttttatattaatacatttatatttcttgttatgttttattaccgcagatattaaaattagtttccaccctcctaggtttacaataattgaaaatgacaaaaggccaaagggacgccatgtatggtcaggggaaggatgaagggttcaggggatatagtgagttggctgcagatgctcctgcaagtgggaaataaagacctggataacagagagaattctgtatccagcatagttggagccccagcacaagttttgccaaatgcctgatacgcccttatgatatgccatcttgttcgttttctgacagtacgacacaatgctcctaaaaaattcctttttggaaaggccaactggctgggtgcctactagtcaggtgtacttggtttgaaatgttcctacctgtgcttcttagagccttgacttattttagctttacatttgtgttgattaacttttacaaaaaaaaaaaaaaaaaaaa

SEQ ID NO: 1854 - DNA, 774 bp, Macaca Fascicularis
  misc_feature (1)...(774): n = A,T,C or G
ttggaatagtctggtcaagtgtaatgagcactgtggaatggaacaaaaaagaggagcttgtagcagagcaagccatcaagcacttgaagcaatacagccctctacnnnnnnnnnnnnnnnnnnnnnnnnnnnnnnnnnnnnnnnnnnnnnnnnnnnnnnnnnagtattgctatgacaacattcatttcnnnnnnnnnnnnnnnaaaatagtggtgcttttttataaagctgaagtcctgagtgaagagcccattttgaagtggtataaagatgcacatgttgcgaaggggaagagtgttttccttgagcaaatgaaaaagtttgtagaatggctcaaaaatgcagaagaagaatctgaatctgaaactgaagaaggtgactgaattttgaaactacaccctcagtaaagcaaacaggagttgtagataaaatgtcatgtctcatgtgtcctggttcttacatcttcctacctccctgtatcaagcatgatataagggctttcatggcaaattttattttaactgtttctatggttgctggaaatgttgggtttagtttctaaaaccatgttttaagtagctacaggagctatagatttgaatctaatgttgcattagtcttttcagttatcttctacctcctgtattttctactgtaataatgtaatttaaggacttccacaatgaacagttcactttattccctgggttttctannnnnnnnnnnnnnnnnntgatttggttaaaaaataatttgttataaaaattctgttgc

SEQ ID NO: 1855 - DNA, 717 bp, Macaca Fascicularis
  misc_feature (1)...(717): n = A,T,C or G
tgtttgagtgtgaatggggtatatgtgtttgtgtgtctgtgtgtgtgctcattcatcatgcnnnnttccatggtgttaattcaagctctcctaataaaggcatccaaagagtactgagaagttgaccataggtatttggcatgagtaaatctggttccttttgccaaaaactctcaaagctacagctggagttcttcttgataaaaggttggggaaatcggccatggctttagccttgttcccaagtacacatcttcttatccacaaggatgaaactctgtagggctctccctgagggctcatgtgtggcactgggagggtagcagtgaccagaacaccacaaggcccacaagatgttttgaatgagggaacatttaatgtcatttgttaggagatagaaaccaaataataaaggacaaggaccatgctcattccgtggagaagaggtgaactccctctgctgactatttggaatggactgaatgaggaggtctccccagccagaaggaatattgaggtcatcaggcctcggaaaacaatgtacacataatcttgggctgtgaacaagagaaaggagggggggaaaacatgaaagtcaatcttaacaatgtttgcgatacctcttatttgcagaccattggattgatgttattgcactcttggtgtgatttatcgtatgtatctgataagttttatgaattgttttgagttgtaaac

SEQ ID NO: 1856 - DNA, 727 bp, Macaca Fascicularis
  misc_feature (1)...(727): n = A,T,C or G
caaaacaggagctggggannnnnnnnnnnnnnnnnnnnnnnntgaggggtggcattaggaacttacgaaaccagagacctttccctatgaactagcagtatgtgaatatcctctacacttagttactgataaacttcttaaagagatctgttattttcaggtagtgccgtaatctgcgcttcgnnnnnnnnnnnnnnnnnnnnnnnnnnnnnnnnnnnnnnnnnnnnnnnnnnnnnnnnnnnnnnntcattaagtaagttgtgaaatttctctaattaccaaggcagtccacattcttccctttcccccaaattccgaggacaaaacttttttatggtgctgttaacgtgggagtcacacaagccgcctgacttttcctcatcnnnnnnnnnnnnnngtgatgggaaacccagccacnnnnnnnnnnnnnnnnnnnnnnnnnnnnnnnnnnnnnnnnnnnnnnnnnnnnnnnnnnnnnnnnttctacttgttgttccaagatgagcctctnnnnnnnnntggcaatttaatataccccccacaaaannnnnnnnnnnnnnnnnnnnnnnnnnnnnnttgagttataactagtatttttcatgttttcattaaaagaagttagtgacccannnnnnnnnnnnnnnnnnncaactcatnnnnnnnnnnnnnnnnnnnnnnnnnnnnnnnnnnnnnnnnnnnnnntttctaaagcttttgggcactgtgt

SEQ ID NO: 1857 - DNA, 3289 bp, Macaca Fascicularis
taaaagtagaatccaggggaatattggtgtgcaaatgttggttgatctcagccagtgctacttagggaaagaccatggatttcatactaagttgataatgctctttcctcagaaacttagacctcgattattgagcagtatacttgaagaacagttagatgaagagactcccaaagtttgtcagtttggagcgttgtgttctcttcaaggaagattgcagttactctcgtcttctgaacaattcattacaggactaattagaattatgaagcatgaaaatgataatgcttttctggccaatgaagaaaaagccataagactttgcaaagccctaagagaaggactgaaagtgtcctgttttgaaaagcttcaaacaacgttacgagttaaaggttttaatcctattccccacagcagaagtgaaacttttgcttttttgaagagatttggtaatgcagtcatcctgctgtacattcaacattcagacagtaaagacatcaacttcctcttagcattggcgatgactcttaagtcagcaactgacaatttgatttctgacacttcatatttaattgctatgctaggatgcaatgatatttacaggatcggggagaaacttgacagtttgggagtgaaatatgactcttcagagccatcaaaactggaacttccaatgcccggcacaccaattcctgccgaaattcattacactctgcttatggacccaatgaatgttttttacccgggagaatatgttgggtaccttgttgatgctgaaggtggtgatatctatggatcataccagccaacatacacatatgcaattattgtacaagaagttgaaagagaagatgctgacaattctagctttctaggaaagatatatcagatagatattggttatagtgaatataaaatagttagctctcttgatctgtataagttttcaagacctgacgaaagctctcaaagcagagacagtgctccttctacgccaaccagccctactgagttccttgcccctggcctgagaagcattcctcctcttttctctggtagagagagccacaagacttcttcaaaacatcagtcccccaaaaagcttaaggttaattctttaccagaaatcttaaaagaagtgacatctgtggtggagcaagcatggaagcttccagaatcggaacgaaaaaagattattaggcggttgtatttgaaatggcatcctgacaaaaatccagagaaccatgacattgccaatgaagtttttaaacatttgcagaatgaaatcaacagattagaaaaacaggcttttctagatcaaaatgcagacagggcttccagacgaacgttttcaacctcagcatcccgatttcagtcagacaagtactcatttcagagattctatacttcatggaatcaagaggcaacgagccataaatctgaaagacagcaacagaacaaagaaaaatgccccccttcagctggacagacttactctcaaaggttctttgttcctcccactttcaagtcggtgggcaatccagtggaagcacgcagatggctaagacaagccagagcaaacttctcagcagccaggaatgaccttcataaaaatgccaatgagtgggtgtgctttaaatgttacctttctaccaagttagctttggttgcagctgactatgctgtgaggggaaagtctgataaagatgtaaaaccaactgcacttgctcagaaaatagaggaatatagtcagcaacttgaaggactgacaaatgatgttcacacattggaagcttatggtgtagacagtttaaaaacaagatatcctgatttgcttccctttcctcagatcccaaatgacaggttcacttctgaggttgctatgagggtgatggaatgtactgcttgtatcataataaaacttgaaaattttatacaacaaaaagtgtgaaggcatttaaggggaaaaaaaagaggtagatcttgaatgtgttgtagcacaaatataaattgctgtacttcattaagcttcattgccagttagctaggaattgtgaagcacattgcagattgctctgggagaattctggagttgttatgtgcatgaataccaacggaaaaccttaactgaatctagaagaaaagtattttgagatggtggtgagctgcaaaacaggtggatggatttgaatgattgggatggtacattattgagctgcactttctataaccaaagcttagcagtttgttagataagagtctatgtatgtctctggttaagaggaagtgaattttatgtttttaacatggtatttttgaaggagctaatgaaacactggacgtatcattgatttaaacataaggggaattaagtctttgtagtttgtcatttttttaagtggatcttcttggatgcattattttcttatcagctggctctgattatgaatttgttgcaattttatgtcgtactcagtgcatttaggaaatggtacagtattttaatcctgttacttgactaagagtgtgaaggtagtactttttagagtgcactgagtgcactttacatctttatttaaatttttttgacatcttttgtttacaggcttcctgtttcatgaagatagcaatggaaaactaaaaatggtggcagttcttattaccagatgagatgttagtattgttctggaaactgcttgccaagacaacatttattaactgttagaacacttgctttatgtttgtgtgtatatattttccacaaatgttataatttatatagtgtggttgaacaggatgcaatcttttgttgtctaaaggtgctgcagttcaaaaaaaaaaaaaccttttctttcaatatggcacttagtggagttttttttttttaactttaaaaacattaacaattgttaaaatcattgtgttatctagtagcttataatgatcagcttatatttctccatggtcagaactgacatttaattcacatttgtctcaccatacttctgtaacatagttctgtcgcagaatgtaaaagaaaggtaatgataattagtttatgtaagtgtactggctgtaaatgatgctaaatatattttatgcaattaagggcttacagaacatgttaaaacttttttacttttatcagtaataaggaatgtttgcacctccaccctgtattgcttctggatgcgaaaccatgtaattatttctgctgttatataaggtgccatacttttaataaagcaaaatgtacatatgaaaaaaaaaaaaaaaaaaaaaaaaaaaa

SEQ ID NO: 1858 - DNA, 1533 bp, Macaca Fascicularis
ttctcttcacttgtcccgagaggccattggaaatagtccaaagacccattgagggagatggacattatttcccagaagtaaatacagctcagcttgtactttggtacaactaatcgaccttaccacttgcacaatcagctagcaaaggttatgcagcgtgtgaacatgatcatggcagaatcaccaggcctcatcaccatctgccttttaggatatctactcagtgctgaatgtacagtttttcttgatcatgaaaatgccaacaaaattctgaatcggccaaagaggtataattcaggtaaattggaagagtttgttcaagggaaccttgagagagaatgtatggaagaaaagtgtagttttgaagaagcacgagaagtttttgaaaacactgaaagaacaactgaattttggaagcagtatgttgatggagatcagtgtgagtccaatccatgtttaaatggtggcagttgtaaggatgacattaattcctatgaatgttggtgtccatttggattcgaaggaaagaactgtgaattagatgtaacatgtaacattaagaatggcagatgcaagcagttttgtaaaaatactgctgataacaaggtggtttgctcctgtactgagggatatcgacttgcagagaaccagaagtcctgtgaaccagcagtgccatttccatgtggaagagtttctgtttcacaaacttctacactcacccgtgctgaggctgtttttcctgatgtggaatatgtaaattctactgaagctgaaaccattttggataacatcactcaaagcacccaatcatttaatgacttcactcgggttgttggtggagaagatgccaaaccaggtcaattcccttggcaggttgtcttgaatggtaaagttgatgcattctgtggaggctctatcgttaatgaaaaatggattgtaactgctgcccactgtgttgaaactggagctaaaattacagttgtcgcaggtgaacataacattgaggagacagaacatacagagcaaaagcgaaatgtgattcgaattattcctcaccataactacaatgcagctattaataagtacaaccatgacattgcccttctggaactggatgaacccttagtgctaaacagctacgttacacctatttgcattgctgacaaggaatacacgaacatcttcctcaaatttggatctggctatgtaagtggctggggaagagtcttccacaaagggagatcagctttagttcttcagtaccttagagttccacttgttgaccgagccacatgtcttcgatctacaaagttcaccatctataacaacatgttctgtgctggcttccatgaaggaggtagagattcatgtcaaggagatagtgggggaccccatgttactgaagtggaagggaccagtttcttaactggaattattagctggggtgaagagtgtgcaatgaaaggcaaatatggaatatataccaaggtatcccggtatgtcaactggattaaggaaaaaacaaagctcact

SEQ ID NO: 1859 - DNA, 690 bp, Macaca Fascicularis
gtgagattcagttgtctcctgtttcggcaagtaaagtgagtttactcctcctttctggctgtctcatatattcctttaaaaacaaacaacgcgtaccaacaaactcttcttcctttcatctgcagactttcctatctctccctgcagaaacaagcaattcaggatttcgtgtgtgatgcctagttaattttaacacagcgaatttaatgaaatcgctgaagagcagggcataacactgggaaggctttacaatttcataatatttcccgctcatatttgcatctgattactgccaccatgcattctgtgtgtacttcatcatctagtcattattgatgcactttttggaatgtgttcttggttgttctattagcataggttcctctgcattgtcacctaacgtcgttttcctggaagccatgaccatgtatgccttttcttcctcagtgatccttttactgcagtaactgctgttaaataacttctaactgcttttcattaatgaatgtataaaacaatctctggaatcctacaggacgatggtcttttgttatatgaagaaaagaaaaaacagtagcatttacaagggccagcaagttaaaatatatgtcattaaaatatgtttctatttcccatcatctggctaggctgtggtgctgactaacttatttcttgccagagaaaataagt

SEQ ID NO: 1860 - DNA, 735 bp, Macaca Fascicularis
  misc_feature (1)...(735): n = A,T,C or G
agttgggatgagggatggagagggactgggtnnctgggaacaggttgggggtcntatctgtggactgtctgactcccagctgaggccaagatggggcatgtcccggtctctgctcagcatctgggtgagaaaaacagactgtgatccagaggaaggaagatagagaaggagagaaaggatgtaggcaaaggaggtgagagacaggataggaggaaggaagtggaggaggaggtgataggaattggaaggaggtagaagccgtgtagaggaagaggggagagggacggaggagaagcgatgaagaggaggaagacaaaaagaggtggaagagagagggagtctggagaacaaagggtcctttctctggggaggggtgcggtgggtggggctgacgctgtcagccaatcctcccatcggggaagagaatcctggacagggatgggatggggagggtatttataagggctttttggtgggagatgggtacccagtgggggccactggagggtctcccggcacactctggcccttcccagaaatgggggccctttttctcgaagcttcaaccagttgtgtattaggggaacctagggggcattttactattgatcacagtcattatattgttattatattactatttttattaaacctcccccgactgaagtgtggggggcaaaataagtatttatctcctcaaatgccacattcccaggagggacagaccctgatgct

SEQ ID NO: 1861 - DNA, 637 bp, Macaca Fascicularis
ggggcatcgtgatggagctcctgaggactaggagggccgttttcttcataattcctacccagtttaggaaatgagaaaaggccctgtggctcgtctcctgactatattcactagttgggccttgagtttgagacacctggtagatgatgtacctggctgccctaccaagagatttgattagcttcttcccgtggtttcaggtgatagaacccaaaggtagctttttaattggagaattgagtaatcaccatatgtaagctcactagaaccctgtgttgaaaactgccaggtgtgggtataagaaaaggccgagagatcacctcctctcaccctaccccgcacccataaaccagacatgtctcccaggaagcaggtgtccctggagacaagagtatgacagggctctacaatctgtctgtgtaattatttgtgattttttttgtgtgtgtgtgtgtttatggggcccaaggaaggggccaggagaaggtacaccctcgctggggagaacaaagcagatggatccagttttctgtgtgttcttacctctgtacttcctcgtagctctgctgacaaatcaagcaggcctcccgtgtccaagaccccattcctcccacttgtgtacacctaggctggcaaa

SEQ ID NO: 1862 - DNA, 702 bp, Macaca Fascicularis
  misc_feature (1)...(702): n = A,T,C or G
ggtgataaaaagagaaccaaagatagggaagaagaaaagctcaccagttnnattcagcaaaaactaaacaactcacaagtgttcgcaagtagaaggcagctccgtccattttctacatgatggctaatacnnnnnnnnnnnnnnnnnnnnnnnttaatttccattgttcctttgtgatccccctcataaaggataaactgattagaattattaggaaaggaaggattaaaacaaacaagatcctagtaaagctcctaacctctgttttcattttctgaaggatagatacctaattgatttcactgaaagtataaaaaacaatatatttcccagaagtctaaccgannnnnnnnnnnnnnnacagaaaagaagtcctgaagtgataaaaatgtaagcccttgttttggcgttttaaaaaaatggtctcaattccacaaacatgcttaagtttctttgcaaaaaactgctgagatcaatacaaattcctttcaatgcgggccaaagtagaagacctgtcgcccaaattaattaacctttcctaaagaacaattggttttctgttgatttagcagtaatattgtagaacatttagctataatgtattttaatgtgatccttaaaatgtcaacaggaaaaaattcgttgaaaaacaaaatagcttaagtaagttaatagacattttatacatgtgtaaaaaatatt

SEQ ID NO: 1863 - DNA, 736 bp, Macaca Fascicularis
  misc_feature (1)...(736): n = A,T,C or G
catatagtgcngnnnnnnatgaacatagttgagtattgaagtgaattgaaaaagaaatgttacttcatctttccctaagcccatgggttacagagtgctatggaggcaatttggttacctgcaatggctgcnnnnnnnnnnnnnnntaccattcattggtcatcttggtatttgtgtattaatctcactttcctcagtgtaaaaaggaatcaagtacagatttcagaagtgctctgagattccccatacacccaaggctaataaacgtgtgccagtacagtgttcatgatacgtgccttggtgggagtctgtggtgccacagggaaggggctcccactgcttctggtctccaaggacagtgctgctggaaaggctaannnnnnnnnnnnnnntggagctcctcccgggacctttccatccagcatcttctcttagttgaatgccttctttctatacatttgttttcagaattattttataaggtcaacagtacttcacttgaattctttcttaatttacaattttttattataaaaatttatagccatacaatgggacacgtgaagagtacagaaaagtaaccactttaatgaagtaactattatcataatattgtatttcatgctagtcctttcctgtagatatttttaatgccattgtcaccttggatttgtgagtgaaaagtgtttctaaaagtatagaaataatatcagatcagaatctgatctatattgta

SEQ ID NO: 1864 - DNA, 739 bp, Macaca Fascicularis
agtggcccagccccgcagacccacaagccctccccgtgctgggcttgcttctgaggtattcacctcttaagagggaatcttccacaagcccagcacaagctgccaggcctgagctacttgaagggggccatgtaggtccccaactcatggactttgcctccattttcagctccaccttttttcttctattttctctctggcttccttcagccatgactcaaaacataaaacactggaggttggtggaggcccctccccaagcaagaagcctgggatgggcagggagtgatagccaaactccttggtcacctgctccaagaaggaagcagtagctgagccacctgccctcgcatactgctcttttcctcctctccctccataccagagatgtggtgagctctgttcttcttccaacccagtctcaacacacaaagtgccaccagcttccctaactcagaacccacatccactcaatgtgaactcttcactaccaagacctccccatgttcctcacttctgcatcgcctccggcctgactccctgtctgccctttcacccccaagattttgcacaggttaaggccagttatgacctttttgaaatctgtaatagctcccctttccccaactctaaagcctagaccttaaacctgttcctagagctatgcacacccctacccgtttaccattcctccctcagggcctccgtgacactccatgaaaagaagtccttgcatacc

SEQ ID NO: 1865 - DNA, 712 bp, Macaca Fascicularis
  misc_feature (1)...(712): n = A,T,C or G
gtactcccatccttttaccactaacctatcacatttgacaagttcttgctgtaatgacgaatctattaacgaacaccaggggagccgtggaaagctgccctcgtgtgtgagagccgtgcggtgacgcaaagccaccatcctgttgtttgtgtgtcctaagctcagattttcctggtttggataaattttgtaaaactgggcatagctgtacttttagaaagggattgttttccttaggttttggttttctctggttcaagcagtctttacatgcagacattttatagcacattagggtctcccttttcttttcaagatgatgttgctttccggtggtggtgtcacactcctttgaatgaatgtttgcactctagaaccacgaacgatgcgtgcccattgtacagcttgcccgagagggaactgttggaagcgggcggtgacctccgccctgtttgtttgaggctgacccaaactgctgtcactgatgtttaccccggtgactcagcgcccgttagnnnnnnnnnnnnnnnttcagttcctgtagtggggttagtaggtggggggttttactgttgttgttatttgttacttttattgctattaaatgcaaatattgctatttattttttcctttctgctctggtttggtttggccgacacagatattccagtgcatgtggtacctaatggatgtgatagaaatgattcccca

SEQ ID NO: 1866 - DNA, 1910 bp, Macaca Fascicularis
aagatgcttcagttaatcgtatctgcaaagtccctttgctacgtatgaaaacacatttacaagctgcagaaattaagatgaggacaaatttgggagccactcttttgcctatcacagggcaaaatggtacatgggtgatgatttgaaagcacagcttgcaacagagatgaagacgacaaggtcttgctacttaccactctgatgatggaaaacacagaaggaattgagagacatggtcaaaaagggaatgtggcaggagaagtttagctgagagaatccacagggctttgcatctattctgaggactgaggagtgaaattcaagaggcccagggaacaggaaccagccccgtgagcctctcctgcaaatgccgcttccagtccagacctgcttgccggccggctcttgtgtcagcacaccttgaactcctgctgtactcaatcctgccactttccaggcagcaatcagagtggcctcaggtgaccctaagctttaagttgaaataacctgtgttcaagttgaaatgacatatttgacggtagagggcaaattcaactacttctaaagcacaaaccctcaaattcatgccaaaggagaaccattctcactgcttcaagacatgtgaaaagcctgaaagctgaaaaaatacaactctgctgatttcagaaagattgcaacctgtgtcacaccaaggaggggttaaacctataggaggactacgtagaggagttgtcaggatgaccaggagatgcactaactgcagagtggctgtgggggaaagtcaacagcaataacagcaacaatgacaatgactttatagcatttctaaccacttccttgcatgccattctaggacatactttgaacagattatcatcatctccatctgcatattgaaaaactaagtaaaaatgaagaatgaacataaaactcatttaaggcttcctctaacttggtctgtggtctgccctactgtgttagtccattttcacaccgctgataaagacatacttgagactgggcaatttacaaaagaaaggtttaatggacttacagttccacatggctggggaggcctcacaatcatggcagaaggtgaaaagcacatctcacatggtggcaaacaagagaagagagcttgtgcagggaaactcctatttttaaaaccatcagatctcatgcgacatattcactatcaggagaatagcctgggaaagacctgcccccatgattcaattacctcccactgggtccctccaataacatgtggaaattcgagatgagttaggtggcgacacagccaaaccatgtcacctacccagccctatcacaggctcctggcatcaactataccctggcttcagggtgagaatggacggagaatcaatatgttgtgccaaacaccatgtctggaaaactgcctggaagacacagttgtcccaggaggaaagggtggatcttaagatccaagcagccttacgaaagaaaaggggatggaagacactacacactgaccaggtgccatataggttgctgtatgggatactgagcttggaagggaacagaaatcaaggagggagcttcgtgcatgggcagctcagtgagatgcctgcaacccagcttcactgcttaaaggccagatacacactctccgtgagagcctggagtgtggaacctcctctgctctagctgtccagaagctccagaagagcttccaaagctctgcggacctcaattcctcttcgtctcagctcctgatgtgcccctgccctggaattccttgctctcttgtccacctcaccaatgcttttccttcctactttgccgtccatctcacatggtgaaaagccacctgggtacccaggagcacaaaaaaaaaaaaaaaaaaaaaaaaaaaaaaaaaaaaaaaa

SEQ ID NO: 1867 - DNA, 712 bp, Macaca Fascicularis
  misc_feature (1)...(712): n = A,T,C or G
atggcagngacnnnnnnnnnnnnnnnnnncatttattaatcctgaagaaaagtatgtgtactatttttcagtataaatataatgaacatgttagaactatttcttgaaaacctttttattacttttgcgtgaatttatttaacaaagatgttttgtcttctgtgtaagggaggttctagaggctagatatttaattgtaaatatgtgaggaaactcaatgcagaattcaggataaaaattttaaaagcacaggtgtttgggaattgaaatgttaagatacccagaacaacattaaatcgatgagtgaacttgtgacagtggtagcatttcaaatttcaaaagacttatcctgtatatatatatatatacacatatatatatataatattcagcaacaccaagttttataactattgtttgatttattaatactagaatatgtagtctcagccttaattttacatttacattattttgtaattttttattactatttttaagggattaaagagaacatacattctcacattaatgtactttctggtagaaagttgctgcaaaaacatttgaaatgtatattaactcaacctaatgtatgtcatatatatgtctttgtgtaagttcaagactattaatctgtgaagttattttgtaaggacatacatttggtaagtttgtctcccaggaaatgtatgtgtttttaaaccctttc

SEQ ID NO: 1868 - DNA, 1961 bp, Macaca Fascicularis
ctgcagtgagccatgccaatgcggtttggctggactgtgagtgtttgatgcagtctgatgtgagggtgggggtggcgcagagaacgttgaaatcaaaaaggattctgctctgtagagacaaaggagccacagagacatagacgtggatctgggaaatacaccttttgctactcattcaattttagagagggggtttccggcgtggtgccgacattctcaagagggaagagcaatctggagatgtgttagatggtaataaagagtatgagtcatgcacagaagaggtgagtgagaggggaaggattgaagggtgcaatcatgaaagatgtggtcggataaaagtaagatttcagccaaaatttgaagcagttaatgatatcagacttggaaaaacattagaggaagaacacctcagggaatcggacacctcaggaaattaaaggaaagcatgtgtcttctaattaaaaatgcagcaatgattgacatatttataatcatatgttggtgtttttcctctttgacataatgtttaaattcatttttattgccatattcttttctgaaacaatgagccacttctctgtgattctcatagcagaggggttacaggaggacagtgtgctttgtaaaagtttatttaatattgaattttactttcttactatttattgatatttacattttaaaaattactctatttcataatgtaaaaccatggtaaaaggaggcacagtacacaaccttttaattttttatcaaatgacagttttagtaaaaatacttataaactcgaaggtaactatcaaggcagctacatttgtcttactaatatgtgtattcacttagatgtacttaactctagtaagggacctcccacatcgcccttggccaaagaatatttttaagaacgtgtcactttgtaccttcatggattcatttaaataaatatttcggggaactatcgtggagtgaattttgttctctaaaaagatatgttgaagtcctgacagtacttcaagatgtaatcttatttataaataagatcattaattaattagctaattcattaattagatgtaacatgtattaagatgagaccatactgaagcagggtgggctgttaatttcgtatgactggtgtccttacaagaagagaagaagaaatgcagagacacgcaggagagacactatgtgactatggaggcccagagatctgaatgatgcaactgcaagcccagaaaaatctagaactgccagcaaaccacagagactaggaagaggcaaagaaggagtctccccacaggtttcagagaaaggttggccctgctgacacctcgcttttagacatctaacctctaacatgaggagaaagtaaatctgtttgtggtgatttgttacgacagccccaggacactggtagagacacagggatgtgttcagggcctgttgtagacacttgcaacacatcagtaaacaattcagacaaagacttctgcaccggtggtgccgacattctcaagagggaagagcaaaacttaaacttcttcccctgagaattacaggaattacaggacctgacaaagctctaaagattaaaacctataggaagaaaatcggaaccagaaataatacggcagacttgggctctgattcacagagggaagaacttatcattcttcacggggcacatagaagcatgagaatttgggttcaagcaagtaaattctaaattagaacccatacataaagtgtttgcaatgtccagttatatctctatgatattttctttgtgaaagttgattgttcttccttacaataaattgcatgaattgtctgtctaaaaaaaaaaaaaaaaaaaaaaaaaaaaaaaaaaaaaaaaaaaaaaaaaaaaaaaaaaaaaaaaaaaaaaaaaaaaaaaaaaaaaaaaaaaaaaaaaaaaaaaataaaaaaaaaaaaaaaaa

SEQ ID NO: 1869 - DNA, 2078 bp, Macaca Fascicularis
ttttttatggtgctgtgtcctaaaggtgattctgaggggcattgcctcggatagttaaaaatcttatgtgtgcattagttgcttattctttgcctacttcctgtttgagatgttagtgaagaactgtcctgggtgaatctttaaaagcattgcagggcaacttgggaacttgctgcccaacaaaatacatcagaatttctctttaagaacaacatgggatgattaaaatacctctctgtgggacgaaattaggggtacttcaataccttgcatgccacccaaacattccttatcacacagatgcattttaagtgtaacaggaagcctaatggctactcgattttctttcccttcaggtgagaatgagatggtgatcatgagacctggaaacaaatatgagtacaagttcggctttgagcttccccaggggtaaatatcagctaaatgcatctttgaacttttctgtctaaaatatcttgccctcctttgatcacttactgttccttggagagcatttaaaaattttcattttcttgacacaggcctctgggaacatccttcaaaggaaaatatgggtgtgtagactactgggtgaaggcttttcttgaccgccccagccagccaactcaggagacaaagaaaaactttgaagtagtggatctggtggatgtcaatacccctgatttaatggcacctgtgtctgctaaaaaggaaaagaaagtttcctgcatgttcattcctgatgggcgggtgtctgtctctgctcgaattgacagaaaaggattctgtgaaggtaaaatcctagtgcttatggcagacagatgtaacaggaactaggtttaggggcaagggcataggactggggtagaggaaatgtcattaactatactgagtatcagtaagttttcatttttctctttgctaggtgatgagatttccatccatgctgactttgagaatacgtgttcccgaattgtggtccccaaagctgccattgtggcccgccacacttatcttgccaatggccagaccaaggtgctgactcagaagttgtcatcagtcagaggcaatcatattatctcagggacatgcgcatcatggcgtggaaagagccttcgggttcagaagatcaggccttctatcctgggctgcaacattcttcgagttgaatattctttactggtgagtagatgcagggtgggttcagcagagaaattgttcatctgttaccataactgtcttgtttcaccagagcgctctggtctaacaaactaccatcttccttttctagatctatgttagcgttcctgggtccaagaaggtcatccttgacctgcccctggtaattggcagcagatcaggtctaagcagcagaacatccagcatggccagccgaaccagctctgagatgagttgggtagatctgaatatccctgataccccagaaggtgagccagacctaatgtcttttcttcatctctggtctacctgggtttgtaaaattgtgatggtccagcatttcttgggcaggcttcttatgtggccatattttcttttctagctcctccctgctatatggatatcattcccgaagaccaccgattggagagccccaccactcctctgctagatgacatggatggcgctcaagacagccctatcttcatgtatgcccctgagttcaagttcatgccaccacctacttatactgaggtgagaaactagagggcaggtcttcacaaaagcccttcgaacccccttcctgccctgtgttaggagatagggatattggcccctctctcactgcagctgccagcacttggtcagtcactctcagccatagcactttgttcactgtcctgtgtcagagcactgagctccacccttttctgagcattactgcagccagaaagtgtggactgaaggtggtttcatgtttttgtattatgtatctttttgtatggtaaagactatattttgtacttcaccagatatatttttaccccagatggggatattcttgtaaaaaataaaaataaagtttttttaacgggaaaaaaaaaaaaaaaaaaaaaaaa

SEQ ID NO: 1870 - DNA, 740 bp, Macaca Fascicularis
  misc_feature (1)...(740): n = A,T,C or G
aaaaggggaaaatgctttgannnatatgtttcacatatacactctcttttatcattttagtggatggcagccttacatcagcannnnnnnnnnnnnnnnnnnnnnnnnnnnnnnnnnnnnnnnnnnnnnnnnnnntgtactcttatggatttgtgtcttataccatttgccttgctttttacatgactttgtttttcaaggtactgtcattttgcaaaaggaaatctttacatgaaatgtacaaaaactgttactaactggacaacagggaagnnnnnnnnnnnnnnnnnnnnnnngcctaccactctacttcnnnnnnnnnnnnnnnnnnnnnnnnnnnnnnnnnnnnnnnnnntnnnnnnnnnnnnnnnnnnnngctgcagtgggcatgttgtcgtatggctatctttttctttctttttctgaagtgagattattcgggggggtcaggctgagaatgtaataagccnnnnnnnggaacagatttctcccgtgtggtctagctggacccctcnnnnnnnnnnnnnnnnnnnnnnnnnnnnnnnnnnnnnnnnnnnnnnnnnnnnnnnntggcaatgagcaagaatttcctaggatnnnnnnnnnnnnnnnnnnnnnnnnnnnnnnnnnnnnnnnnnnnnnnnnnnnnnnttttttactctgctcactttcccactgtgcttccctctaaccaaaatatacgtgtatacattaccanntgtacaactctcaatgcagag

SEQ ID NO: 1871 - DNA, 735 bp, Macaca Fascicularis
  misc_feature (1)...(735): n = A,T,C or G
tgctggacctcactcggcaggcggtgcaggagctggtcagcttgtactannnnnnnnnnnnnnnnnnntnnnnnnnnnnnnnnnnnnnnnccctgttgagggnnggaggnnnnnnnnnnnnnnnnnnnnnnnnnnnnnnnnnnnnnnnnnnnnnnnnnnnnnnnnnnnnnnnnnnnnnnnnnnnnnnnnnnnnnnnnnnnnnnnnnnnnnnnnnnnnnnnnnnnnnnnnnnnnnnnnagcagaacagccgctaccnnnnnnnnnnnnnnnnnnnnnnnnnnnnnnnnnnnnnnnncgccaacaagcagctggcggggctggtggccaactactacacccctcgctggcggctcttcctggnnnnnnnnnnnnnnnnnnnnnnnnnnnnnnnnnnnttccaacagcaccagtttgacaaaaatgtcttccannnnnnnnnngccttcgtcctcagcaagcagaggtaccccagccagccacgaggagacactgtggacctggccaagaagatcttcctcaaatattacccccgctgggtggcnnnnnnnnnnnnnnnnnnnnnnnncccctgggccttgttttccactaactccaagccggggcaggttccagggcctggagctggacaannnnnnnnnnataacccaggcctgggaggaggccccatggcctgctggtggggtgtggnnnnnnnnnnnnnnngggaaatgaactgccctccaccaccacccaaag

SEQ ID NO: 1872 - DNA, 770 bp, Macaca Fascicularis
  misc_feature (1)...(770): n = A,T,C or G
gaannnnnnnnnnnnnnnnnntcgtcatgcggagcctgttcattgatcgaacaatagtaaagggatataacgagaangtctacaccgaannnnnnnnnnnnnnnnnnnnnnnnnnnnncaactatcaagtattccagaaggtaacagaccacgccaccactgccctgctccactatcagctgcnnnnnnnnnnnnnnnnnnnnnnnnnnnnnnnnnnnnnnnnnnnnnnnnnnnnnnnnnnnnnnnnnnnnnnnnnnnnnnnnnnnnnnnnnnnnnnnnnnnnnnnnnnnnnnnnnnnnnnntggagggatttccgaaccctcgaagccnnnnnnnnnnnnnnnnnnnnnnagccccaacgctagccccagcctcagaccccacccggcaccttcccagacacacaggaagcccacagaaggctcagctggttcctcactgcccagatgtgtacagccactcctccctttnnnnnnnnnnnnnnnnnnnnnnnnnnnncactctcgaagagcaggccccctctgtggccgatgcgannnnnnnnnnnnnnnnnnnnnnnnnnnnnnnnnaaagaagacttttctannnnnnnnnnnnnnnnnnnnnnnnnnnnnnnnnnnnnnnnnnnnnnnnnnnnnnnnnnnnnnnnnnnnnnnnnnnnnnnnnnctgtctgtcgtttccgtgagctgttactggaatgagcccttgtgttcatggcgatcgtcatgcagggttcgtgtgttttgtggggttttgggtttggtaactt

SEQ ID NO: 1873 - DNA, 874 bp, Macaca Fascicularis
  misc_feature (1)...(874): n = A,T,C or G
gagaccccannngaannnnnnaattttggttaactgtttttaagaatgttgacttgctcagtgatatggttcaggaacatnnnnnnnnnnntctgaaacacttgaaagatattaaagtgaagttctcagnnnnnnnnnnncctatgagttttgtcttagaatttcactttgaacccaatgaatattttacaaatgaagtgctgacaaagacatataggatgaggtcagaaccagatgattctgatcccttttcttttgatggaccagaaattatgggttgtacagggtgccagatagattggaaaaaaggaaagaatgtcactttgaaaaccattaagaagaagcagaaacacaagggacgtgggacagttcgtannnnnnnnnnnnnnnnnnnnnnnnactctttctttaatttttttgcccctcctgaagttcctgagagtggannnnnnnnnnnnnnnnnnnnnnnnatccttgctgcagacttcgaaattggtcactttttacnnnnnnnnnnnnnnncgagatcagtgttatattttactggagaagctattgaagatgatgatgatgattatgatgaagaaggtgaagaagcggatgaggtaatgtttaccaaatgagcaaataattctctgtggttaacacattgagaagcaaattgaatgacttatgtattcctttgctataatcattctgtgatttgggataaaaacattttggaaaacatgattttagaattctacagccaaacaatgtatgtataaggtttcaataaataaattgcaaaactcagcaacatttttttatttcaaataannnnnnnnnnnnnnnnnnnnnnnannnnnnnnnnnnnnnaaaagctgcagtaaac

SEQ ID NO: 1874 - DNA, 2508 bp, Macaca Fascicularis
attattttatttagctggcaacttaaaactgcaaggatgccagatattttagccagccacttacatcatgcagcatccatcttgaggagagtggcgccgggtcctttcctttttctcttgctccctgccgcctacctgagaccgcaggaaatctgggtctttctgaaggcatcttcttgtggtgtagtccccttggaaccgcggcctttagaatgaacatgacatcaccttgggcaacaacgacagagggtgcgtgcctgtaggagacaagacacggggagatccaaggttatacgagaaatccccactattcctgggttttatgaattatgggacggagcatacaaagcatcaccaaccttctcacttctgtccacccaagtatttctgacactgtattgggaagcaaaggtcaagggctctgtgtgaaggcaagaggtccaaacgaattctcaagggatctaagggaactggacggccgataaaacaatcaaggggcaggccctgcacagggactgggaaggcaagtggagaaaccaaagagcactagccaaaatggtggaagagaattctggggctgtggcacaactatccacaagagcttcctctttcttcagtggagtctcagtatagttcactgaggaggagaatctaacgaataggcaccagctgcatcaagggactcttacttcacaccatgccctggcaccttcctgaggatgaagatgccacaattcaccagctgagtcaattcatgggaaaggggctagtcaaatcccaggctatgtctagcaactgtctctccagtggaaaagaagttagctcaagtaatcaaaggattccctaaagcaagatttgggacatgccaaagtccctctttaaggggagagaggcagctgcacggttacaaagtagacaaagaaagacaaggagcttcttttaaactggaatgtgtaaaatagaagcagggagctgtgaacgccacagcagcaattatgcagaaagactgcggtgcagacactgagcagcaccatcctaactgataacatcagcagcagcaaaggcatattccaacaagagctgtttaagagctgctaattacttagattccaataggagctatgtcttaaaagtgattacagtttttgattacagctttttgaactgattgcagctgtaagctatgaaggcagtaatctaaatacaagcaaaaaaatcctttgatcaaacacaaaggaactcttccaaataaagatacctttattttacatacagatataactatctgtttcacatgcgtaaacaagcgatttatacacatctattaaacatataagcatctacactaaattttaggtttcctgagaccagggaccacacttgcgcatcctcataattccttatagtatctagaagggtatatggcacatagaagatgcttactgaattgaagtgaaacaattactatattgatgatttggtcagataatcattgtttgttacaataatggcctactatagaataaatactggaaaaagcaatacaaaagtccattttactaacctcaaatccaggaaatgtaccttcttttctagaaacccaaaagaagtatggaaatgcattcttgaaaagaaagctaaccactctacattccacaacagagaccatgttgactgtgctgtgtgagttgctaggcaaccacttggtaattccccacgtaatagagatgaacctgtcatctgctttcttagctatatgtgacaagaagagacaacaggtaaaggacaaccaagaatacctgcacctggatgacacagtcactcctgaagtatggtgacactggagaaaatccccatgccctgtcacaagttgctggagggtgaatttcattaaactattagcacaagacattgcagtgaattttcttggatttaccctgtgggtaaatcctgtgggttatcccattatacttgtccacaaagcaggagaccaaacgcaccatagttctgcatgggaatggtcatcaattcaataacagctccagatcagcgtgtcccatgatgccagctgggacgagactttactagaaaaaagcagccttttaaatcttaaaaaggatacacaacatcttaaagaaaccacaagttctgggtgaataaatcaccctttttcatacctgaggaaaacactcttagcaatttgtttgcacaggatttccaagacactttagacaaataagctgccttgtaaagactccactcaacggtaggtattgatatcactgtctttaggctaaaaacacaataatgtgttgaagaatgaataaaaaatgtgtgaaagctactctgatgttaagcaagaaaaagagcgagccaagtgcagtgactcacacctgtaatctcagcactttgggaggccaaggaggattgatcacttgagctcaggagttcgagaccagcctgggtaacatggcaaaaccccgcctctaccaaaaaaaaaaaaaaaaa

SEQ ID NO: 1875 - DNA, 2373 bp, Macaca Fascicularis
aaaaaaaaacataggcgttgatacaccaacacaaagtaagctgctaaaatacagaagatccaaggagcaacagcagaaaattaatcagttagtaattgatggagccaaaagaaatttagacagaacactggataaaagaacacctctattaccaccacctgattatcctcaaactatgaccagtgaaatcaaaaaaaaaggattcaactacatttatatgaagcaatgtgtagaaagtagtcctatagtacctattcagcaggaatggctggatcacatgttaaggctgatacctgagtctttaaaggaagggaaagaaagagaagaactccttgaaagtctcataaatgaggtgtcaagtgactttgaaaacagcatgaagagatatttggtgcagagcgttcttgtgaaaccaccagttaaatggcttgaagatgaaggaggtcctttacctgaatctcctgtaggcctggattattctaatccttggcgttctagctatgtgcaggcaagaaatcaaatattctctaatttgcacattgttcatccaactatgaaaatgttactggaccttggttatacaacatttgctgatacggttttgttggactttacaggaattagagctaaaggtccaattgactgtgaatcactgaaaactgatctatcaatacaaactagaaaagcagaagagaagataatgaatacatggtatccaaaggttataaatctctttactaagaaggaggcactagaaggtgttaaacctgaaaaattggatgcattttatagctgtgtttccacacttatgtcaaatcagctaaaggatctcttaaggagaactgtagaaggatttgtaaaactctttgacccaaaagatcaagaaaggctgccaatatttaagatagaattgacatttgatgatgacaaaatggaattttatcctacccttcaagatttggaagataatattttgagtttggtagaacgaatagccgaagctctgcagaatgtccaaacaatcccctcttggctatcaggaacttcaacaccagtaaatcttgacacagaacttcctgaacacgtgttacactgggctgttgacacactgaaggcagcaatacatcggaacttagaaggtgcaagaaaacattatgagacatatgttgaaaaatataactggctccttgatgggaccgcagttgagaatatagagacttttcagacagaagatcatacttttgatgaatatacagagtttatagaaaaatttttcagtcttgcctcagaaataatgcttttgcctcagtggattcattaccctatggtgcgcttggattgtgaagatttgaagacaggcctgacaaataaagcaaaagcctttgcaaacatattattaaatgacatagcttcaaaatatagaaaagaaaatgaacgtatttgcagtgaatttgaagcaattaaagaacatgcattaaaagtccctgaaacaacagaagagatgatggatctgatatcttatgtagaaaaagtccggactgcaggaatcgaagagttgattttaaggatccaggaatctaaacgccaaatgagttactttttagatgtttttctatttcctcaagaagacttagctttaaatgcaactgtcctcatgtggcctaagaaaattaatcccatctttgatgaaaatgatgagctaattgagaatgctaaacataaaaaagaaaatgaactaatggccaagagagagaaacttattttggaaatagaaaaggaatcacgccgcatggaagagtttacagaatttgcagagctggagcgcatgcaacagtacgtgacagatgtaagacaactacaaaaacgtattcaggaatctgaagaagcagtgcagtttatcaataaagaagaggaacttttcaagtgggaattgacaaaatatcctgaactggataaattaaaagttaacattgagccctatcagaagttttttaattttgttttgaagtggcaacgatcagaaaaacggtggatggatggagggtttttggacctcaacggggaaagcatggaggctgatgtggaagagttttcccgagaaatttttaagacactaaagtttttccaaacgaagctaaagaaagaattgcaagaaaaaagaaaggcagcaagaaaacggtctttggaagaagagaaaattgaagaagaaccaaaagagaatcctactcttactatgtgcagtacagtcatggaacagataaaagcttttagggtataaatgtatataataacattttaatattatagctatcttctcaacttttctgttgcctgatatataaattataaagcctaaaaaaaaaaaaaaaaaaa

SEQ ID NO: 1876 - DNA, 740 bp, Macaca Fascicularis
  misc_feature (1)...(740): n = A,T,C or G
cagcatccatgnnnnnnnnnnnnnnnnnnnnnnnnnnnnnnnnnnnnnnnnnnnnnnnnnactggatgtttaacaaaaggaggtcattccaggaccctacaagagatggagatgtcattgcctgaagannnnnnnnnnnnnnnnnnnnnnnnnnnnnnnnnagaaatggagattacagaagtagagccaccagggcgtttggactccagtacnnnnnnnnnnnnnnnnnnnnnnnaagctgtaacaaattttggcgttccagttgaagtttttgactctgaagaagctgaaatannnnnnnnnnnnnnnnnnnnnnnnnnnannnnnnnnnnnnnnnnnnnnnnnnnnnnnnnnnnnnnnnnnnnnaccagaccccctcccaacatgatctgtctcttgggtccctcatacagagaaatgcatcnnnnnnnnnnnnnnnnnnnnnnnnnnnnnnnnnnnnnnnnnnnnnnnnnnnnnnnnnnnnnnnnnnnnnnnnnnnnnnnnnnnnaaagcaatggggatttccattccttctgccgtcatggaaaacaactttgtggatttgacagaagatattgaagaacctaaaaagacggatgttgctgagtgtggacctggtggaagttgaggctgcctggtatttgattatatattatgtacatactttttcattcttaacttagaaatgcttttcagaagatattaaatatttgtaaattgtgtttttaattaaactttgg

SEQ ID NO: 1877 - DNA, 728 bp, Macaca Fascicularis
  misc_feature (1)...(728): n = A,T,C or G
cactcccccagaaaagcctnntgccccctgccagtaaagtccttcagtgagcccctccccagccagcccttccccggccnnnnnggatgtataaatgtaaaaatgaaggaattacgttttatatgtgagcgagcaagccagcaagcgagcacagtattatttctccatcccctccctgcctgctcctcggcacccccannnnnnnntcagggaggcaggcagggaggnnntggggctgcacttcctaccctcccaccagaacacaccccaccgggagagctggtggtgcagcctccccctccctgtataagacactttgccaaggctctcccttctcgaccctacccctgcttgcccgctcccacagctcccggagggctaattctggggaaggagagttctttgctgcccctgtctggaagacgtggctctgggtgaggtaggcaggaaaggatggagtgttttagttcttgggggaggccaccccaaagcccagccctgactccaggggcacctgtgagatggccatgctgaatccccctcccagacaggcccttcccatctccagggcccccactgaggttcccagggctggagacttcctctggtaaacattcccccagcctcccctcccctggggacaccgaggaggtgggccacacccaggaagggcaagtgggcagccccgtttggggacgtgaacgttttaataatttttgctgaattcc

SEQ ID NO: 1878 - DNA, 168 bp, Macaca Fascicularis
ttgcccaataagtccaacaagtcggttttttgaagtgagttttgaaagatattgttctcttataaagtgtaaatttacagcagtaatatttcgtatttgtttattttgaatatatttaatcataaaataccgttaaatattgattgtatattaacataaaagtttaaa

SEQ ID NO: 1879 - DNA, 787 bp, Macaca Fascicularis
  misc_feature (1)...(787): n = A,T,C or G
cgattgaaagtgttacatgagatgtagaagactttaanaannnatgtgagaataagcccgaagacttcaaggtgaaacccaaagcagatgaagtttcatataaaagggtaagaagtatttttgtttaggagaaagttatcaatgacataaaatgctgcaatggccagaggagaaatcagaataggtcgttggattttataattagaaagtcattgagctatttgagagagatgttttaatagtaactgaggaaagactgcaagtgtagactaatccttcatcatttggtgcatgaagcaagattattgagagtggcaaggtgggggaaagtttggggtttgttttaaagaatacaagatatctatttgggggcaggaagcaagcaactatttgaagattcaagaaaaagtcttacctcccagaagagaaggaaaggaatgggatcaagttacaagtgaaaggattaatttgggaaaggcagagtgacagtttctattgacactataggagaaatgaattatcttaaacttacgtatcttggccaggcnnnnnnnnnnnnnnnnnnnnnnnnnnnnnnnnnnnnnnnnnnnnnnnnnnnnnnnnnnnnnnnnnnnnnnnnnnnnnnnnnnnnnnnnnnnnnnnnnnnnnnnnnnnnnnnnnnnnnnnnnnnnnnnnnnnnnnnnnnnnnnnncagctacttgggaggctgaggcaggagaatcccttganacggggaggcggaagttgcagtaagctgagacctcaccactgcactctaccctgagcg

SEQ ID NO: 1880 - DNA, 771 bp, Macaca Fascicularis
  misc_feature (1)...(771): n = A,T,C or G
atctataaaatgggactaatttaatatcagtgnnnanctgtngggactttttaagaattaaatgagataatacatgtgaagcatttgcaagagtacctggtattatgtaagtgtgctgtgactgtaggctgttgtggctgccgttagtactggaagtattcagagttctgagttcctaccatccaagcagtgagaatcatagctactgtgtgtaaaacaacctttacaccctagaaattttccatgggtaatctgccagggtcacatggtgagtgacataaagggattgaaacaggtctgactccacatccacttttttgtattgttaacatgttccaggtggtaccttgatcagactctgtcaacagcttgttannnnnnnnnnnnnnnctgggtttcctaagaggcttagcaagtgaatgggtctttacatccacttgggaattcacaaacagtggcatttctttcttattagcgccaaatgtttctccagaactgactagatttccccaaattgttattaataactaaaatatcacagcaacagttttaaacaacacagtctaaaaattacataatcaacccgtccttcaaaattttccatccttcctcataaccagtcacagattctctctcttaatcattcttctgagtatggggaactatctggaaatttccagaaaggacccaagttgtcataattattttcttttctgcaaaagtttatcattttcaagaccactaaacatgatgtgttcctctatctttata

SEQ ID NO: 1881 - DNA, 1073 bp, Macaca Fascicularis
  misc_feature (1)...(1073): n = A,T,C or G
actgcaaatgagtcnnnnnnnnnnnnnnnnnnnnnnnnnnnnnnnnnnnnnnnnnnnnnnnnnnnnnnnnnnnnnnnnnnnnnnnnnnnnnnnnnnnnnnnnnnngaattctgaaggnnnnnnnnnnnnnnnnnnnnnnnngagcatacccttttaaacctttttagacttgtcctcttctagaattcattataaccccaaagtgtaaaaactatttggaannnnnnnnnnnnnnnnnnnnatacatctctggtaaatcctgctgaatgtaagggatattcagagctttcatacctcatcatgttatttaagcagccaacttatgtgacctgatttaaacttttaaaaaatccacttcaaactagaaagagtcaaagacaaaggacatttatcagccaagagtgtgacgcattcttcgcatctagtctgtagtagtgtctgtgctctgggatggataccgtctgatgtctgtttgttattgatggagcagccactgcaaaactagacaactcccatctataactgttactttttctagtgctgctttgtgctgagagaacattttagtttactgcacttgacctgtaaaagactttggttctttgtaattttagggataaattaggtggttaatttaaagaagaaatttcaatgttgcctttacatcacattaaaatataacttctttcagaaggataatagaagcactgattcatagtaaaaatcttgtttttagctttgacttttttgtggctgtttttttaaattgtaaattactagtaacatgtcatttctataggatgttttaaattatgtactttccattggatagttaaaataatttcattttatacgccaatttgagtgggaaaaatacaaagcacacagttgtctccccacattaggaagagtagtgtgcattcggaatttttgctagcagttgcgagatgtttcagtgaatgaattaaaacaaagtctatttaactgacgtgatctattttgtgtctaaaatagaggaatttatcttgtcctagaagttcataaactataagatctaagttttttttaaacaa

SEQ ID NO: 1882 - DNA, 1800 bp, Macaca Fascicularis
tactagagttattttgaggccctgtcccgtggagagacgcctccggtgagagagcagtctgagcgagttgctttgtgtaactgggcagagctaacacctgaggtgttaaagatcctgcattctcaggttgctgggagactgatcgtccatgcagaggagctggcccagatgtggaaagtggtgaatcttccagcagatctgtttaatagtgtgatgaatgtgggtcgcttcacggaggagatcgagtggctgaagtttttagcccttgcttgcagcgctctgggagttactattaccaaaactctcaagatagtgtgtgaggtcttatcatgtgaccataatggtgggttgcctcggatcccgttcagcaccttccagtttctctacacgtatattgccgaagtggatggagagatctctgcatcacacgtcagcaggatgctaaactacattgaacaggaagtaattgggcctgatggtttaatcacggtgaatgactttacccaaaaccccagggtttggctggagtaacagcacaattttggcaattttaaaggaagatacagagatgattgtacttcagaatgactgaaacccatataccacccaaaatcaattttcttgtacaactggtacacactaataaacaattaaacaaacatatgaaatcagaaatgtgcggaattaagatgtgaaattgttggaacaaaacacctttgttaccaggagattagtattcttcccacgtggacactgagtaaaagtggctgacaaagcatggatagaaaatgtatctccaatcaaagccagtctgtcagactttaaaaagtagtacgttaaccagacacagtgttgttgttctgtgattgttaggcataatttagataagtgcctttcatatggtcaattgaagtttttaccaggttatctctccatttgttggtactgtgctagtcattcattcatcctctcactcatcaatatttattgaggttagctatgtgccaggaatagggttgccagaaaaaacacaggacacccagttaaatttgaatttcagacaaacaacaaatgttctgttttggtttttgctaaacctggcaacattccaggaagtatgctgacttctgagcagatgcaagtaacatctaaattctgccttcaaggagctcacagtctaacactaagataagacctgaacataaatcactttcacgcaaatggccttgagaagaactaacggtattccagaaagtgtcaatgtcaacggatttttctgaaaccatacacagatgtcatggaacctactagagaaatccagaatgcccaaggctcaggattatccaggactagccctttgagcttggtctggaggtttagtccctctagtatcatggatacacaactttgcttatctgtccagtctttcataattcagcacattggaccaatgactttgccaattggctcacctctgaagtgtgaaagtctctgttcaggtttgaccatgttccagtttataggaaatgaccaaagttgaaaaccatacctagacaggcactgaggatatatacaaggtatcataggtttggagtcagacagatctggattcaaattctttctcaccagtgacatcgaacaacttaatttatctaagattgtttcttagagataatgacactgacttcataaggtcatattgtaaggaaaaatttgagaatttataaagtactgtacacagtggcttacacatggtaagtgcttaataaatgttggctattattaaaaaaaaaaaaaaaa

SEQ ID NO: 1883 - DNA, 2128 bp, Macaca Fascicularis
aaaatagtaattagaggtatttccacaaattgtgagctttgtcatttgggtagtttttttgagacttcttttccactctaatcgccaactttaaatagaataacatgacagaatcatggtcttgaaaaatccacatacttaactgcatatgggaatacatattgctgtagcatatggaaaaaggactgagtgatgcatacctgttttatttacattttcttttggaagcaagttattttctacatgtgtatgtttatacctatgtgtgttctaatttgaaatgtagaaatctgtaaaaaatttttcgttaactttgacattgctgtgttttaaaatacctgaaagttacctgcttcctagtccttggaaggcctgaattattataaagtttatttatttgcatctcagccattcccaaaagattttaaatgtgaatgcagaagtagcaaataaacaaacctgaaactttgatacctacagaacatttttaaagctgctgctttttttccatgcagtgttgttagtagagaatagtattagttacctcatagagcagtcacttactcaggtttaccgttcatttacttcagcaagtggatattggggcctgctgtgtgttcagcacagagtgagtgtagaaatgagagaagcagtttctgctcccaagaagctcagcaattccttagaataagggaagtgctgggggtgggtgtgccagaaagagagagggatgggtgggaaaaaattgaaaatcagacttctttgaagaaaagatatttaagctgggcacggtacggtagtagcacctttctagggtagacaggaggaaataaaactgttcctaagcagagcagtgggatccgtaaaggcccattggagtgaacgtgcatagcatactcaggaaatcagctgattgagtaaatatttatggaggctctgctatgtgctgagccctcttccaggtgcagaagatacagcagtgaacaagacaaaaattcctaccaactggagctttctgatagaatcagccaaattagtaaggaaaacatacagcatacaagaggagagaagtgctacggagaacaataaagctgagaaaggggacagaggcggccacagtagtgtcttgtttgcagttttaatggtctggcaaagtcttgccggaagttgagtttgattgaagacctgaaggtgtgctggagtgaaccatgcgcgcacctggagtaggatgttccagacagagggaacacaagtgccagagccttgaggccgcagtagccggggaggggaagagcagctgtctgcacagtgggaggtaactggaaggtcagctagggctaggcacaggcctaatttatcagtgtgaggggtcagacctgaccctgtggtcaggggagtgccatcgtagatttatagatacagcttgtgctgtcatctctgggacctccaaagtgaggacccagtgacttagagctgagtgtctgttaggtatagaggtaagatgctacacaaaggaaactccagttttgtaagaaatgtgtaaatatgtttttcaaacatgttcttaagactttttaatgtttgtgttcttgttacagttgtctggtttatttcccatgaatgttagagatcagatcgctgctgtgtaaatcatagtccacccaaggtgttcatattcatttcttgatacggcctaaggcaagagtcctgcttttcattgtcccctaatttatatttgcttctttctgaagagttttaaaatggatttcaaggacttgatgcctttaaaatcagtggatcagtccctgcgaggtttcttaataggccacagttgtctctctgattcttatttctaatttatagcactactgtccacctaaacatacactaaccatgtggatcttaatgatgttttaagaaaaaaaggttttgacatacatgccagactttcacttaagatgaaactgggcaactaggaaatggtatgccgtacgtatgaagcaaagttcattgaatattgctagcaaatttagttttgttgctgggataaccagattcttggactgtgtagtaggaataaataagaccaaacataatcttgtttcaccaaaaaaaaaaaaaaaaaaaa

SEQ ID NO: 1884 - DNA, 738 bp, Macaca Fascicularis
atcagcaaacgaatgtacagttacacagtggaggttatgattccctactttaacctacttactttattaaatgaccaactactgatactgatcacagtagttattagagattctaattcagttggaaggttctaatcactttattacaggcatttgaaaaatagggattcatttcaagtatattagccaggagcatagttagatgttacccaggccgtttgtcatcgtgttaatggtgattttcctgacccttgtgagatcagcgtgacaggagtgtgtgtgtttgtgttggtgtgggtgtgtgtttttggttggatgctgccaggtggcaaaggcatatataaatacatcatccgatctgcatctttattccacgattaaaagtaaaaatgtctattctgattctatattaattttgtctaagatgtaaaaattttagttcctctttggccaaaacctacctaaattaatgtacagatatttggtttttaaaatttaactcaaatctcaaaatcaatgaagtgttatcagatcctgtatcttggttaatatgctcccaaatactttaaacatggcagccttttggcctaagagagtgtttgtctgtttgtagaaaaaagcttttgagatgagagaatgtcttactttcttgtggcaattggttttctgtttttaacaccctttgggtaaaatcttacaaagagcttttataatttgttttactgaattgtatggaga

SEQ ID NO: 1885 - DNA, 741 bp, Macaca Fascicularis
  misc_feature (1)...(741): n = A,T,C or G
cggagaacggagagcgnnnnnagtggagagcgcagggaattagtggattgaggctataggtaacccaataagatcccgagtcttgggggcaagcgccccacttagaacgacgggacccggcgtcccctaccctgttttcccggcggacgaagccaggtttgtcgccccacatcctctgcccgcatcctccccggaccggcaacccatgcgttgactacgattattctcaccctttgcnnnnnnnnnnnnnnnggccgcgggttgggacgcggcggacgccatacggcgtctgaagctgcaagtgcagcggagataaatggaaagctcaggaagaaagagccacgtcctactaacacttcccaagaccagtgggggcggaaaggaagcaacatccggtgtagccggaagcccccaggcgtggtccgaaccttcgcatccaaaccttctaacatcgtttgcaccgggaaaactacctactaaaagaacttcacggaaattgcgcgcactaaacagattctattgttatgaacaagctatgtgaaaggggctnnnnnnnnnnnnnnnnnnnnnnnnntagacaaattctaaaagagctgtaacactgttgcgcacgtgtgtagagagaagaagggatatgcatgaactccacaattggtgagggtgaactcaggtggctttttttcttgttcctattactgtataaacaacgatgcatgttgtaactttcggtaggaaaaagaa

SEQ ID NO: 1886 - DNA, 749 bp, Macaca Fascicularis
  misc_feature (1)...(749): n = A,T,C or G
gggcnnnnnnnnnnnnnnngccccnnnnnnngagccaatgacttgtatataaaatgaaaaggcttgactttcaagagtcacaaactcaaatgccttgaggaagagatcagcaatgagaatcggtaaattagaatgtatgttaagataataggggactttaaagtatttaggaatgataacaaataaagccagtgtaagctctagactagaaggatccttttagaattagctctccatnnnnnnnnnnnnnnnnnnnnnnnnnnnnttaaagttagtgcagcgtctataagcatgcggggactgcagaatggaccttcagaaaccctacacaggcgctcannnnnnnnnnnnnnnnnnnnnnnnnnntcaagctaaatacttgattcaaaacaatcaatgtaggtgtaagatttcaaaattggaaagagcgttgtcagtcatctaacgtaaacttcccatttcatagaagagagacccgagaacaagaaagagaatgagggctgggtgcggtggctcaatcctgtaatctcagcattttgggaggccaaggtgggcnnnnnnnnnnnnnnnnnnnnnnnnnnnnnnncctgcccaacatggtgaaaccaggtctctactaaaaatnnnnnnnnnnnnnnnnnnnnnnnnnnnnnnnnnnnnnnccctgctacccagggggcagannnnnnnnnnnnnnnnnnnnctgggagcaggaggttgcagtgagctgagattgtgccactgcatcc

SEQ ID NO: 1887 - DNA, 1597 bp, Macaca Fascicularis
  misc_feature (1)...(1597): n = A,T,C or G
gacagggtcttgctctgtccacccaggctggagtaccatggtgtgatcacggctcactgcagcctcaacctcctgggctcaagcagtccttccacctcagctcagcctcttgaatggctgggattacaggcacatgcccaccatgcccagtttttttgttttgttttgttttagacggagccttcacctctnnnnnnnnnnnnnnnnnnnnnnnnnnnnnnnnnnnnnnnnnnnnnnnnnnnnnnnnnnnnnnnnnnnnnnnnnnnnnnnnnnnnnnnnnnnnnnnnnnnnnnnnnnnnnnnnnnnnnnnnnnnnnnnnnnnnnnnnnnnnnnnnnnnnnnnnnnnnnnnnnnnnnnnnnnnnnnnnnnnnnnnnnnnnnnnnnnnnnnnnnnnnnnnnnnnnnnnnnnnnnnnnnnnnnnnnnnnnnnnnnnnnnnnnnntgtacctggcttttttttttttttaagagaaggggtcttgctatgttgcccaggctagatcccagttctaatccttacagcacccctgtggggaggtggtgttttgcccccgggtttcacagcaggagcagcagcaatgtggcagcaggaccacgtgggatctgagagagcagagccattggaggagggcaagggagagatgtggtctctcattattttggggtaaggcctttggatcccctgcatttcctgagcctgtgagcaggaggagcagaaacctcccccctcagtgggttttgcatggtggtagggctggggtgggctggggcaaggccagggctaggaggagggagttgctgctcaccacgtggtcttctccttggagaacttgatgcctggcacgcggcccatacgccgcaccatcatgtgcaggtggctgctgcccgtcagcaccttcacagcgctacccatggtgatgctctccaggcttagcccgttcacttccgtgatcttgtcccccacgcacaggccagcctgctctgcaccacaggatgggagtggctggcatggggcactcgggagaagagtccccagggtgggggctgagcctcccccatcaaatggagctccttcgggttcaactgatctcctcagtcagagtggggattgtcagagcaggggctgagtgttcccagtgcctagggatctgtcccttaaaccattctgccctgagggtgagccctgtccccccgtcagtcggtcaggccttccagagttggggactcttccttctgtccctgacagcagcatcccctgcaattcactgaggttagagtcacatcctaagcctggacttcaacctgggggttccgcttacctgcactgctgccttcctccactttgctgacgaagatgcccaggccatgctctgagcccccacgcacgctgaagcccagcctccctgctggactcttctccacccggactgaatggatgatgtcactttcatcactgttggcttcgatgggtgagttgatgaggatgacgcgtcccatgggcggatgaggctcggattccgcgggggggcccgctcagcagccgttgctgcttctttagcaggtatcgcgttgcggtggagcttgagtcgctgcctagg

SEQ ID NO: 1888 - DNA, 739 bp, Macaca Fascicularis
  misc_feature (1)...(739): n = A,T,C or G
gaagtatggtacatactggaagtgtannnagtctgagtaaaagtgatgctactgcttttctcaattcattgagaggaacaaattatttacatagaaagataaattttaggaaatatttttgtttcagaagcttgtcttttgaaaaacagttatagtgatacatgcataattaaaaacattaagttagtgtggaagagcttataatggaaatcaaccttccctcctttccagcatcatcttcagaggcaacactttcagcttcagggctttctggtagttataactccataaacctaagttccttcttttgtcaaatgagtccccaatcaaaggacaaggatttgagaaacatgtgttttactttcagttgattagaaattgcctgatataaatataatttaaagttttaatagtcctttatttataatagggctccagtggtccagaatcttttactgtcnnnnnnnnnnnnnnnnnnnnnnnnnnnnnnnnnaatgaaaaggtcatgtatgtagaagggactgcagttgtaatgggttttgnnnnnnnnnnnnnnnnnnnnnnnnnnnnnnnnnnnnnnnnnnnnnnncaaacnnnnnnnnnnnnnnnnnnnnnnnnnnnnnnnnnnnnnnnnnnnnnnnnnnnnnnnnnnnnnnnnnnnnnnnnnnnaaggaggatcttaataacagatgttgaaagagggggtcaagactggcagttggctggattaagctaaaca

SEQ ID NO: 1889 - DNA, 744 bp, Macaca Fascicularis
  misc_feature (1)...(744): n = A,T,C or G
tatttagctgtgtttcaatttccagtactaaaatctttttatatattcatctttttgnctggtgattaaattcccattgcatgtagcttaaattctcaaaggtagactacaggtcaaatatatgtcccagtttgcagttctatcatttgtttgaatgtcttccgtttactagtgaattgatgccatgaaatctattatgttaaaaactatgttacattatggaaaaaactgtattgtaccttagttctccaacccctttgtttagatcacagttttttggggtgtttttgttttgttttgttttgttttttactctagaattgctatgatgcacttaggacaaatggtcccagtgtttaaggacattaaccctaacttgagagagaattcaggctcctacgtataagtcagtatgtttagtacccaacaacagcttcctgtctttgtctctgtgtatggcggcatcatccaaagaaacgactgagcagaaacagtagctcacgcttgtaatcccagcaccttgggaggccaaggtgggagggtcgcttgagctcaggagttcaagaccagcctggacaacatagcaaaaccctatctctactatatatacgaaaaaattatacagacagggtggcacatacttgtgtagttcgggtactcaggaggctgaggtggaaggattgcttgagcccttgagcccaggaggttgaggctacagtaagctgtgatcgtgccactgcactc

SEQ ID NO: 1890 - DNA, 971 bp, Macaca Fascicularis
  misc_feature (1)...(971): n = A,T,C or G
gaggcggaaggaggaggaggaggaggcccggctggccagcatgcccgcctggaggcgggacctcctgcggaagaagctggaagaagagagggagcagaagcggaaagaggaggagcgacagaagcaggaggagctgcggcgggagaaggagcagtcagagaagctgcggacgctgggctatgannnnnnnnnnnnnnnnnnnnnnnnnnnnnnnnnnnnnnnnnnnaagggggacatcgctaagtactagaggccgtggcctcctgcccgcagccttgcagctcggaggggccccccgccccagccccagccagccaggccccggcggaagggctgggagccgcacagcccacccctcctgcgctggaaccccccccgaccccccatcctggccccgcatccccagcccttggcaacactggagtgcacacgccgccccannnnnnnnnnnnnnnngcccaagctgctgnnnnnaacaacaaaaaatgctgcttatttgcatgccgacttacatatatttgcatgttcgttgaatatcaaagagtgaagagctctccccagccctgtgggtggtgactttgttttcctgcnnnnnnnnnnnnnnnnnnnnnnnnnnnnnnctccccnnnnnnnnnnnnnnnnnnnnnnnnnnnnntcctgggtggaggcaggccctgagctcggggaaggggttttccctccgtccctgacccagatctgtgcccggcctagcccgggcctcatttcttatccccgccgagggtttcctctcagtcatttgtttaccagaaagatgaaaactgcctgtcgggcctcagttggggcccctgggaccccacctccctcaagtctacgccccgtccccagccagacccactggctgccaggaccctttcactgccccggtggagtcagtggaggatgaggggccctgacccnnnnnnnnnnnnnnnnnnnccccatcccgaccc

SEQ ID NO: 1891 - DNA, 1911 bp, Macaca Fascicularis
attattcccctgaggcattgcagaccttaggttcctgagtcatttcatggaacagagcacctggatacttgcactggaccataacacaggatgttctgatacctatgattccctcaggcaaaagatacctgacgatggaaacttgcaacaatcaaatcacatctaaggaaaggtaactaacataggcatgtatcatcaaccaatgcaacccaaggaaaaacaccctaactgaagatgtccttcatgaagaacgggaaacaagtgcctgatggtgctttcacctaactacgtctttgtccactccacccactcaacagactctccttgtgaaaactacacttttgagtgttcagtgacatcagaccacaaatgtgacttcaagaggggttttgatacacattttccactgtgataatttctcatgctgaacagaagtgatctagaatatcatgcctgtagaattctatgatttacattgtttattcattagtagctgtattaaaccactgctgtgcatggctaaaagtaaattcattattattttttaaaatttaattctactgtcaagcttaattacatatttggttgtagtaagtcagtgtttctcaaagtgtgatttatgggccagatatgtcaaaattacatggggtatcattttaaatgcaaaatttggggtcctagacttcttcagttagggtatctgatgtgagactcaggagtctggcttttaataaagaccccaggtgattcttatgtacattaaaatttgagcaccactgtaacaggattttgttgttgctgtttttctttttttttggtcagggcttatagtcaccttgaacagatcctcacaactaatttatctcacagctcgaagggatcatagagattattgcattcaatatctacatgattaaatgaagatgtgtctgaagttccaaaaatatttgattatttctatgagaggccagccttagagactatttctgacataagtaaaaacaataataattgtcatttataaggggtcagaaatatatttggcaagtaacatgacatttttaccaataaaaatgaccctcagacatagaaaggtaatttaggaaacatagtttgtaaataggtgggccatttctaccagtgctcactaaccccaggtggcctttagaatgactataactaaacacacgtggagcagctgcggtgataataaggtcacccaaaaacatttgacttggcttttttaaaaacattttctgattgattcttaaaaatggacagattttgaaattcttgaacccaatgtgtgtatatagatacactttaactaccaccaaattggaatattaagttaatacattacgagtatgagattagaccttttaaaaggaatcattcttattttatatgacttgatcatataaatttcaagactggtttaccaatctaagaagtagtctcagattctattatttgcagggtcctaaaaacctgaataatgataaatgatccaatccattaattggcaaaactattctttggagcaatcacagtgactctggaactgccaatttgttctttttgcagtaaaaatgagtttcccagaggtaaattaagattgttatccctttttgttttttttttttttgtgtgtgtgtgtgtgtgaggcccttatttggcatttaccataaattttactactgaaggttctgtttattctctccttctaagtccagtgttggcaaactacactaggacctgccagttaagaatgttttttacatttaaaaaatgatttaaaaaagaatatgttgtattgtgtaaaaattatgtgcaattcaaattttaatgtccataaataaagctttcttggaacacaaaaaaaaaaaaaaaaaaaaaaaaaaaaaaaaa

SEQ ID NO: 1892 - DNA, 745 bp, Macaca Fascicularis
  misc_feature (1)...(745): n = A,T,C or G
gagcagagtacatatggnnnngaaattaactgccctagatatagtactcaaggtatannnaagtcttgtattctgtacttttcttgtagtgtcagttaaaacatacgtttcaaaaatataagaaaagttcaaaaactaattaatttgcattttagtagtagaatgttttaaagaaacgtacactgtggtaaatgatttaaaacactagtatagtgttgtgtagcttcatccttctgaagtctttttgtcatgtagctattcatctgtggctatgaaactatcagaaattctaagtgagatcaatatttgtttggaaaaaatcttgggaagcaacccaagggtttttgctgttgtttttctttttctatttttgtttacttagttctttagctagtggatttaattttgttgtgcctgcttcattttgcaataacaatgcagtagaatttaaaactcgaatgcttaagaggcctgcatatagataagaatttcaggcaaaactacatttattgttaataacggcttgttcatacgctcttgtattttatgtatctgtgataaataatgaaacttagttatattgaggttactgtttatcagtgaagtgttagtcatagtattttcaaaagtttgcacatattgttctgtgtaattgtgtaagccataattacagtgtataattctcttttcctattaaatcattcattgaaagtgatcactttaccatttgaaaagatatttcatg

SEQ ID NO: 1893 - DNA, 628 bp, Macaca Fascicularis
  misc_feature (1)...(628): n = A,T,C or G
taacatgtgcatagaatttagggaatgcagtaaggggtgcttcagtatnnnnnnnnnnnnnnnagtggtgggccgttcccaccactgggcctacagaggagaagatggagcaggtggctggactcagagatgggaactgtttggtgaggggcttgaaggagccttcagagaggaaggcagccattcctgccaccacctcccagggagagagccctgaggacagaaactctgatctgactctctccccacccgtggctctcctttcgtgtttcccattggttcaaccagccagaaactggcagccaaggagcctgctggtttagccacattggtcgtgttcccaggcaagatggggaagatggagcatggcgtgccctgtaagtgcatgtgggagagtatccagtgtggccatttgtcttccaatttagtgcatatagtatttcgggcacgtttgatgtgttggacttatataacacttgatctataataagttaagcacaggcatgcactggaccacgcactgggttacatctggatgaatctctaggaatgtgtcatgggctttcgtaaggactgtaatgacttctttggnnnnnnnnnnnnnnnnnnnnngnngnagctgtatact

SEQ ID NO: 1894 - DNA, 609 bp, Macaca Fascicularis
  misc_feature (1)...(609): n = A,T,C or G
aaaaaaaaaaaagtcatgccaccctcttcccaccccctattttttttttttgaaatnnnnnnnnnnnnnnnnnnnnnnnnnnnnnnnnnnnnnnnnnnnnnnnnnnnnnnnnnnnnnnnnnnnnnnnnnnnnnnnnnnnnnnnnnnnnnnnnnnnnnnnnnnnnnnnnnnnnnnnnnnnnnnnnnnnnnnnnnnnnnnnnnnnnnnnnnnnnnntattttttgagacagagttttgctctnnnnnnnnnnnnnnnnnnnnnnnnnnnnnnnnnnnnnnnnnnnnnnnnnnnnnnnnnnnnnnnnnnnnnnnnnnnnnnnnnnnnnnnnnnnnnnnnnnnnnnnnnnnnngcnnnagtcaccacgcccggccaatagtcagtattttttattttagttcttttaataggtgtgtaaaaaattcctcattgtgtcttaatttacatttctgcaatgttaaaggtgtggaacgtatttttgtgagtacatgaaatatctctttagtaaaatgtatgttgatcttttgggcttttcagagttttttttttcagctttctcaggttgaaattgagagtttttatatatctgagatgtgagttattgtcagatat

SEQ ID NO: 1895 - DNA, 682 bp, Macaca Fascicularis
ggagagcttcttctgggaccagggggtgggagggccaggtattgctttaccccttcctgtcccaaaaggctttcacataccctacctcaggcgagggccaagacaccctggcaaaccgttataggtctcaattcacggcataccagatgccagtcgccacttcacccaacacacacacacaaacatacacacaccaaacactgagggagtggtaaaggccccattttaactccggcacactgcaaacaaaaggtctccctctgtaggggggtggggaaatccaggagctcctccctggattaaaagcaaagaggtacagaccaaactttaacacctttagccttatgtggaaaccaaaaaccaactgctgagaaactgtgaaaatcccttttacccacaaggggaaggatcaaaattgctgccctttggggacacccgagacccctaattagcccatctgaatgaggaccagaggttagaaccctctttctccctgaagaaagagcctggaaaaacatggcggagcaaaggacaaaatcctttctgccccgaatgctttaccactttctcagcaacgtttattcaaaacgatttttaccaggaaccttatcaaaagcaaaaaccacagctgcttgggttgaagtccccatcctggcctcccctcagctgccagacatggcca

SEQ ID NO: 1896 - DNA, 814 bp, Macaca Fascicularis
tccaaaccaaaggctcagctctgctcacagcaggttaattacttagtgctaaaattatccaaaggtaccagggccctcagtggggaatgtatccagcctatactggcttatccttatcccaaaaccctaaagcaactaagagggttccttggcataacaggtttctgttgaatatggatttccaggtacggcgaaatagccaggccattatatacactagttaaggaaattcagaaagccaatactgaatttattaaggtggacacctgaagcagaggcggctttccaggccctaaagaaggccctaacccaagcccctgtgttaagcttgtcaatggggcaagagttttctttatatgtcacaggagaaacaggagtagctctaggagtccttacacaggtccgagggatgagcttgcaatccgtggcatacctgagtaagggaaactgatgtagtggcaaagaggttggcctcattgtttacgggtagtggtggcagtagcagtcttagtgtctgaagcagttaaaatgatacagggaagagatcttattgtgtggacatctcatgatgtgaatggcatacttcgctggctaaaaggagacttgtggctggtcagacaactgtttcactttaaatatcaggctcttattaccttgaagggccagtgctgtgactgcgcactttgtgcaactcttaaccccagcgacattttctttcccagacaatatgaggaaaggatggaaccttacctgtcaccaggttattggcttcaaaaccttatgttcgcttggagggggaccttttagaggttcc

SEQ ID NO: 1897 - DNA, 1904 bp, Macaca Fascicularis
acatggtaatgtttgtcattgtcgttttaaagttgcatttgacatttgttctccaaagagtgtttgaacagattttgataacagtgcacacaccttttgtctttttttgctccagcattttatttttagcacagcagctgtggagcttttgctaattattttattgttggtatcttagaatactgttcgtctgacagtttattcttccatacttgtctcccgagttaaaacagttaaattatttaacaacacagttaaattattttgagaatcattacaaaagggagttagaacttgtcagagtaaaactgtaatttcctaaatgtgactaatgaacccccaactgtcactattacattcagtgccatatttatctttcaaaatagtatttgtttcaccctaaccatctttggctgaatgaaaggcagttgagaaccatcttttcgtcatacataatatattaaaatataattatatttaaagtaaaggtcttggggccgggcacagtggctcacgcttgtaatcccaccagcactttgggaggccaaggtgggcagatcacaaagtcaagagtttgagatcagcctggccaacatggtgaaacccccgctctacaaaaaatacaaaaattagccggggatggtggcatgcacctgtaatccaaactactcaggaggctgagacaggagaatcatttgaacccaggaggcagaagttgcagtgagccaagatctcaccattgcactccaacctaagtgagagactcagtctcaaaaacaaaaagtaaaggtcttgggtttctctctgtaaatagcccttgtgtaatggtctttagattaatatcctttgactttattaataagtacctgtgtgcccaagtggatctcagttaagtcatccttaaattctattcaaatagaaataaactataaaatgagcctaactataacctacactcatttatcaagcattcccccaaaagttcagtgcaattcaggtacccttgacctaaacttgtatactccaatgtacatctttgataaactctggaagatttccctctggatttgggatcaggagcccagtgggccctattgctgaatgtttaccacacctttggctagggcttatggatgagcagactacgtggaagctaggatttactcagttccacctcactgacagcttttctaggggccaagcaactgactttcctgcgtaaggaagcccaagtactcgaccagtgacatatatggccatttggcaaaagtataaatggatggatgtagaccatattgaatgcagaatacattttagatcagtatctggcattgcaatcattttgccttttgaattaacatgccctgcttgtcttttctgaatgtaagggtaggaaaagagtaagtcaagttgtctctgtttgcagatgtcatgattgtgtatttagaaaacctcatcgtctcaaccccaaatctccttaagctgataagcaacttcagcaaagtctaaggatacaaaatcaatctacaaaaattgtaagcatttctatacaccaataacgacaaacagcaccaaatcatgagtgaactcccattcacaattgctacaaggagaataaaatacctaggaatacaacttacaagccattatagactgctttaaagagactctagaaggctgaacagcaattaagagaaaaaacataaatgcataaacgcataaaccttagttgctttctacagcatacataaccttaagagtttagcgtgcacgggtgtgatgtcttgcatgcatggaatggtttcaaaacaaatagcatgtaagtagaggcatacaacagagattgcggtttcagttccagaccactgcaataaagcaaatatcacaataaaaaaaaaaaaaaa

SEQ ID NO: 1898 - DNA, 727 bp, Macaca Fascicularis
  misc_feature (1)...(727): n = A,T,C or G
actttggaggccgaggcaggtggatcgcnngaaggagttcgggaccagcccggccaacgtggtgaggccctgtctctactaaaaatacaaaaaaattttaaaaagatcgtttagctctgtttttcataatagaaatagaaaaagtaaagttgccttttcttctgaaaagagcaagtattgttcagaccaagaagggtttttgtgattgaatcaccagtgcctgtcctagtcatagctgtgcttcaaaaatcttagcatgattagtgttggagtaaaacaaggaagcaaagcaaattctgtttttgaaattctgttgcttgaactattttgtaataattaaactttgatgttgagaaattacaactttattgtacacttcattgcnnnnnnnnnnnnnnnnnnttaaagtgagatttgagtttctattgagcacctttaaaaaagtaataccaaaccataaagttaaaattgatgtatattgagtcatatctaaaaccaggtataaacgtaaattgtatttcctgttttaatttcaggggaactactgtttgggaaagctattattaggcaaatgttttaaaaattactgtttctcattttcagtcataccctaatgatctcagcaagataatgtcctgtctgctnnnnnnnnnnnnnnncccggtacatactgagaaatcctataaggtcctggataatttctgtttgattattcattgaagaaaca

SEQ ID NO: 1899 - DNA, 719 bp, Macaca Fascicularis
  misc_feature (1)...(719): n = A,T,C or G
gctgtatgagatggcagccctccagagcnnnnnntacggagataagatgaatctcnnnnnnnnnnnnnnnnnnnnnnnnnnnnnnnnnnnnnnnnnnnnnnnnnnnnnnnnactacnnnnnnnnnttacgagaactggtcagcatgtgcatctaccctgaccccgaccagagacctgacatcggcnnnnnnnnnnnnnnggccaannnnnnnnnnnnnnnnnnnnnnnnnnnnnnnnnnnnnnnnnnnnnnnnnnnnnnnnnnnnnnnnnnnnnnnnnnnnnnnnnnnnnnnnnnnncttcgagtggccacctggtagcctagaacagctaagaacacagggttcagcaggttccccaaaaggctnnnnnnnnnnnnnnnnnnnnnnnnnnnnnnagcagctgagggaggggcgctggccacacgtcannnnnnnnnnnnnnnaaaagtcctttctttatactgttggggacaatcttagctgggttaacaagggcaggtggttcagcgagccacggcagccccctgtatctggattgtaatgtgaatctttagggtaattcctnnnnnnnnnnnnnnnggcttatgctaacaggagactcacaggagaccgtgtgatttgtgtagtgagcctttgaaaatggttagtaccgagttcagtttagttcttagtatcttttcaatnnnnnnnnntgcttaatttactctgtgtaaagggat

SEQ ID NO: 1900 - DNA, 581 bp, Macaca Fascicularis
cagccaagtgtcctcaatgcttaagctcgctctccaaaacagctgcccccgcctgtggcaacgacactgtagccagagaccatcaaggtgcccgcctgctgcctgaccagaggtctccccagcctggggcttccccgcaagaggacatcaccaacttccaggtgctggtgaagatcttgcccgtcatggtgaccctggtgccctactggatggtctactttcagatgcagtccacctacgtcctgcagggtcttcacctccacatcccgaacattttcccagccaacccgtccaacatctccatggccctgagagcccagggcagcagctatacgatcccagaagcctggctccatcctggccaacgtcgtggtggtgctgattctggtccctctgaaggaccgcttgatcgaccctctgctgctgcggtgcaagctgcttccatctgctctgcagaagatggctctggggatgttctttggttttacctccgtcattgtggcacgagtcctggagatggagcgcttacactacatccaccacaaccaaaccgtgtcccatgagattggggaggtcctgta

SEQ ID NO: 1901 - DNA, 746 bp, Macaca Fascicularis
  misc_feature (1)...(746): n = A,T,C or G
aggatcagnnnnntccaagggcaggaatccgtcttgggccnnnnnnncctccctggagcacccaggcagaagcggaagagtcgcagaacagagnnnnnnnnnnnnnnnnnnnnnnnnnnnnnnnnnnnnnnnnnnnnnnnnnnnnnnnnnnnnnnnnngtcattcatggatgtgtttgtggattttacctgggaggagtggcagctgctagacccagcacagaagtgcctgtacaggaatgtgatgttggnnnnnnnnagcaacctggtgtccctagggtatcaacacaccaaacctgatatcatcttcaagttggaacaaggagaannnnnnnnnnnnnnnnnnnnnnnnnnnnnnnnnnnnnnnnnnnnnattttgaaggctggaaagtccaaagccaaggtgctggcaggtttggtgtctggtgagggcctgctctgtgcttccaagatgactccttgttgctgnnnnnnnnnnnnnnnnnnnnnnnnnnnnnnnnnntcttatggaatggcatcaggaaaataaagacaagctgggaagtacggcaaaaagctttgaatgcactacatttggaaaactatgtcttcttagtacaaattatctttcaagacaaaagcctcataaatgtggcacgcatggaaagggtttgaaatatatagatnnnnnnnnnnnnnnnnnnnnnnnnnnnnnnnnnnnnnnnnnnnnnnnnnnnnnnnnnttcttccattctaaacaggagcaaa

SEQ ID NO: 1902 - DNA, 724 bp, Macaca Fascicularis
  misc_feature (1)...(724): n = A,T,C or G
gcatgcgtacagttcctgtcagcacagcttcctattgtcattgtcacagctcccagccacatcggggtggacctgngctatgatatcaagcagaagtttttatcactgctttcacattccattctccaaagagagagataattctatgtacttgacaagtgacaaatacaacgagatagtcaaacaaatgaaaaaggccaagaaaagaggaggtcttccctcttgctctgccacctgaagcaattggatgctctttgcattgggagtgaggaaatgctgagcatcccctctcagaagcaacagcaacttttgctactgtgtgaaaaatgagaacgcatgtgacatgctgcatgaggctcatgtcagtatctgacatggagcaaagcacaacatgctggaggagctgaagaggtagcatagacgtgaaggtcatgctacatactcctgccggcagaattaaatcttgtgaagaaaggcattgcaagcttgggcttggtggctcaggcctgtaatcgcagcactttgggaaaaaaaggtagggggatcgcttgagcccagacgttcaagaccagcctaagcaacgtggtgaggccctatctctaccaaaaaaaacattggctaggcattgtggtgcacatctgtggtcccggctatttgggaggctgaggctgggggattgcttgaacctgggaggtcgaggctgcggtgggccgtgatcggccac

SEQ ID NO: 1903 - DNA, 431 bp, Macaca Fascicularis
  misc_feature (1)...(431): n = A,T,C or G
taaattgtagccagatccgaaggggcatagtgagtgttgtggcagagaagtaaacattacctcactgttaggcctttactttattttattttccatcgaaagcataggcggcgnnnnnnnnnnnnnnnnnnnnnnnnnnnnnnnnnnnnnnnnnnnnnnnnnnnncagatcacgaggtcggnnnnnnnnnnnnnnnnnnnnnnnnnnnnnnnnnnnnnnnnnnnnnnnnnnnnnnnnnnnnnnnnnnnnnnnnnnnnnnnnnnnnnnnnnnnnnnnnnnnnnnnnnnnnnnnnnnnnnnnnnnnnnnnnnnnnnnnnnnnnnnnnnnnnnnnnnnnnnnnnnnnnnnnnnnnnnnnnnnnnnnnnnnnnnnnnnnnnnnnngtgtgtctcaaaaataatagtaataataatacaaaaactagctgggcatg

SEQ ID NO: 1904 - DNA, 740 bp, Macaca Fascicularis
  misc_feature (1)...(740): n = A,T,C or G
gcaggactgncttgannnnnnnntgaggctgggtggggagcctggaatgttttcaaagcgatgttcagaccctccaggctttggggaaatgtgggtttgctggtctctctgtcgccatcctccacctctcctggacccagcaggccctcagtcctagctgtcttnnnnnnnnnnnnnnnggagtctgaggcctcaggtggagattcgcatgtcactgtcagagatgagcccacctccacccttccctgggggcgatcagctgctgagtcacccacccagccttggagctggatccctgtnnnnnnnnnnnnnnnnnnnggtggcaggcaggtggaggctgcgcacagcttctcccggtcatggcgcacacctgtgcccggacgccaacgcctcctaagccaggagctgggtttatgcaccaccatggcccacattaacgctccaccacaagcccggcctagtcagaaccctcattgccccatccctgagtgggcaggagcctggcctgaggagggcttgggcctgtgaggnnnnnnnnnnnnnnnacccttggaggcagcagggttgaggccctgaggggcccattccccagaagctgccagtgctttctgatgcgttgactcttcctgcctcccctcccgcagaaaggtagtgcccacactatttttaaaatgttattttatgcaatacactgttcctagtgagcagggctctggccctgaggagtctttgcaatgtat

SEQ ID NO: 1905 - DNA, 1674 bp, Macaca Fascicularis
attttccatgtgtgagatacagttatcagtgctttacattaatagctatttaatcctttacttagtgctatgcaattcttacccctccccacctccattacagattgaaaaactgagtttgagagagcgagaaatgttgttaggttaaataacttactcagaatttatacagctagtgaatggcagagccaaaatttgagaccaggcagcttgtctctagggtctggctcctaactactagactagtaaaaaatagcctaggactttgagtgagtaatttggcttctctaggtttctcctttgtaaaatgaagccaaattacataagtgctaaaactctttccagttcaaataccctatcataaaaactttgatatttaaagattgtagactccatcaaaataaaaaatctttgtctccatcttactcccttactagattgtcttaaataccatattctcctggtaggtgagtcaatcacaagaatttattgagttcccactgagtgcaaatgatgtagcctcctgggaacattgaagtactgattgtgtgcaatctagggcctcttgaattattattttaattagtcatggcatcctcatccaactttttcttccttaaacacattcgcaaagacagtaacaagaagcaatgatcttcaaaatgaaattggcctaatgcctggtttatattgtactgaacattagagccaagactaaactggaattatttctacctggagctgtccattgtatttaaactgggaatactgctccaccacaactgaagtaatattttttttcaacacttgttgtgaaacagaaggaaactgttacttttgaagatctgagcatcccaaaggatttaccaaaactacctaaaatccttccatgaggtgactgagaaataaggggtaaacccaatgtgtttgtcttagctgaatatcatttaatgtccattctttcagtttctgatgatttttgtcttggcaggcccccaaatacttcatagtaccttcaaaacactcatgcacaaatgaaatcttgcattatcaaggaaagtaaaacatttcaaaagagaaatgaacgtttcaaatgtttccagttggcttaggtttcagtgagggggctcaaatgacacaatcatacttacaaatcataggagtaagaattggtagatgtttatagttgactaaatgttagcacatagttcatccataaaccacatgagcactgaaattatttttcccaaaatgcttctgttttcagtagatcaagcatttcatgaagttccttgacttctatctactgaaaaggaaggacattaatagtaacatttaacaatctattattcactacttgacagatatgcttaagaaaagtttacaatgaattcatatcagtggtgaaatcttacagaaaaaggctgtccacaagaaaagagtgaaagattccttttttatctttagtgagcccacttaccccttttagagtcctcagtcttcattgctactcttctactaaatgaaccaatgtatctttccctgactctcacatccccaataagatccgttgttgcattgtgaatttaagaataaaggataattttccaatagcattgatccaactactcaagcaaaaaagaaaataccaaaaaaaaaaaaaaaaaggccaca

SEQ ID NO: 1906 - DNA, 790 bp, Macaca Fascicularis
  misc_feature (1)...(790): n = A,T,C or G
gtacctaccaatacnnnnnnnnnnnnnnnnnnnncnnaaatatgtagacctcactaannnnnnnnnnnnnnnnnnnnnnnnnnnnnnnnnnnnnnnnnnnnnnnnnnnnnnnnnnnnnnnnnnnnnnnnnnnnnnnnnnnnntcaatacagttttgtcttcatttttcaatagtaatttcaattggtccatacttaaaatactgcagcacagattttgagttttacggttctcaaagcaaggtttccatcttaagctttttataaaaacaaagcctttgcaaaactggattaaattccacttaatgtgaattaaaaatgaccatttataataataatagtgaacgccatattctaagtcgagtaaatgtatcctaccattcaaggttatcatataatttaacaaaattgtacaatcttaaggctcttcacagtataaattaatttttcaaaccagagctgttcacatgaaaatattgcttagtagaatgtatatttaagaaataaaataacaggggaactatatcaccaatgtaagttatagagttaattacaagttctaccattcttgataattctttgagatgctaagtgtttcagttaatatttaatgatacctaaatcgtgggaattttaatgtttgttccaaaatagcagaaattgtaaaaattgtgaattattggagaaaatgccattacttgtatatctgacatttaattttnnnnnnnnnnnnnnnnnnnnnnnnnnnnnnnnnnnnnnnnngattattctcttgtaaaagaaaaggaaaaa

SEQ ID NO: 1907 - DNA, 1572 bp, Macaca Fascicularis
actgctctcctgcctagagataccactgagtccagaagcaagacctgtgagagtgcacagtgccacttcgccccatggctgaagatggtttgcccaaaatttattctcatcctccaacagaaagcagtaaaacaccaactgcggcaaccattttctttggggctgacaatgctattcccaaatcagaaacaactattacttcagaaggagatcacgtcacttcagtaaacgaatatgtgctagaaagcgatttttcaacaactgcagacaacaaactgacgcctacaaaggaaaaactcagatcagaagatgatatggggaccgactttattaagtcaacaactcacctacagaaagaaattacctctctgaccggcactgcaaactccatcacaagagactctattactgaaaatttcatgaccgtgaaaattgggaatatttcatcaccagttactactgtttctttaatagatttttccactgacatagcaaaagaagatatcctcttggataccattgacacaggagatgcagagatcttaataacatctgaagtctctggcacactaaaggacagcagtgccggtgttgctgacactcctgcctttccacgtataaaggatgaagctgatatgaacaattataattcctccatcaaatccaatgtccctgctgatgaggctatccaggtcactgattccattattcctgaggctgaaatccctcctgctcctgaagtaaacttcactattattccagatataactgcccttgaagaagagaaaatgaccaaaattgacctaagtgttttagaagatgacaccggtgctgtggctacactaactgactctgatgaggaaaagtttatcactgtgtttgaactcactacctctgctgaaaaagacaaagataaccaggaagatactctgctaactgatgaagaatctcccgagggagccaatatttggatggagagagagactgcaactgaagcagagacccattctgttttgcttactgctgttgaatccagatatgacttcgttgtccctgcatcaatagctacaaacctagtggaagactcatctacagaagaagagttgtctgaaactgatagaacagagactgtacctaagatcactgagccattttctggaactagctctgtattagataccccagactataaggaagacacctccacaactgagacggatatctttgaactactgaaagaagaaccagatgagttcatgatttgaaagcagcaaaagggataccatgtaaaattgtgcaatagcctagccagctagccttaacatctaagaagtttttccaacaagcaaaaacctttagaaatgaaagaatgtgggcatttaaggtcttaaacactgaatatcacactcttcttatgattcttgctagtgattcaaggacataaatcttcattcttttgtggcacagactacttaaatgggtctgttttcactttgctcatttctcttcaataaatctttttggcaagcaaatgaaaaaaaaaaaaaaaaaaaaaaaaaaaaaaaaaaaaaa

SEQ ID NO: 1908 - DNA, 749 bp, Macaca Fascicularis
  misc_feature (1)...(749): n = A,T,C or G
tcacacaaggtnnnctgatcgaacttaacgaagctccagatggctgcgctgcgtcgaatgctccacttgccgagcctgatgatggggacgtgccgccccnnnccggactcactggctggtagctgcctggcggaccgctgtctctgggatcggctgcatgcccagccccgtttgggcactgtccccaccttcgactggttctttggatacgaggaagtccaggggctcctactaccgttgctgcaggaggcacgggctgccattcctctgcgggtgctggatgtgggctgtgggacctccagcctatgtacaggcctctacaccaaatctccacacccagtggatgtgttaggggtggacttttctcctgtggctgtggcctacatgaacagcctcctggagggtggccaaggccgaacacctctatgccctgggcaccctgcctccagcctccacttcatgcaggccgatgcccagaacctggggtctgtggcttcttcaggctctttccaactactgctggacaagggcacctgggatgctgttgccaggggaggtctgcctagggcttaccagctgctatcagaatgcttgcgggttctaaaccctcaggggaccctaattcagttctcggatgaggaccctgatgtgcgactgccctgcctggaacaagggtcccatggctgggctgtgactgtgcaggagctaggccctttcaggggcatcacctactttgcttacttgatcaa

SEQ ID NO: 1909 - DNA, 1590 bp, Macaca Fascicularis
  misc_feature (1)...(1590): n = A,T,C or G
cannnnnnnnnnnnnnnnnnnnnnnnnnnnnnnnnnnnnnnnnnnnnnnnnnnnnnnnnnnnnnnnnnnnnnnnnnnnnnnnnncatccattccnnnnnnnnnnnnnnnnnnnnngcccagctgctcctagaccaccatttagtactatgagaccnnnnnnnnnnnnnnnnnnnnnnnnnnnnnnnnnnnnnnnnnnnnnnnnnnnnnnnnnnnnnnnnnnnnnnnnnnnnnnnnnnnnnnnagctgctgcagctactcctgctgtccgcaccgttccacagtatannnnnnnnnnnnnnnnnnnnnnnnnnnnnnnnnnnnnnaatgcacagccacaagttacaatgcaacagctgctgttcatgtacaaggtcaggaacctttgactgcttccatgttggcatctgcccctcctcaagagcaaaagcaaatgttgggtgaacggctgtttcctcttattcaagccatgcaccctactcttgctggtaaaatcactggcatgttgttggagattgataattcagaactttntcatatgctcgagtctcctgagtcactccgttctaaggttgatgaagctgtagctgtactacaagcccaccaagctaaagaggctgcccagaaagcagttaacagtgccaccggtgttccaactgtttaaaattgatcagggaccacgaaaagaaacttgtgcttcaccgaagaaaaatatctaaacatcgaaaaacttaaatattatggaaaaaaaacattgcaaaatataaaataaataaaaaaaggaaaggaaactttgaaccttatgtaccgagcaaatgccaggtctagcaaacataatgctagtcctagattacttattgatttaaaaacaaaaaaaaaaaacacaaaaaaatagtaaaatataaaaacaaattaatgttttatagaccctgggaaaaagaattttcagcaaagtacaaaaatttaaagcattcctttctttaattttgtaattctttactgtggaatagctcaaaatgtcagttctgttttaaataacagaattgataactgagcaaggaaacgtaatttggattataaaattcttgctttaataaaaattccttaaacagtgcacggttttgctttttttcaaagtctttataattgccatgcataaataggtaatatcttaatggtgctgagctgacataagaatctttgaaaaatgtactgttaagttcaaggggtctattggttttatgtaaaaggcacaagacaattcctgtagtgcattttatgagttaaggtttccatatggattatgatcttaatatttcatgtacaagactgannnnnnnnnnnnnnngaagataaaccagtttatgggttttttttttgtttgcgggtagaggtggggtcttcctattttgtccaggctggtcttgaattctgggctcaaggtatcctccnnnnnnnnnnnnnnngcctggcctggccagtttatgattatattgaggtttctaggctatgagattattagcttaaactcttacatcatgtaaaacaatgacagctactctgaagaggatgtagataagataagctttggt

SEQ ID NO: 1910 - DNA, 610 bp, Macaca Fascicularis
atagagaatataccatcaaataaaacaaccctttccctttggtgtacagttacttattaagttgatttttgggtttcttttgccagggaacttttcaaaactggtagtaattatttttaaaaatcatgtttgacatctttctattgctcggaaccagtccctgtagctgtctaagttatgggtggagaagtctgggtatgaccctgttgtgtacactcacacttcatgattgacattgatttactcttttatttccatttggttatgcttatttttgtttgaaatttgtttttttcaaatatgtttcctttttgaacttacagaattgttgaaattttctaatagccagctaaaatttggtatatattagctctgttcgtttcacttggacgtttcattttgaaagaaagaatttttatgtttcacatatagtttcatacagagtagccagtcccataatgaaatgctgtattgccatagtggtcacacccaagtggtccagtatctcaatggcgaggcagccggattggtcagggctgctttgttgaaatgtgatgattttcatatgacttctttctctttctctctctttttttttttccttttaggc

SEQ ID NO: 1911 - DNA, 483 bp, Macaca Fascicularis
ttttcttttttttttcttttttttttttttttttttttttttttttttttttttttttttttttttttttttttttttttttttttttttttttttttttttttcttttttttcttttttttttttttttttttttttttttttttttttttttttttttttttttttttttttttttttttttttttttttttttttttttttttttttttttttttttttttttttttttttttttttttttttttttttttttttttttttttttttttttttttttttttttttttttttttttttttttttttttttttttttttttttttttcctttttttttttctttttttttttttttttttttttcttcccgcgccagattttgaaatctcggagacaaaactagtactgtaagataaatttttttgtactgtatttattgtgtataacgatttttttaaaggagaattctgtacatttagaa

SEQ ID NO: 1912 - DNA, 681 bp, Macaca Fascicularis
  misc_feature (1)...(681): n = A,T,C or G
gggcaggtagtctccctttctagaaagggttattgtaactttaaggacaggcttcaagtgggaaggcccctacttttgcacttctccaagtgcaggtcacaccaggggcagaccctgtcgctgcgtttctgaactgtgaaggagcctattagggtgggagacctcagatgggctcagtacctgttccagccacaggcttcttgtccacctcttcttccctgtccaccagctgctcagcgcataagaccttcccgacaggctctgcgtgtgcagtgctccgtgtccctcctgggccctccagcttcagacactaatgggagttcccgagacgctcaggttggagcaggcagcaggcagagacattagaaagccagtctgaacgggggctgtctgtgagacgcccaggccagctcacaagtattgttgctcatggtgtggcaatggactgaactgtaataaaaaatgttatttaatctttgtctctgnnnnnnnnnnnnnnnnnnnnnnnnnnnnnnnnnttactgtacataaaattgttaatctgtctgattttgtctgaattataaacattttgaggtaccaaacataaccaatctgtgcaacaacatagactgacctcactacccaagagagtgtaaatattcctgggcttccagctttggttttgttattttcataact

SEQ ID NO: 1913 - DNA, 718 bp, Macaca Fascicularis
  misc_feature (1)...(718): n = A,T,C or G
ctctttattgtcattttctcccgatngtcttcttttgtctacagtgtgctttttaaaaccagcagactttgggactgttaaggtcttccttgtaagtttttaaactaaaaatctatctggggaacagatttggggtaggtcctaccagagtaataaccatggtaggtgggnnnnnnnnnnnnnnntnnnnnnnnnnnnnnnnnnnnngtaccattatggtnnnnnnnnnnnnnnntggggagtgaagaagaggggtccccaagacacagacttcaatgctaaaactagggaagccctgggctccatgacagtggctcacactatcagaagaccatctcaaagaaaactataataataagccctggagggcaggatgtgtgnnnnnnnnnnnnnggtgttagcacatgccagaggtactttggaatggaaagaggtgagagtgtctcaaggtttaaaaatgagcaagtgtagcccctctttggtagctcactcatcccaccttctcagggtattgcaatgcaannnnnnnnnnnnnnnnnnnnnnnnnnnttctactcagtgccctaatannnnnnnnnnnnnnnnnnnnnnnnnnnnnnnnnnntgtatgtgtactgttagtctatttagattgtaagctccttgagggcagagactctttctcctttgtctctgtagcctatacctagtatagtgccttgcacacaataggcgctca

SEQ ID NO: 1914 - DNA, 605 bp, Macaca Fascicularis
  misc_feature (1)...(605): n = A,T,C or G
gtgccctcagccgaggnnntctatgagtgcagggtggaacagtgggnnnnnnnnnnnnnnnntcttcaagcactgggaggcccaagagccannnnnnnnnnnnnagacaaaggagactgtgctctgtgccctgggtgtggtgctgggcatagtgggcatcatcgtgggcagcatcctcatattaaaggatatgcgttttggccgtgacccccgggcccaggggcccctgtgaaatgctgtaaagatggtgaatttccatgcagatgaccacatataattcattattattattgttattcacgctggacatcaggtacaaaaggtgacaaaatatctgaacagaagaggatttaggagatatatgaactccagatgctatacaaaatacatatcagatttttttctcacttcatgtgttcactaccccagtgggtgagtgaattgctgacccttcaaagtttgtccctatctgttaccctaaagcagtcattctttagtaaatagaaggtaacgaatatannnnnnnnnttnnnnnnnnnnnatatggagattatcccttcactgagccttttatcctctggtctcctganaagaaccatcactgt

SEQ ID NO: 1915 - DNA, 165 bp, Macaca Fascicularis
cacacacacaccccccattccactcaccacctggacaggtgtcccccagcacgggcacactggcacacaggtgcccacatctcttcctcccagcccctccacctgcctaatgttatgcaacctccttctgatgtatccaccaaaccagtactgaatgtggccgag

SEQ ID NO: 1916 - DNA, 2830 bp, Macaca Fascicularis
  misc_feature (1)...(2830): n = A,T,C or G
atgctnnnnnnnnnnnnnnnnnnnnnnnnnnnnnnnnnnnnnnnnnnnnnnnnnnnnnnnnnnnnnnnnnnnnnnnnnnnnnnnnncaaaaaaaaagtaatagtagaaacttaaatcggcaggaatcaaaatataaaacaaaaattagtcttctacatttgagttgtgagtaaatcctatgaatcgcattcatcctgagaggaaaaaggtgtggtgcaagtaattacagaagtaggctttcataatgaggataaacctggcctaggaacaacaaacgaactagttttggtcttgactggtatttgcattaagttgaagctaacctgaaaagtctcagttcctactcagacatcccgagaaacttttctctttgcgtacagatggcctgtactacacgtatcttttaaatcatagtgcatgtcttcacccagaaaggagtatagatacaggaacacaaaccacctagattcaaaaggcaatgtgactttagtgttacacagctgaagattttgttttatttattggaaatagactataaaaagtttttttttaatggcaattcatagaaagcttaatctacacaacatgctccatgttgtggtcttggggtactaaatggagagaaaaagaacatctttcatactcctaaattccttaacctatgtatgtaattgtcatcagctttaaaaccaattccattgttaagtgatctttcaaaccctgattctatgatgatactgcttacgtctgtcaaccctttgcagttgatttgtcgatggcctgagaagattagcactggatcaggtatgggcaattaaagagttaaatagggttgtgtagatgttttaaagatatcgcaatatcttatttagattacttttaactccagagtccagctaacctttatttgtaaataatggtgcccaacttcatctggtgtgcacctgtgcctacaactttgtccccattgtttttagcagcagtatgcagaggaggggacgcttggctgaagtttaagaattttagttctaggccaggcacgnnnnnnnnnnnnnnnnnnnnnnnnnnnnnnnnnnnnnnnnnnnnncagatcacgaggtcaggaaatcgnnnnnnnnnnnnnnnnnnnnnnnnnnnnnnnnnnnnnnnnnnnnnnnnnnnnnnnnnnnnnnnnnnnnnnnnnnnnnnnnnnnnnnnnnnnnnnnnnnnnnnnnnnnnnnnnnnnnnnnnnnnnnnnnnnnnnnnnnnnnnnnnnnnnnnnnnnnnnnnnnnnnnnnnnnnnnnnnnnnnnnnnnnnnnnnnnnnnnnnnncaaaaaaaaaaaattttagttctgtgagtttattggttttctcccatctattttctattttatgtttctcaaattgctctactttcagcaggtatggcggggtggagggttctcagccctattctaagccttctgtcttccacttaggcaattttaaacttccgagctaaggttgcagcaatgttttatcgctaagaatgttactttttccctcatcacctcggtcctctttcctccagctctggacattctaaattgtctggtttttgtttttgtttcgagacagagtgtcactctcggctcagtgtaacctctgcctctcaggttcaagcgattctcgtgcctcagcctccggagtagctgggattacaagtgcaccaccactatgcccgtctgatttttgtgttattagaaacagggtttcaccatgttgaccaggctggtctcgaactcctgacctcaggtgatccgcctgcctcgccctctgagagtgctgagattgcagacgtgagccactgtgccctgcctaaattgtcttgttttataatctgtaactcttacaattccaagcattccctgtatctgagtggggactaaagagccactaggcagctccaagtgcatgagtagagtttgtcgactgaaaaaaatgatctgtcccagctgattagttagggaacttcttatgccattatgtcaaggtcttggctgattctcaatttgtatctcgtgcctgaagggtgataggctgtctaccagcattctagaacccagcatggtaagggttgggcctctgctttcagtgtaacacacccctgccatcccagagactgggctaccctttctagagaatgaacaaatgagagcggactcttgtccaactctgcagtgtagagaaaaggatctgggatttgagtggttaaacaatccttattttgcccccacctccagggatttggactgctgccaactcctgcttttttgttttgttttgttttgttttgttttttgaatttctgagttttttgttgtccgttctgttggccttgggattccatttcctgaagctgctaaattataaactaatctgtccattttccagctttcatttttttttaatctcgatttctccatcctggtgagtttcactccttttaaatgcttttttagttagggaaggaacaaggataggtatgcatttccaatctaccagtgattatgtgcccctcaatatgtaccacatgtgtaaacctgtcaaaacaagggcccttttagattttgggtgacagtccaaactctccatctgcctcttggaactaaatttgggaggaattttaaaggtactctggtatccgcacaaggttacaataataatacatgaagttttataccttttgtggattgatggtacggggaaccaacaaccctttaccatagtgatatacagaaataaagttttaatttctgcaaaaaaaaaaaaaaaaaaaaaaaaaaaaaaaaaaaaaaaaaaaaaaaaaaa

SEQ ID NO: 1917 - DNA, 1875 bp, Macaca Fascicularis
acttaccctatgctggaggaattttccacattgtgagtctcacctcctccagccagaagcaggaactccttccccagcatcccttgccagtagggagcgggctgtgaccacccactcagaggtgggctagataacaggtgaaagggcacggatgggacatggctacaggacgcgagcctgggtctgcagtgggagcccctgtcagcatggattgggtgatattccatgggaatacgagcccagtattggccagaaccccctacttccctcttccaaaagccccatatctatctagattttcgcacaaagttcaattttgaaatctgggtatataatttaaaaagcatttttaaaagccagtgggccacagagcacagagcacatctgcaggtcgcagaggatctgcacggcaacctttttagcgggagctattccacagtcaattctcattattcactatagttatgtttagaaagttgtcatgaacacagggtgtgatgattacttttatgtgtcaacttaattgggctaagggctgcccatctggctggtagaacataatttctgggtgtacctgtaaaggtgtttccaaagcgggttagcatttgaatctgtagatggagtaaaggtctccctcaccattgtgggtgggagccatctaatccattgagggcctggatagaacaagacaacccatggccaaagacactaggagtcatgtctgaacaaatcttatctaacacttgtattttctccataaggcacatcgcagccttcttgggtttaagaatactaggcagcacttcaagcacttcgctgggggccattttaaactgcaaaaccaccaacaataaataaaaaatttggaaaaaccgtggcatcacacagactgcgagagggacacttgtttataggatgagagctgaaacaagaaggcagtgtcctgttatttcaactcagctgggaacatgcttgtcagtgtctacagtttttcaccacttttcacatgcctgggaatgaccacaaaagcaccatacaataattaagcaattatctaaagaagtatatgttaaaatctgacagttgagaatgctgagctccaggaagtcaggggctgcacccaagagctcttcaaggctttgtgttctctcgacccacttaaaaatgttgttttgctctgaaatgtatttaaaatgtttaggatttaaaggccagattctcaaaggcttttatactttctcccaattcacgaactatctgaaaaacagcattgaaatgcacatacaaacaccattagagggtggtgagggaaacagaactaacaacgacttccatgggaggcccaaatacaggagctggtctcagaaccagacggccctgggttctgcttccacctttcccttttcctggctgtgtggttttggtcaggtccctttaccttactgggcctccttttcttcatttgtaaattaggagctataatgcttaattctctttgttgtcactattaaaacaaacactgtatatgaagacacagtacacgtcctgacacatacatggaagtgatacttatcatcataactacgttaaaagcaggagtcagttcaggcccggtggctcatgactgtaatcctatcactttgggaggccgaggcggatggatcacttgaggtcaggagttccaaaccagcctggccaacatggtgaaaccccgtctctactaacaacaaaaaaaaaaggtgtggtggcaggctcctgtagtcccagctacttgggaggctggctgaggtgggagagtggcttgaattggggaggcagattttcagtgagcctagattgcgccactgcaccccagcctgggcaacggagcgagat

SEQ ID NO: 1918 - DNA, 2013 bp, Macaca Fascicularis
gtgccatcttgttaccttggaggaagagcccacctgagaatgacatcaacttagtgggaagtcagcagaactaaggggccgggagagttgattcctggtgacatcatcctgctcctaggtgcagccacagtggcgttggcctcgaatgttgtccctggcacggaagtgaccagaggtcgccctcagatgtcagcggacacctccagccgtgtcatttttgcttctcgttagcaaagtttgtaagggtagtattctcagttggcattcctagctgaggtgtatagctgggaggtcaccatgctgagggactttgggaccacttctgcctccgaggagacccttactgatgatcataggctcctcgaggtcatcagccagggcagctttgcagaagtcaaggcggctggcccagcacattctcactgggaccgagatggctgtggaggtcaccccaacagggcagcagggctcctgcagcctccagcgtctgtaccgcagggtccatatgatgaaggcccttcatcgcccgaagatcatcagactcccgtggctggcgcccagaacaggctgttcctggtcgtggattaagccagctcgagagagctatccgacttcaccctcgaattctcctccttgaagggcgaagaggcccgtggcaagttccagcaaatagggtattccgtgcagtgaggcttccagcaggaaattatctacagggttctgaagccagagaacttccctgaggaggctcagcacgacgtggaaacaacagactctggctttgataccagattcaccgtaggctgaaagctgaggccctgggagctcctcttacgcagcctcggaactgttccccgggacaaaagtacgatggaccccagtgggcatgtggagcttgggagtcactgtctacaccatggtggccggggcctgccatctgtcggacagacttttgtgggactgaggacgacactaatactgtgtgaatgatgacaggagatcccgtttctcatttccatagaactagaacgcctcataaacacatttctggtccttgactccagggagaggccctcactagccctcatcatggggcgttcatggattaacatgggtcaggaggaggccccaactaagaccatactgggagctattccccgatcacccggagtctggaaagcgctcctgatgtgcccgggagatgagacagaccacgtcccatccttgtaggaacaaagatgcgatgataccattgtctgccaccagatcctgggctgcgggaaacccgaggtgcagggctccaccatcacagtgaagctcttgccttcagcagatcctactacctgccgccattctcccccccacccgaaaaaaaaaaaactcctttaatgaatattaaacttgtactggaaaaaggtgaataaataaacaagatatagttgccttagtcaaggcacgaaaaaaaaaaaaaaaaaaaaaaaaaattacatcactacaatctctgcctccatctttaccttgcattttcctctgtgggatgctcactatatttggagccttctttacaatgtggataatgctatttgcttcccaggactattgcgaggattaaaatgagacaaaatcccatgtgtgaatgcactttttgaaccatggttcagcttgacaagaacacgccacacacaactaaagaagagactcatgatcaagacaaggacagacgtgacccctgtgagttatgtagctgggggcactttgccatggataaataactggaactgggcccatcaatggcaccattgaataactgatgtgtaaaaatggccttataccattcagaaaatgtgataatatggtatttttaaagcaaaagaatgataaatgttacatgcataaaaaaaaaaaaaaaaaaaaaaaaaaaaaaaaaaaaaaaaaaaaaaaaaaaaaaaaaaaaaaaaaaaaaaaaaaaaaaaaaaaaaaaaaaaaaaaaaaaaaaaaaaaaaaaaaaaaaaa

SEQ ID NO: 1919 - DNA, 584 bp, Macaca Fascicularis
  misc_feature (1)...(584): n = A,T,C or G
aaaacatagatnnnncatttnnnnnnnnnnnnnnnnnnnnnnnnnnnnnnnnnnntctacaagaattatagctttaaaaaatacaaccaattttcatatttcaaaaatatttgaactcaaataaattaatttcttaaaaagtacacttctcatactatgtgttnnnnnnnnnnnnnnnnnnnnnnnnnnnnnnnaacacctacaagatgctatcacacacgcgccagccgcactcctgcaccagccgctgcaacaactgcagctcannnnnnnnnnnnnnnnnnnnnnnncaagacgggacgggaacatgcagtaataaaatagctttttaaaaaataacacatatgaattcatcacataggactatgcttttcannnnnnnnnnnnnnnnnnnnnnnnnnnnnntctatgactccagctannnnnnnnnnnnnnnnnnnnnnnaggcagcctgcggtcccaccttgtaggtggcagcccctgcaatctggggtctagcctgttggcgtttgctttattgtgggnnnnnnnnnnnnnnnnnnnnccgtgagttgtgggtgactcaacttatttctgctaccaaa

SEQ ID NO: 1920 - DNA, 712 bp, Macaca Fascicularis
  misc_feature (1)...(712): n = A,T,C or G
gtccattnnntaaacatttgtaatctgtgannngaattgaacgagatgctggaagtatgaggataaataggaaatgatcacctttctcaaggagctcccctgcagttttcacttcaataacttggacacgcctggaagggttgtcccacaccaaaagagagaaaaggataatgttcttttgatgctgtagtttttcctgggaagactaggaaggactctgaatttcaaaagaggtgatttctcgcatgagcatctcttccaccctcccttccctccacaagctacagtgatgcattttccagacacggcacctacagagtacagggtccaagacaaataaagctcaacaaggcccaagaaaagctggagcttatgggccttaccctttagaaataaccccggattgatttagattgaacctgaatttgaataaagaggagcaaaatgtagggggaagaaggattataaaatattgggattgatattggaatcagtgatttgaggttgatttccaagctattctgtttagtcgtagactttcttagcctttaatgggagaagagagaaatacggtcatgcgctgtagaacaaggtttccatcaacgcggctgtcatgtacattccctgtgactacagtggggctgagaaattcctatcacctggtgacatcatgatcccgaccctgtgtaggcttaggctaatgtgtgtgttt

SEQ ID NO: 1921 - DNA, 1202 bp, Macaca Fascicularis
  misc_feature (1)...(1202): n = A,T,C or G
gagaaatgcatcattagatgattttgtcattatgtgaacatcataagagtgtacttatacaaacctagatggtatagcctactacacannnnngctacatggtgtcacctattgcttctaggttacaaacctatacagcatgtgactgtactaaatactgtgggcaattttaacccaatggtaaatgtttgtgtatctaaacatagaaaaggtacagtaaacatgcagtattataatcttatgagaccatcatcatatatgtggtccatcatttggtccatcattggctgaaaagtggttatgcggcacatgactgtatatatactttcctgttacaaaaacagtgtctctcaatccacagtaattgcagtattcagtaggtctactttagccctgagtcatcatttgtgtcaacgtgtttagtgccatgtccaggtctctcatgtaactggaagagctatcaaatattttggcaaaacacattgtttctttggctttgtcttggcaactttctgtgccttttgtagctcttgtctggaagaagctcaacccttgtctgcacactgtgatacaagggggacagcctcgacttacttcttggtgccttagtcctccttagaacaattcctaaatctgtaacttaagtttctcaggaagattccatactgcacagaaaaactgcttttgtgggtttttaaaaggcaagtcgttatatgtgctggataatttttatgtatgacagataaaaattgtataaagtaaaatattaaagtacacctagaatactgtataactttgggtcattttatcaacacattgcnnnnnnnnnnnnnnnnnnacagtttttcttagaataacaaagcaattaatttacttatactatgaaggtcatcattttaatatatattttaagcaatccaccaagaactcagtaggcagctgagaggtgctgcccagagaggtggtgattagcttagccttagctcacacacaaaagcacaacagactttggactatcccctaacagggcatttactcttgaacttgattcagagaggcacacattaccattctctaatcagaatgcaagtagcataaggcagtggaaactatggaattaagaggcaggtgatgcattgggcaagtttattaacatctgtgactctttagtttgaaatatatttgtaacagacaaaaatgaa

SEQ ID NO: 1922 - DNA, 714 bp, Macaca Fascicularis
  misc_feature (1)...(714): n = A,T,C or G
gagatttgttttggctatgttaagtcctttgcttttgatgtgaaatttggaaataggcannntgtggtggctcacactgnnaantcctagaacttgggaggcctaggtgggcggatcgcttgagctcaggaggtccagaccagtctgggcccatggtnnnnnnnnnnnnnnnnnnnnnnnnnnnnnnnnnnnnnnnnnnnnnnnnnnnnnnnnnnnnnnnnnnnnnnnnnnnnnnnnnnnnnnnnnnnnnnnnnnnnnnnnccagaggtcaaggctgcagtgagctgagatcacaccactccagcctgggtgacaaagtgagactctctcaaaaagaaattaggatcaacttgtcaatttctacaacaaaaacccctcttagcaccttgattgagattgcattgaatttatataaaaatgttgggagaattgacatcttagtgatactgagtcttctggcctgtaaacaaggtctgtcttcccatgtattaatgtttctgtcttctgtttctcttaataatcctgtagtttnnnnnnnnnnnnnnnnnnnnnnnnnnnnnnnnnnnntttgatgctaaatggtattttaaaatttcaaattctaactacttgttgctagtaaatagaagtacaattgatgtttaacttgtatccttcagccttgctaaactgtgagttctcatggtttttttgtaaattacatcaacagtcatg

SEQ ID NO: 1923 - DNA, 742 bp, Macaca Fascicularis
  misc_feature (1)...(742): n = A,T,C or G
tatatgtatatttaatgactataatatgtaataaagtttatatcatgttggtgtatannnnatatagaaatcatttctaaaggagtgaattctaagttttaggggaaaaatgcaatttatnnncagactcccaaagtgagaattaatatatcatgccaagaaaatagtgactattttgaagtatgctactttccttttggaaatatagaatacccgtttctgttattaaagtatttggttactaattcaaatcatgtggcaattataattcttctaaaatgctatcatttgtaactgtatcccctgtattaaatctcattaaccataggcggctgttaacagaaagctgcattgtttcacattgagctgttacattagttcaggctaaatgttgggagctccaaccacatgcaagaataaatctggaaacatactgctgggatactgctgttagagcccttcttggttttgtattcccagaaatgagctccctttctttagcttagaagaatgtgattatatccaggatatcatgttcagaaaattttagtttaatatcagcatagaatgcattactattggaataattggcctctagttcttaaatgtctctgataacttattatctttataatagagtgcaactacttttgtgtaaaaatgtttgcctttaaatttagtatttcatatcagcacctcgatatatgtataaatgttccatgttaatgtgaaaagaatctgc

SEQ ID NO: 1924 - DNA, 2063 bp, Macaca Fascicularis
gtgaagtcagtggccaccagaccctgagctccgcgccccatgtgctatggagtctaggatgttgaagagagctgggaggaggtgccaagaacattaggctgcttcctaccatctagcttactccaacatgtgagtaacaccaatacaaatgaaaagccatcaaatgtgtccagtagtgaatatcatcctggcagactctgaactaggagggagagtcctggagaggtgtttattttctgatataaaaaaggagccaagggaaaacccaagacagagaatagtggcacaataatgaagcatgaattatccagatgaaaacacctatggaaataaagctgacattatctctacggtagaattcaaccacacgggagaattactagcgacaggggacaaggggggtcgggttgtaatatttcaacgagagcaggagagtaaaaatcaggttcatcgtaggggtgaatacaatgtttacagcacattccagagccatgaacccgagttcgattacctgaagagtttagaaatagaagaaaaaatcaataaaataagatggctcccccagcagaatgcagcttactttcttctgtctactaatgataaaactgtgaagctgtggaaagtcagcgagcgtgataagaggccagaaggctacaatctgaaggatgaggagggtcggctccgagatcctgccaccatcacaaccctgagggtgcctgtcctgagacccatggacctgatggtggaagccaccccgcgaagagtatttgccaacgcacacacatatcacatcaactccatatccgtcaacagcgactatgaaacctacatgtccgctgatgacctgaggattaacctatggaactttgaaataaccaatcaaagttttaatatcgtggacattaagccagccaacatggaggagctcacggaggtgatcacagcagccgagttccacccccatcattgcaacaccttcgtgtacagcagcagcaaagggacaatccggctgtgtgacatgcgggcatctgccctgtgtgacaggcacaccaagttttttgaagagccggaagatccaagcaacagatcatttttctctgaaattatctcttcaatttcggatgtgaagttcagccacagtgggaggtatatcatgaccagggactatttgaccgttaaagtctgggatctcaacatggaaaaccgccccatcgagacttaccaggttcatgactacctccgcagcaagctgtgttccctctatgaaaatgactgcatttttgataaatttgagtgtgtgtggaatgggtcagacagtgtcatcatgacgggctcctacaacaacttctttaggatgttcgacagaaacaccaagcgtgatgtgacccttgaggcttcgagggaaaacagcaagccccgggctatcctcaaacccagaaaagtgtgtgtggggggcaagcggagaaaagacgagatcagtgtcgacagtctggactttagcaaaaagatcttgcatacagcttggcatccttcagaaaatattatagcagtggcggctacaaataacctatatatattccaggacaaggttaactaggtggacaagttattacttaataatctcacatactgaatactagtcaaacaagtttttaaatgtttctttgggtcttcatttgatgcattgactttaatttccctatgcaggaaatgattggaatagaattaaaaggagtccaacattcccagctccccagttctaagaaacttttgtcaaacccaataggtttgggacacttctgtttagagttgaaagctgccagctaacagtaattcttccatagttgacttgaacttctgatgcttttattgcccagttttctctggtgggtccagtgttttgttcctaggtgtctgctgcgataaaatgaggttgtctgtagtatttaaggagaaaagaaataagttttttttaattaagcaattccatttgattgaaaaaaaaacaacaaaaaataaacaccgtttactcttagacaaaaaaaaaaaaaaaaaaaaaaaaa

SEQ ID NO: 1925 - DNA, 719 bp, Macaca Fascicularis
  misc_feature (1)...(719): n = A,T,C or G
tcatcatattctctacctccctaagtattctacaatggaaagaatggaggaagcacttcaagtagccatcaacaacaacagannnnnnnnnnnnnnnnnnnnnnnnnnnnnnnnnnnnnnnnnnnnnnnnnnnnnnnnnnnnnnnnnnnnnttggatccttctgttcttccttacacctaaataatacaagaggttaatgaatagtggttagaagtagttgagggagaggttgggggaatggggagnnnnnnnnnnnnnnnnaagggcacaaaatctcacacaagactgaggcaggagaatacagtccagagatagggatataaggatgacttggacatactccctggcacggaagaatctgaacactggcctatgattggtccattccaggaccttcatttgcataaggcatnnnnnnnnnnnnnnnnnnnnnnnnnnnnnnnnnnnnnnnnnnnnnnnnnnnnnnattggttcattccaggacattcatttgcataaggagtcaaaccacaccagtcttnnnnnnnnnnnnnnncaattcacctcagcctctaattggctgtgagccagtctttcatttacatagggtgtaaccatcaagaaacctctacagggtacttaagccccaaaagattttgctactagggctcnnnnnnnnnnnnntcgagcccactcccaccctgtgtaatgtactttcacttttgctccttcactgcct

SEQ ID NO: 1926 - DNA, 716 bp, Macaca Fascicularis
  misc_feature (1)...(716): n = A,T,C or G
aacatgtgaacccatctctactaaaatacannnnnnnnnnnnnnnnnnnnnnnnnnnnnnnnnnnnnnnnnnnnnnnnnnnnnnnnnnnnnnnnnnnnnnnnnnnnnnnnnnnnnnnnnnnnnnnnnnnnnnnnnnnnnnnnnnnnnnnnnnnnnnnnnnnnnnnnnnnnnnnnnnnnnnnnnnnnnnnnnnnnnnnaaatcaatatttgtacattttctcgaacatagaacatagcttctttagccttgagtatgcatttcattctaatattttgagctgaaatttaaaaaaactttgaaagacttggaaatgattatggcatatatgatatacatttttaaaagttagtaataatagccaggggcagtggctcatacctgtaatcccagcacactgggaggccatggtgggaggattgcttgaacctaggaatttgagaccagcctgggcaacacagtgagaccttatttctacaaaaaatcaaaaaattagccaggcatggtggcatgcacctgtggttccagctacacaggaggttgaagcaggaggatcacttgagcctagtaggttaaggctgcagtgaaaccctgtgaattaaccacggtactccagcctgggcaacagactgagaccctatctcataaacgacaacaagaacaacaaaagttaatcataatatagaagcataaatttcttgtgaatgttcaataggca

SEQ ID NO: 1927 - DNA, 731 bp, Macaca Fascicularis
  misc_feature (1)...(731): n = A,T,C or G
agttctgtacagcatattctgttcaagtatttttttacaagcttgtgctgtaggcacatnnnnnctgctgcagaagtggacacccgtggcacacccaccccgccccagtggggtgccatgccttcctgggacattgccacttctgccctggaactcatgcaggtacgtagtagctgctattgccagaacagcaaagccaannnnnnnnnnnnnnnngcttttnnnnnnnnnnnnnnnnnnnngctagcctaaaacctgacnnnnnnnnnnnnnnnnnnnnnnnnnnnnnnnnnnnnnnnnnnnnnnnnnnnnnnnnnnnnnnnnnnnnnnnnnnnnnnnnnnnnnnnnnnnnnnctcctgccagcaacaagaacgctttggggtaggcacgatgttttcacgtgtgcgtgccgtttctcnnnnnnnnnnnnnnnnnnnnntgtgccggaggctacaagtttaacatcctccttcccgaaaacaaataggtcctatgctgaaaaaagggtaaaaaatgagtattgatcttctcagccaggagaagagtgtggcgttttaacacgaccagctgctcgccggcatannnnnnnnnnnnnnaactctgctgcgaacatgactccgcccctggcactggcctccagcaagcctgctctttttggggtacgggnnnnnnnnnnnnnnnngcctttcctgctcagtgtgtaaaaaaatgtagcgaaagccactatttt

SEQ ID NO: 1928 - DNA, 115 bp, Macaca Fascicularis
tgtcatgtcgtataagacagaagaaaagcccttcttttcctttaatcccattacaagtgctgagagcacgagtatgtatgatgatattgagggggatgagttacaaaatttccaa

SEQ ID NO: 1929 - DNA, 699 bp, Macaca Fascicularis
  misc_feature (1)...(699): n = A,T,C or G
gtgcattacaggaaactgaaaaacacaagaagcaaagaacaaagtcattaaaaatcacaagcagtttatagtttgacatgttcttctagatcgtgtgtgtgtaggcacaacatccaattttatgggactgagattgtacagtatgtatcatgatttttcacacatcatgaatatttaccaattcaaaatcccaaagctatatgagtattttgataaccaagaatacactacaccaactcaaactgctaaaaaaaaaaaaaaaatgtaatcctgcctttcttgggacaaaaatttcatagaagacaaaaatggcaacacgcctctagataaaagcattggcagagttccgatttaaatgctgcagtcccttaatgctcaatttaaaatgaaacacacagcaacagaatatactaagtataactttttaagannnnnnnnnnnnnnnnnnnnnccattaaaatattagcaaagtatatttccattgaattacttaatgtatttctatagtacagctaaaagagatgcatacatcaatggctatcaaaatgtaaataaggacatacatggacacatctgcatacacctcttcctgtatacttccttctgcctctctgatgccaacctaatgaacaagtcagtcctgacatacactgctcagnngtggcttaacaattccatgtcannnngcatctttctatc

SEQ ID NO: 1930 - DNA, 723 bp, Macaca Fascicularis
  misc_feature (1)...(723): n = A,T,C or G
ataagcagctcaatagcagcatagaggattagattaaggaacagcactgcatacagaaaannnaaatctccaatagtttaggctgcaagtnnntagccaaacacaagagcatgtaagatttggaggacaaagtataaatattttaagtttgcataaccaagattataggctaccttcccaacttctaattgaagagcactgaaaacggagctgtgaacacttcatttttaaaacctgacaacatggtgctactgactacttaatacaaagatatattacaatatttttaggtaaacatattaagtttggcctgggcataaatgtacatacagaaaatgtttgtagagaattcatcaaaatcatgcccatttactgttgtagagctagtgttnnnnnnnnnnnnnnnnnnnnnnnnnnnnnnnnnnnnnctacagacgggacacaacagtcatgggctgtctcaactgcccaaagtctgaggcagaccacgtgagagctgtggcttcttcttggattcaggttggataacccaaatcaatgactaaatatgtacattttgggggcggttggggggtgttttccaggaacttgaagagtacatgacattataaaaaatgggtgttggaagactaattgtagaaatttgacctgagggccaatgttactttgtgtaagttcactcagacatgtcagaacatgcccaaagaagcctataccttgctg

SEQ ID NO: 1931 - DNA, 745 bp, Macaca Fascicularis
  misc_feature (1)...(745): n = A,T,C or G
gcacngnagcgacnnnanctcactcccggaagaagccagagnnnnnnnnnnnnnnnnnagacacccggggcctggccatgctcctgggaaactggcaccaggagctgccacacctgggtaggggagaggcaggccatgccagcagtgtggggtggggcctccagctacttgnnnnnnnnnnnnnnnnnnnnnnnnncacatcctgcaaggggtgagtgtccaatggactagggccaaggcctggttgacagacggcccgtggggcccggtgtcactcacagcgccatgtctttgttttgaacgtccattctgagtctcagcccaggtgcaccttaggaagggctgggtccctgtccctgaacnnnnnnnnnnnnnnnnnnngatgaggctggctcagtgtgtgacggaggccctgggagtcagcagagccgagcgcacagtgcacatcaggcagagcaggccacgggcagggaagacgcttcggggcagggccactgggcacatctggaccacctgcaagggctctgcaggcgaccatgactacaggtcagttgtgagtggtccccacagaggctgcccacccaaggtctgcttggggtgaannnnnnnnnnnnnnnnnnnnnnnnggtgggacctgnnnnnnnnnnnnnnnnnnnnnnnnnnnnnnnnnnnnnnnnnnnnnnnnnnnnnnnnnnnnnnnnnnnnnnnnnnnnnnnnnnnnnccagcctggccaacatggtgaaa

SEQ ID NO: 1932 - DNA, 2749 bp, Macaca Fascicularis
aacatactggctcaggctgagaatggcacagacttaactttctggaagataagcctcctgctgttgacatggaaagcctccgagcatctttacttgggaggttgtaaagatgattagaaatgtctgctgttcctggaagtgaagcatcgcttgaagctctccacgtgccttttggaggcgaccagaataatctacagaaatggcaatgaaaatgagagtagatgcataaacagaaaaagttctggcgagagttccaggtaccttacatggaagcagctgggtaaacagtgattttgaggcattaacacatcatatttgtacagcaatgagagttttgaaaaacattcatccttcacactcaaagtgaagccagacataacatttactaaaaagcaagagtctagtacagtgttggagatgcattctgcctcacccaaatttccaaatgtttgctccagtattctttacaaacatctcaaggaaacttcaacagcttttcagcttgtttaatgtgaatgaaagcgaatatccctatgttctggaaaaagcaaaaaccctgtctttccagccacttggcctgatggaagtataaaggcaggctttttgtatgcagcaaagctgtgcatgatgtctctgattttaaatgtttcacccaaaatgtaatacgactatgtttatttttttctctcttacatgagggaagtatttccataagacctgagaaacaagacataatttggggacacaaaggcagatgaagactcattgctcattctttttttctccactccctgaaatagacagtccttcccttctgatccaaatcctattcattgtgtcatatctaactaaaatggcacctttcctaagagtgcttgttatttgtgactccaggacgttctatcagccgttgttgtggatatccttccccacacatttcagagctccaagtacagcacagcggcggcatttcacgctccctggaacctgtgaggtgggtgccacatcgtcttcactttttggatgtgaaagctgaagctcagaggtcctgtgtcaccagtctatgtgtcaagcctgtacgcatcagtaagtgaacagccagggtctgcggccccactgtccagcttcaggggggtccactctgaaaccctctgcagtgctctgtcctccctcgtaacctcactcacggattcctttaagacctattcctttatcttcaactaaaccacgaagcccttgatgacagcttttgtcttgtacttttttttgcatctggatagccacttcacaaaagaatacctgcaggagtctatcatacacgcactgattgagatagatcatgtgaggatatgtaaaaccagagactcgaaaaatagcaaactgaacttttagataaggtaatcattctatggcttattggtggtagtttatattaatggttgttagaatcatgttgtttccaagcaaataacacaataagaaaacaatccagtaatacccctcagctttatgaaggtgttatgatcagttttatgtaagaccacactgtagtaagttatggaggggttgtccagacactcccatatgagtagtgtcaaaacacatactcacccccaccctgagtcgctgccttgggtcccatccagcaatgaccgtgagtgctccaacacctgagcccacagatgctcctatttcagaacccacccatgtcagggaagtcccctgtctcccagaggttctttcagtctagacagttctagggcatggttctttcccaggatgggcactgtgggcatataagtatggggagggagagtggtcactatttgtatgtgtggaattggccacctgagagaatctgagaagggtctgaaaaagtctctccacatccagttattatggagcagtaatgcaggcaaaactgttcctggaatcagttcatggtataacccaagtgtcacaaaggaaggatcagggcagagaaagtgagttttgttggagcctggggtgagtgggaagagcaactgggagatgagcaacacaggatggggcgggggctggaggagagagagtgggagggcgctggcccaggagagatgaccacaccagactatgtggaccccacctgaggtatagccctaggaggacttgcagcaaggggagttggtgtccccatttcaggaaggctcccttgacaggtagggaatgtggactttccgtagagtaatgttctgttcgccacttgtccaaatagtaataaatcaccagtaaattcctggtgctgtctggaaggcttggacttcaaagccccaaattcacaaacaggaacctttcattaactctggaaaaggaatttcactttatttcaatttgtgtattttggttatttagtggaagcatatattactgaccaacatgacattccgttttgaatcaagtgccttttattctagagccatcagacattgaaattatgtgtttaaatgcttgaccagccttcatctgtaccaaatgtttgaacttgcttttataaaagatgagacaactttgctttttagtttctttttttttaaaagctggttttagtcacgagataccataagaccaaaaaacccctcagagctgtaacattttgattttcctgcagttcaaagtactacctttctccattaaataatttaaagcatctttttttttgagagaagggaataaaagcaagatctaatctggaaaaaaaaaaaaaaaaaaa

SEQ ID NO: 1933 - DNA, 2178 bp, Macaca Fascicularis
gacagcaaggtcccctctctgcagaacacgtttggcagggagagacgtaaagatcccagtcctcgggatcgggacatgcaacagttagactctaatttgaactcaacccggagtcaactcaaccaggttcaagacgatctggctgaaactgaaaagaatcttgaagaaaccaagaacagatcggccatatccctgttggctgcagaggaggaaataaatcagctaaaaaagcagcttaaaactcttcaagctcaggaggatgcccgccacagacacacagatcagaggagctcagagaataggcggtcagagcctcggagctctgaggagcggaggtgtgagcagtggagttcactcaagcggaatgcagaccagcgggacacagaagtcacatccgattataagaaacagctccgaaacctaaaggaggaaatagctgttctgtctgctgagaaaagtgcactccaaggaaggtcctccaggagccggtctcccagccctgccccccgcagccgtagctgcagccgcagcagatctgccagcccctccacggctgtcaaggtcaggagcccgtccccaaaccgctccaagctgtccaatgtggcgcgcaaggctgccctcttgtcccgcttcagcgattcttattcccaggcccgcctggacgcgcagtgcctgctgcggcgctgcatcgacaaggctgagaccgttcagcggatcatctacatcgccacagtggaggcattccatgtagcaaaaatggcattcagacatttcaagatccgtgtgagaaaatcattgacaccatcttacgtggggtcgaatgactttgagaatgctgtctcggattatgtcatttgtcatcttgatctgtatgattctcaaagcagtgtcaatgatgtgatccgagccatgaatgtcaatcccaagatttcattccctcctgtcgtcgacttttgccttctcagtgacttcatccaggagatatgttgcattgcctttgcaatgcaggccttagaaccacccctagatattgcatatggggcagatggagaagtttttaatgattgcaaataccgccgcagctacgactcggatttcacggctcccttagtcctctatcacgtgtggcctgctctcatggagaatgactgtgtcatcatgaagggagaagctgtcaccaggagaggggctttttggaattcggtgcgatctctaagtcgatgtcgaagcaggagtttaagtcccatttgcccccgtagccaaattggtttaagcacgatgtctcgaagtcggagtccttctccaataagatgtggattgccaagattttagaaccaccagacctgctcctttgccccagtgtgtggaaacagctgccttctccggtgcctccatctgccttctgtgtctgcctcagacgtcacttaagataatgtcaaaagacaattctgtgtatcgctccacacagagagttaaatgttttggcttgacacatgtgtaactttagatatattgcattctattttattttatagatactaattccattaatttcataaaaatgattgtataggcatttaggatcatattcattcgaagcaaagtccattacaaagggtcaggatttccattccaaaacactaggctcttttatgggaactatgtgaactgaagtggaaagcgtttaccatgctgaggctaaaagaaaagatgaatcattttagtttgtagatggatcattaagtgtaattgttggtatcagctttagctcaaaaccagtattaagtgtttcagtttccttttaaggtttggaagagagccctaatctcaggttggggagctcatgttagtagcagtgacttaaggctaagtgtagaagataatttaagatatattttctttatatattagcccactaattatatttattagttgtcttgtttttctgttctgattttgagagtgcccaatttggtttagttgagcaatgaatgtcaaagctacttagttgagaaaatttcctcgttccataaatgtagaacagtgatttgattagaagccagcattgagataaatgttgattacctcatgcatatctcctgggaatatttcaaactgttttaatgcgtgtgttatatataaaagtttcttgggacatgctaaaaaaaaaaaaaaaaa

SEQ ID NO: 1934 - DNA, 667 bp, Macaca Fascicularis
cctgtgcactgtaatatacaaaataacttattttgatgatcaggggtcttgacctcttgacatatacactgaaaaaaatgggggttgtatgtatgtgtgtcctacctaaacctgtagctgccacttttgaattctcttctcagattgccctgaattttgccacttttaaataacgtgctgaataagctcagcaactaaaaaccattacccaggaaggtttcttgtgagtgagctgatttattctgattcattatattccttttggtagattttataccccttggggaaaataatacaagtatagaaacaaaaacatattctcttaaaaatgctggggtggggccatatctactagcagaggccagatggtcagatacgatttctgcaaacccatcttgaccttgagtatgtgaaggggtactgcacttcattcctgatacattttggtttccatgttggtgtggagctcctggttttctgtgtttggacggtgaagatttggaccctcgcattcacagtccctttctaagtgaagggagaggctggcttggctgttccttgttattccgaaagccctggtttggggcccatgttcacactggctctcagtctggccaggtgcaatgttcttgagaggtggggacctaattattaccagagtagcagg

SEQ ID NO: 1935 - DNA, 741 bp, Macaca Fascicularis
  misc_feature (1)...(741): n = A,T,C or G
tggaccccctagagccacacctgttgcctcagggagcttgcatacatgtgggccagcctgcctgactttacccaagcagatnnnnnnnnnnnnnnnnnnnnnnnnnnntaaataccacttaaaatatcgtgaggcnnnnnnnnnnnngaaacaagtctctgaggcacaacctttatgaaaggaaggagtcttcgttagtgagaagaacagtatctctgacttcctgtgctcctctggccacctgtaagtgtgggtcacttcagatttggcttggggtctctnnnnnnnnnnnnnnnnnnnnnnnntttaatgcttacctgacggcaacttctggctctggagccgctcctctgccctgctcccagccgcttcccaacctgattcaagcggggcccctccttcctcccgtctttattcttttcttttcagaggcaaggtctcactctctcctctcacccaggctggagtgcagtggtgtcatcataactaattgcagcctcaaactcctgtgctcaagcaatccttccacctcagcgtcctgagtagctgggatcacacgtgtgtgctacctcacccagctaatttctaattttttttgnnnnnnnnnnnnnnnnnnnnnnnnnnnnnnnnnnnnnnnnnnnnnnnnnnnnnnnnnnnnnnnnnnnnnnnnnnnnnnnnnnnnccagaccagccacatttttttttannnnnnnnnnnnnnnnnnctagcttcacatcagtc

SEQ ID NO: 1936 - DNA, 748 bp, Macaca Fascicularis
  misc_feature (1)...(748): n = A,T,C or G
tttgaaacannnnnnnnnnnnnnnnnnnnnnnnnnnnnnnnnnnnnnnnnnnnnnnnnnnnnnnnnnnnnnnnnnnnnnnnnnnncgattctcatgnnntagcttcccaagnnnnnnnnnnnnnnnnnnnnnnnnnnnnnnnnnnnnnnnnnnnnnnatttttagtggagacagggtttcactatgttggccaggctggtctcaaactcctggcctcgtgtggtccgtccacttcagcccttcaaaatgctgggattacaagcgtgagccacatgcccagcctgaggccctnnnnnnnnnnnnnnnnttttcatgcattttttttttaaaggagcagtgnnnnnnnnnnnnnnntttgtgaactaagttcaataccctctatccacatttgcctaattgaactataagaaagcaataattccattttctgtcccctcaaggactgaacaaatggaaataactcccaggaagtatcagctggtcactacagagacttgtacaaaaacttttgaatgatgtgaaacacgttgtcatgaataagggttgagccaactatagccctgtgttcctactgggctttccccaacatggttgggagttacgccctagactaactgtattgtcctagtcacagctccttgctttgatttcatccttgataaaatgaagatgaaacttatactacttctccaggccttttgctgccttaagaatgagacctgacattaacactaaccctagaatagaa

SEQ ID NO: 1937 - DNA, 1894 bp, Macaca Fascicularis
acaaagctaaagagaggtgaacgagcatcaccctctcccggaggtcgtgcagccccacggggtcgctcctcccgctcctccaccctcggtgcagcggctgcctcccgagcttgctcgcggggccgttagcgccagacccggcggagggccggggggcccctccccgcctccctctcgcagcccctctccgccagtagcagcgctgctgtcttcccacaggaggacttgggaggacgctggagtctgcagcgcccccgccccctcgctttttctttctttccttggtttgggatcttgctgctggatccgggagaggttctgagaagacaagagcgagggactgagcgcaggcttccgctgcggcgcgcgaacacagccggggccacaacccccagcgtctcctcccgctcctcgccaccccggcgggaatgtgaggaaggaaagcccccagcgccgccgcccgctctcgaaggcgtcccagagagcatcctgggggcccgccgctggagcccctgtccccgcagcaccgcgggactggagcggcgaggtgcgccgggtgccgcttctcggctcccactcttcggaaagagcgcggtggggatcagcgcttttcccgcactcggcacaactctgggaccggcggcgcgcggctggactgagtcccgtttcccgccagctcacccggagtcgggagcagcccctgcccgctcgcctgcaccccttatcgttctagcttgcccgaacctgccgctcctccacgcccaggtagtgagccccgcggcttcaggtctctgcagcgccctcggccccatggacagcgcacccgtcaccacttcctaagtgctggctccgccgccgtccaagctgcgcactggggtccctcggctcgcccttctctggtgtgtccgcgaggccggggagtgtgcaccatgaagtccgttctgttcacccgcttcttcatcctcctgccctggatcctaattgtcatcatcatgctcgacgtggacacgcgcaagccggcgcctcccctcaccccgcgcccctacttctctccctacgcggtgggccgcgggggtgcccgactcccgctccgcaggggcggcccggctcacgggacccaaaagctgtatttaagcgtcgtggatcccagccagggatgcaagaatctgactttctcaaacagataacaacagttgaagaactggaaccgaaagcaaataactgcactaaggttctcgtgtggcacactcggacagagaaggttaatctagccaacgagccaaagtaccgcctggacacagtgaaaattgaggtataaattgaagcagcaactggtgcagtttgcccagtcagtgggcccatgtggaagaggatgtttggagtttaggctgcagagcattcaggtattgtttgttttacttcagtacaacagcctttcttgtcatctgatggacatctgtttaaatggagcttgtcagttaacataagctaattggatggtacaaaatgtatgttttgtcttcatttgttctgcatgttttctctacagctaaactggaagatttttgtacagtgccgatactgcaagataccactctgagtatatattttttctttttctccagtttgctcttataattggcagacctgaacaggtttttaaaacagacaagtattttgtcagctaaacattcctgattcctgactttgcaacactgagtaatttttggaaggtttctggcagtatctatcataggaaataaaaaacccacaaatgaaaaaaaaaaaaaaaaaaaaaaaaaaaaaaaaaaaaaaaaaaaaaaaaaaaaaaaaaaaaaaaaaaaaaaaaaaaaaaaaaaaaaaaaaaaaaaaaaaaaaaaaaaaaaaaaaaaaa

SEQ ID NO: 1938 - DNA, 3262 bp, Macaca Fascicularis
  misc_feature (1)...(3262): n = A,T,C or G
ctgcagggctggcgggacagcagcatggacacagtctcctggggatttcccaactctcccgccagcttgctgcctctggccgccctgcctcaggccctggtctctgatcagcaggtgacctttgcccagtgccctgggtcctcagtgcctgctgccctggagacaatataaaacaggctcagaaccctcctgcctgcctgctctgttcatccctagaggcagctgctccaggtaatgccctctggggaggggaaagaggaggggaggaggatgaagaggagcaagaggagctccctgcccagcccagccagcaagcctggagaaacacttgctagagctaaggaagcctcggagctggacgggtgcccccaacccctcatcataacctgaagaaaatggaggcccgggaggggtgtcacttgcccaaagctacacagggggtggggctggaaatggttccaagtgcaggcttccccgtcattctgcaggcttagggctggaggaagccttagacagcccagtcctacccagacagggaaactgaggcctggagagggccagaaagccccaaagtcacacagcatgttggctgcactggacagagaccagtccagaccgcaggtgccttgatgtccagtctggtgggttttctgctccatcccacctacctccctttgggcccctcactagtccccttctgagagcccgtattagcaggaagcaggcccctactccctctggcagaccgagctcaggtcccaccttaggggccatgccacctgtccagggaggggtccagaggcatgggggcctggggtgcccctcacaggacaattccttgcaggaacagaggcgccatgcagccccgggtactccttgttgctgccctgctgtcactcctggcctctgccagtaagcacttggtgggactgggctgggggcaggatggaggtggcttggggatcccagtcctaatgggtggtcaagcaggagctcagggctcgcctagaggccgatccaccactctcagccctgctctttcctcaggagcttcagaggccgaggacacctcccttcttggcttcatgcagggctacatgcagcatgccaccaagaccgccaaggatgcactgaccagcgtccaggagtcccaggtggcccagcaggccaggtacacccgctggcctccctccccatccctcatgccagctccctccattcccacccgccctgccctggtgagatcccagcaatggaatggaggtgccagcctcccctggtcctgtgcctctttggcctcctctttcctcacagggccttggtcaggctgctgtgggagagacgacagagttgagactgcgttccccccgggtccctcctttctcccagagcagttctagggtgggccattttagccctcatttccattttcctttccttttctttctttttcttttctttttttttctttctttcttttttttttttgagatggagtctccctctgtcacccaggctagagtgcagtggtgcgatctcagcggnnnnnnnnnnnnnnnnnnnnnnnnnnnnnnnnnnnnnnnnnnnnnnnnnnnnnnnnnnnnnnnnnnnnnnnnnnnnnnnnnnnnnnnnnnnnnnnnnnnnnnnnnnnnnnnnnnnnnnnnnnnnnnnnnnnnnnnnnnnnnnnnnnnnnnnnnnnnnnnnctgacctcaggtgatctgcctacctcggcctcccaaattgctgggattacaggcatgagccactgcgcctgaccccattttccttttctgaaggtctggctagagcagaggtcctcaacctttttggcaccagggaccagttttgtggtagacagtttttccatgggtcagcggggatggcttggggatgaaactgctccacctcagatcaccaggcattggattctcctaagaagccctccaccccgacccctggcatgcgcagttcacaacaggtttcacactcctgtgagaatctaatgccgcctaacctgacagaaggcggggcttgggcggtattcctctgtcacccatcactcactttgtgctgtgcagcctggctcctaactggccatggaccagtacccatctgtgacttgggggctggggacccctgggctaggggtttgccttgggaggccccacctggcccaattctagcctgggtatgagagtgcttctgctttgttccaagacctggggccagggtgagtagaagtgtgtccttcctctcccatcctgcccctgcccatcggtcctctcctctccctactcccttccccacctcaccctgactggcattggctggcatagcagaggttgtttataagcattcttaatcctcagaaccggctttggggtaggtgttattttcccactttgcagatgagaaaattgaggctcagagcgattaggtgacctgccccagatcacacaactaatcaatcctccaatgactttccaaatgagaggtcgcctccctctgtcctaccctgctcggaaccaccaggatatacaactccaggggatactgtctgcacagaaaacaatgacagccttgacctttcacatctccccaccctgtcactctgtgcctcaagcccaggggcaaaaacatctgaggtcacctggagacggcagggttcgacttgtgctggggttcctgtaagggcatctcttctcccagggtggcagctgtgggcagtcctgcctgaggtctcagggctgttgtccagtgaagttgagagggtggcagggagagccagtggggacatgggtgtgggtcccatagttgcctccaaaggagttctcatgccctgctctgttgcttccccttactgatttagaggctgggtgaccgatggcttcagttccctgaaagactactggagcaccgttaaggacaagttatctgggttctgggatttgaaccctgaggccaaacccactctggctgaggctgcctgagacctcaataccccaagtccacctgcctgtccatcctgccagctccttgggtcctgcagcctccagggctgcccctgtaggttgcttaaaagggacagtattctcagtgccctcctaccgcacctcatgcctggcccccctccaggcagggtgtcctcccaataaagctggacaagaagctgctatgagtgggccgtcacaagtgtgccatctgtgtctgggtatgggaaagggtccgaggctgttctgtgggtaggcactggacgactgc

SEQ ID NO: 1939 - DNA, 693 bp, Macaca Fascicularis
  misc_feature (1)...(693): n = A,T,C or G
gaccctgagtcaagtaggtnnnnnnnnnnnnnnnnnnnnnaagcnctgctgagttaatgtaaacagacaagtgttgatttctgtcacgtggaacggtgtttcgacagttaagtctagcacccagcagtgtcctttagtctagcacccagcagtctccttattggtagacgattctaatttcactggattcaaaaatctctgactcaagggtctttccttagtgctttttaatggatgcatgggtgaggcaaaatccaagtcattgttaaactctaggtaaaagacaagagtatgggataccctcctaagcatgccggtagttgtcagttttatttaaagtgggttccacttggccaggattggtggcacgcctgtaatcccagcactttgggggnnnnnnnnnnnnnnncagccgggccaaaaaatggtgaaatcaggtctctactaaaagtacaaaaattaggctgtgcgtggtggctcatgcctgtaatccgagcactttgaaggccaaggtgggtggatcacttgaggtcaggagtttgaggccagcctggccaacatggtgaaaccccctctttactaaaaatacaaaaattagccaagcgttgtggtggatgcctgtaatcccagctacttgggagactgaggcaggagaatcgcttgaacctgggaggtggaggttgcagtgagccg

SEQ ID NO: 1940 - DNA, 763 bp, Macaca Fascicularis
  misc_feature (1)...(763): n = A,T,C or G
catcagtttagtnnntnnnnnnnnnnnnnnnnnnncagccgaannnnngctgatccagacccctnnnnnnnnnnnnnnnnnnnnnnnnnnnnagtgaatgccttcaggccttacaactcccactgcaagttttcttctagtttcccaggagtcatcctctagtgggcagcccagagcacggtggaacctcaaaggatccatgcaaggtcatagcccacaaaaccttcatctgtggttaaggcagaaatgcaaatatgcctggctccccagggaggttctccctactgctgtgcttaaggacgggagaggaccaggtagggtgccctggacaaatgaacctcaaggtatgaactactccaannnnnnnnnnnnnnnnnnnnnnnnnnnnnnnnnnnnnnnnnnnnnnnnnnnnnnnnnnacccaggcctgaatgagaaaggaatgtgtaattcctctcttgcctcaagatttttaaaagggccaggcacagtggttcacacctgtaatcccagcactttgggaggccaaggtgggcagattgcttgagcttaggagttnnnnnnnnnnnnnnnnnnnnnnnnnnnnnnnnnctctacaacaaatannnnnnnnnnnnnnnnnnnnnnnnnnnnnnnnnnngtcccagcacctgtggtcccagcacctgtggtcccagctacttccggggctgaggtgggnnnnnnnnnnnnnnnnnnnnnnnnnnnnnnnnnnnnnnnnnnnnnnnnnccactgcactccacct

SEQ ID NO: 1941 - DNA, 393 bp, Macaca Fascicularis
acctaccccaacccccaccaactccccatcttgtccccctaaacatcttttatgtttgaattcaaacacaattcccctgagactcccagacagatctaggtcaactttcctgcggcttcttagaattctttaacatccatcatcatacgcaacatattgtatatttttatttggggacttattaccatctcaccagtagactatattccttttttatccctggcaccttgcacagttttgttttgaggaaacaaatacatgagccaatgtgcgtaaataaccaaatccaagatagatggtgataaatgctgttagaggatgctctgggggcattcagagaaaagtgaatttcttcctggtggggtcatcatggaagactttgttaatgttaaa

SEQ ID NO: 1942 - DNA, 748 bp, Macaca Fascicularis
  misc_feature (1)...(748): n = A,T,C or G
acacacaggttnnnaactcggcagggtagaatctaacccctagacaactttgagatgaaattcacacactttgtgctaaggaacatggcctaccacaatatacccttggagtaattctaaatatttaaatttctcccttactgctattcatcctcagatcaaaatttcaagctggcagatttggatttgataactcattcactttttcttttcagtttttttaatgtggcataacatgcatatggttaagtgcacaaatcttgagtgtacagtcagtgaatttttacatgtatgtatgtacctgaagcaagatatagaacttattttcttgtaaataacagctctattgagatataagtcacataccaaaaaatttaccctttatacaattcaggggtttttagtatatttacaaaattgtgcaaccatcaccaccatctaattctagaatattagaaaccccatactcactaatagtctctcattcccttctactcccagcccctagaaaccactagtctactttctgtctctatggatttgcctattttggacatttcatacctgatactgtacttaattgttttaattaattaattggtttgatatttaatatagctgatatatctattgctaacgatgaaatgtttcttaaaatgattctcatattcctcctaaaataaatcattatctatatatcataaaattcaccataaaagcaaaaaaaaaagtnnctcanagacagctc

SEQ ID NO: 1943 - DNA, 1902 bp, Macaca Fascicularis
tactggactagggcctggacctttctctgagtaggagttcgagcaggacgtcagccaagattccagaatgactaccatcttgacttgcccttttaaaaaacttcccactacatcaaaatgggccctcagatttgccataagacctctgagctgttcctcccagctacgagctgccccagctgtccagaccaaaacaaagaagacgttagccaaacccaatataaggaatgttgtggtggtggatggtgttcgcactccatttttgctgtccggcacttcatataaagacctgatgccacatgatttggctagagcagcacttacgggtttgttgcatcggaccagtgtccctaaggaagtagttgattatatcatctttggcacagttattcaggaagtgaaaacaagcaatgtggctagagaggctgcccttggagctggcttctctgacaagactcctgctcacactgtcaccatggcttgtatctctgccaaccaagccatgaccacaggcgttggcttgattgcttctggccagtgtgatgtgatcgtggcaggtggtgttgagttgatgtccgatatccctattcgtcactcaaggaaaatgagaaaactgatgcttgatctcaataaggccaaatctatgggccagcgactgtctttaatctctaaattccgattgaatttcctagcacctgagcttcctgcggttgctgagttctccaccagtgagaccatgggccactctgcagaccgactggctgccgcctttgctgtttctcggctggaacaggatgaatacgcactgcgctctcacagtctggccaagaaggcacaggatgagggactcctttctgatgtcgtacccttcagagtaccaggaaaagatacagttaccaaagataatgggattcgtccttcctcactggagcagatggccaaactaaaacctgcattcatcaagccctatggcacagtgacagctgcaaattcttctttcttgactgatggcgcatctgcaatgttgattatggcagaggaaaaggctttggccatgggttataagccgaaggcatatttgagggattttatgtatgtgtctcaggatccaaaagatcaactgttactcgggccaacatatgctactccaaaagttctagaaaaggcaggattaaccatgaatgatattgatgcttttgaatttcatgaagctttctcgggtcagattttggcaaattttaaagccatggattctgattggtttgcagaaaactacatgggtagaaaaaccaaggttggattgcctcctttggagaagtttaataactggggtggatctctgtccctgggacacccatttggagccactggctgcaggttggtcatggcagctgccaacagattacggaaagaaggaggccagtatggcttagtggctgcctgcgcagctggagggcagggccacgctatgatagtggaagcttatccaaaataatagatccagaagaagtgacctgaagtttctgtgcaacactcacactaggcaatgccatttcaatgcattactaaatgacatttatagttcctagctcctcttaggaaaacaattcttgtggccttctgttaaatactttgcacttaagctttgccagtgttctgagcttttcaataatcagtttactgctctttcagggatttctaagccaccagaatctcacacacagatgtgtggggggttgtttttggtctctgttgtcactaaagactaaatgagtatttgcagttgggaaagaggtcagctgagatttggaagtcatctttgtaatatttgcaaattatacttgttcttatctgtgtcctaaagatgtgttctctataaaatacaaaccaatgtgcctaatt

SEQ ID NO: 1944 - DNA, 730 bp, Macaca Fascicularis
  misc_feature (1)...(730): n = A,T,C or G
gcatcagtggagagcaaggctcaacagtggtgncattagttccctcggaagtgttgaaaaaacttcgaaatggaagaaaatttttgcacctatgttctgggtaccggatatctgggttctttcttctgcattagataaatgatcatgctcagtgtaacaaagggaattaaaagtttttcccacagtccccttctaggggagaaactcattatgtcactgaaatgtttagcttactttaatcttgatatcagcttttacagaccttttattctaagctatcgagcttcttcattgcattttgttgaccacaagtgaccctaaggcactgggggactgtccactgggagttggagtgagcacgtggtgctgcaacaggcattgttttacatactttgtctccagtattctgacaccaagtgtcaactgtggtactttctttgcctaggatattaattcataattgttgcttttgttgatggttgataccctttccattgatttaaacctaacacattatttctattccacatgcccagtagtcatattttccaaagccactggaccacttgagtacataagtgccactgtttaatgcaatatgtatattcaggtctgtaaacctaacagtgtgacttggagtgcttcctgcagatgattctgactgttgagtatttacatggaccatggtgatatccaaaagaaaaatgctttttatatttatagattattt

SEQ ID NO: 1945 - DNA, 712 bp, Macaca Fascicularis
  misc_feature (1)...(712): n = A,T,C or G
ctaattctatttcattaaatagtctgccacagtgtgatgtctgatgtctccttagaattttattgtatggatgaacaatgattatttaatttcctatcagttgttgggtgtttgtttgtttgtttttgtttttgcttttgagattgggtctcactctgnnnnnnnnnnnnnnnnnnnnnnnnnnnnnnnnnnnnnnnnnnnnnnnnnnnnnnnnnnnctcccannnnnnnnnnnnnnnntccacctcagcctcccaggtagctgggagtacaggcacatgccaccatgcccacctgtttttttagaatttttagagatgaagttttgccatccnnnnnnnnnnnnnnnnnnntcctggcctcaagcaatctgcccacttcttcctccnnnnnnnnnnnnnnnnnnnnnnngagccaccatgccccacccccacgttggttgtttgatgtnnnnnnnnnnnnnnnnnnnnnnnnnnnnnnnnnncactcttttatagccaaaaattacacataaacttataaaattttcctttagaaaatgttctaaaaatggaatgtctaaataaagggttaggcgtacattcttaagacttctgatatgcactgacttgcaggaaagnnnnnnnnnnnnnnnnnnnnnnnnnnnnnnnnnnnnnnnnnnnntgtaaagcttgagacaatttagaaagtgtttcnnnngattgtgttgctta

SEQ ID NO: 1946 - DNA, 692 bp, Macaca Fascicularis
  misc_feature (1)...(692): n = A,T,C or G
catatttaaataaaacatatacatagaaactttaaaataatagtgcgcttttccctctaaaatgagagtcacctacttaaatctgtaggtttaaatacatgggatcatgatttttgaatatggtaggaagttaaaattgcattgcatttattcatttagtaaatatttgtttcattcctattcagtataagatattgatactgtattagttattgaaaattgaaagaagagtccctgcccctttaaagcttatgttctgcagaagaaaaaaaaaaaacagctattaaacatttaattacttaacttttcacttcatcatgaacaaatttatccaaggtaatattgagattgttatcaagggaaatatcttgagaccgaagaaagaaggttgcaagagtcttttgnnnnnnnnnnnnnnnnnnnnaannnnnnnnnnnnnnnnggaattggtcagggaaaagtaggcagaagatgcttacaagaagaggataaaacgtggagagagannnnnnnnnnnnnnngatcatgtgcatttatgagacttaaaatggttcatgttcctgggttgcataaatgggggacaaagggacagnnnnnnnnnnnnnnntcgggattaggcagagactagagcaggaatagcagcacaatcatatccttccatctaaagttcaacaagtatnnnncttccaaag

SEQ ID NO: 1947 - DNA, 756 bp, Macaca Fascicularis
  misc_feature (1)...(756): n = A,T,C or G
tgcccggggtggtgcggacatcgccctgctgaagctggaggccccagtgccgctgtctgagctcgtccacccggtctcgctcccgcccgcctccctggacgtgccctcggggaagacctgctgggtgaccggctggggtgacattggacatggagaaccactgcccnnnnnnnnnnnnnnnnnnnnnnnnnnnnnnnnnnnnnnnnnnnnnnnnnnnnnnnnnnnnntctattgccgccgctttccttccaaccacactgagccgtctgagcagctcatcaaggacgacatgctgtgtgccggggacgggaaccacggctcctgcctgggcgacaccgggggccccctggcgtgnnnnnnnnnnnnnnnctgggtccaggtgggggtggtgagctggggcaccttctgcggtcacagcgacgtccccggcgtgtacgcccgcgtgacgagctacatgtcctggannnnnnnnnnnnnnnnnnnnnnnnnnnnnnnnnnnnnnnnnnnnacgtgacggaggagaccccgccttccttgtggacaccttccgcccctccccagttcnnnnnnnnnnnnnnnnnnnnnnnnnnnncctctgcctgggacccacatttctgctgccctttcctgcctctcatccacgtcccgtccttctcgagggagaggcctgggcgcctctgcagnnnnnnnnnnnnnnnnnnnnnnntgtgcgtggggagcagaggcccggctctcctgcctcctgcccagcctggc

SEQ ID NO: 1948 - DNA, 737 bp, Macaca Fascicularis
  misc_feature (1)...(737): n = A,T,C or G
actacaggaacaaggtgtataggnnnnnnnnnnnnnnntcncatgcagacagctcagtctgtttcctttgcctgaacccaagctggtcctgcttcttcccagtcctactcagcctgttgaagtctcccttatcatcaaacagagaccatgtgagtctgactcatgtatatttttccattattaataataaaattttaaatatcatgttttaaattagaaatttaaccactttatgtttagatcaggtcacagttctaatctaacttataaaacattcagaattacatgttttgtgagaagtacttttttttggttcaaacttgtattacaaggttttcttgagtttaagaaatcaatgacagctatatgaaaatgtctaccccaaaactgcattttctcactatcatctcatgggctctcagatttaagaatgtcttctgttgtggaatcaaagtagagcaagagtagtatgtgaaatgcccttgccttgttactaatatcaatgtctacggcaaagaggacaaccctcagctattcaattagttatnnnnnnnnnnnnnnnnnnnnnnctaattttctcagataaaatatttggttttccatgaaaatacatctggtaannnnnnnnnnnnnnnnnnntactataactagtcgttcaccaaccattcactcattcactcactcactcactcaactcattcaatatttaaatagcacttaccatacaccaggaatgc

SEQ ID NO: 1949 - DNA, 466 bp, Macaca Fascicularis
  misc_feature (1)...(466): n = A,T,C or G
gatgatgtgggaagagagcgtgntgnnngnntcagtagccggcctnnnnnnnnnnnnnnnnnnnatattcagggannncccctgnntnngggcagtcgccggcgcctgagggagccccatcggccactgtgccttgtgggcaatacttggggtcatatatctgtcggcccaggccaaagacctggccgctctggttggcgccctgcgtgtagcccatctgcagggacatggaggagttgtcacacttgtcggttnnnnnnnnnnnnnnntagatgtgccgccgcgtcccgggagccgtcatgcccacctggctcgcacacttgtttgtgcccatctggaggctgatggtcgagtnnnnnnnnnnnnnnnnnnnnnnnnnnnnnnnnnnnnnnnnnnnnnnnnnnnnnnnnnnnnnnnnnnnnnnnnnnnnnnnngcgcatttgttggcgacgatcggcaanttgat

SEQ ID NO: 1950 - DNA, 772 bp, Macaca Fascicularis
  misc_feature (1)...(772): n = A,T,C or G
gattatgtagaaaatgaacagaccccnntccannnnagaccctnnnactgtgtgaagagatgatacctacaaggagtatcattacctgtgagttgactgaatgttggtaggtgctccatcacaatccannnnnnnnnnnnnnnctgatagtttgtggaaatctttatttcatttcaatttacctgttagatggtaaaattaagatgctacttgctggtaaaaattggtggactggtttcnnnnnnnnnnnnnnnngtagcaaattaatatgttggaatattgctctttgggaatttgtgtttaatttaatgaatgtgtagtatttccttctgacaagtgttccctattggaattttaaagctatgtgcacagaatactagtctcttctacatgttttatttttctatttacaactcccttttttgttgttatattttatacacagaatcgatcttttttctaacacatatttgaactgaataacagacttaaagaaagcctttgttcacattactatttacttattgtgtttgggggaaaatatgagggattgattttaaataaaaagcattccatctttcatttaatatcaatatcaaaagaagaagacaaacatctatctttctcatctatatttaagtacctttttgtaatgtagtatcaaagtattttaggtattgcaaaattttacaaatcatttgtggaatgaatggtaaaactaatctgatgaagtggaaaattattctgcaatatnnnnttcatagttgacttt

SEQ ID NO: 1951 - DNA, 542 bp, Macaca Fascicularis
  misc_feature (1)...(542): n = A,T,C or G
cccaaggactcactggcccagctgctccgggtgctgcaggacctccgggaggcccatagctccagcccggccggctccctgccctcagagcccaactgcctcctggagctgcagacgtgaggcccgccctgcgctcccgttgctgagtcccctgccaagcgctcggagccccccgccctggactctgcacccctcaccccggtcctcctcattagggtgcagggcctaggtctcttccaagtgggggagagggggagtcaggaatgaggggatccccagaagtgcagagctgagcaggcctgggcctgtcatggctggnnnnnnnnnnnnnnnnnnnnnnnnnnnnnnnncagccatcactgcctctccagggaccctcctctcccgcctaggacagacccagccagaaccaccactaggacgggccacacccgggcgtctggcctccagggacctagagaatgggagggagaacggggccccaggagacccggccgccaccccacccgctgcccttgggtggcacagggctgtgctgtgcc

SEQ ID NO: 1952 - DNA, 445 bp, Macaca Fascicularis
atcccaccccaacctccatcttcagtgccaggagcacagacgtgtagggccagagcccgtctagaggccactaggagctgagacggtgccaccaccagcacctcccaccagctcaccgctatgcgtgttgaggggtgctgtaagaaggccatgcctatggggggccacaggagtcccctgtatgttcagggcatctggaagccgccggcctgttccacctgctccgtctttgtgggggctctcaggcttggcacagacctgacttgaactctgggtgattccgggcacccacagaactgggagtagggggctcttcaggcagccacaaggcaggaaaactggcgcaagtttcctgggcctccctctgacttctaggcgccagatccggccatgcccccatcctggctattgggggtagcctgagcccaccttgctggcctttccc

SEQ ID NO: 1953 - DNA, 1744 bp, Macaca Fascicularis
aagagatctcaaagcatctttgagatggaggaaagcttgccaggagaacaattgcacatccctccactcctcatgttctcagtttgttcttctctgtgatgcaaccggtatcatgagaacagccagcagcagctccagcatgatgaaattttcactccttgacaagtgtaagaagccgaaaaactatgcccagccagaagttttgtgtcacacgtttgacacactgtctaacctccacaagctgcttcctaatcacctaatggagacgctttattcatacaggagtgaagaggacaagaaaaaatgtgagaatcctgagctctctggcttggaaagaatcttagcaagacatgaattgccaaaagagattaatctgaccccaaagccaaacagaatgcccctgtggaaaagaaaaatcatcaacaatgtaactgacgggtggaagaaatgtcacttgctgacgagaaacacgaaagagcctccaatgtccaccatagttgtcagatggctgaaaaagaacatgcaacccaccgaagatctcaagtcagtgatctgtaggctgtccgcatttggcccaattcagtcagtcactgtttgtggacgtcaaagtgctatagtggcattcaaagacatgacttcagcctgtaatgctgtgaatgcttttcaaagtaggaccccaggcaccatgttccagtgttcctggcaacaacgattcatgtcaaaagacaaaacttattcaaaaaaatgtacccagaagacacagcctaaggaatgtaagcaggaaactgagaaaactgccaacaacagctaaagggacacaaacaggaaaatcacggtgccttttgggtatatcagaacctacctgaagttcacaaactctaaacaatgaatactcgactctgttgtatgaagtagccacaattaccaaccttcctgcacaaatcaaacaagacataccataaaataggaatgacgctgaaactctacagcttttgcgtgaaacacatagaagaagaaaagaaaaacaggacaaactccgagggcaggctccacctgactagaagattccaatgaagaactcaaactggacaccaaatccacatagttctgcctggcagtttcctgaatggaagatgacaaacagcctcagcccatggtcaatgaataagcacgttgagaaagttactagactaataactagcatcttgcaatgacgaaagaataaaagcacatcaagatcttgaaggctccatttataatggcttaatgagaagcaccaaacttctttagaatgacagcaaataaaagcagagtaactagtaaattcaccttgggcaggctgccaagggcattccatgcatcccatttggccttgttgatcaagtcaaatacacctggtttgggcatgttacaaggtccttcagtggcctgtgaaaaggagaggggcaatatagtcaagtgaccatgtaaactggacccctaaatatttaagacccataaaatccacaagcgcatgaatgcctcccccaaatccttttacagggtatgtaaattgatctgaattctcccctccagtctttttggtgttattgccaaaaatgcacaaacaacagaaaaaagactggaaataaataactgcctgtctatgaaaataaaggttttggggaagtactttctaaaaaaaaaaaaaaaaaaaaaaaaaaaaaaaaaaaaaaaaaaaaaaaaaaaaaaaaaaaaaaaaaaa

SEQ ID NO: 1954 - DNA, 796 bp, Macaca Fascicularis
agggggtagcctggttgggcggagttgagaggggtgttgggggcggagaaatgaaagtttcattacaaaagttaaggtaacaaagaatctggtagaagtaagttgtggatagtaaattaagtttcaaaatctggcacctttcagttttgtcgcagcctccttgtttttgacaatgcaatcatatgcttctgccatgttaagcgtatttaacactgatggttacagtccagctgcgcaacagaatattcctgctctccggagaagctcttccttcatttgcactgaaagctgtagctctaagtatcagtgtgaagcaggagaaaacagtaaaggcagcgtccaggataaagtgaagcgacccatgaacgcattcattgtgtggtctcgcgatcagaggcgcaagatggctctagagaatcccaaaatgcgaaactcagagatcagcaagcagctgggataccagtggaaaatgcttaccgaagccgataaatggccattcttccaggaggcacagaaactacaggccatgcatagagagaaatacccgaattataagtatcgacctcgtcggaaggcgaagatgctgcaaaacagttgcagtttgcttccggcagatccctcttcggtaccctgcagagaagtgtacaacaacaggttgtacagggatgactgtaccaaagccacgcactcaagaatgcagcaccagttaggccacttaccgcccatcaacacagccagctcaccgcagcaacgggaccgctacagccactcgacaaagcttatgccaaagctgtag

SEQ ID NO: 1955 - DNA, 960 bp, Macaca Fascicularis
  misc_feature (1)...(960): n = A,T,C or G
gtaaagccgttgntncnnnnnattttnaaatcagtcagtgcaaatgtcagatacaatgtatttatttaaaagattcatttttaatcatgaaattacttatcatccacattgttttaaaaagaaacaagatgctggatgtctgccaatttttgccttcattaccttttttgataaagtttctcagatccttgtttcaaacacaaatgcagggattgctgccactttttaactattaagaggcagaaaattgcacaatattgaacttttttccactaaagtagtgtgcagttatagtttgcattcctgatatgatttaaaacatgtaatataaagatgttaaaaaaaaaaaaactgtgcagagtctagaagttctctgtcatcttcagcttgtgcacaattctgttttaggttaaaaaaaaaggcattgtttgagctgtcccatctccactgttatccctttgtggttttttaatataaattattagtttatgtcatttttgtatctacatcttttttcacaaatttgtcttgccttattaaagttctgtaaaatatacttaaatggaaaaaatgatgttcatttagattgaaaacttttctcagatggattgataattgcattcatcttgtgttttatatgagaaggtgcctcaagaattccctgttggatttgtttaaaagaatttttatcttctgtgataaactttgctgtgtaccaggaactataaaaacaaaaacttgttactaaagaaaatatctgaaatgtgataagttcttatgccatgttaatttcatgtgtcaacttcaacatttacatgtattatttcattatgtaaaatgttttagcaatttaatattttgcacagttagcaaactttgtatgtcatttccttcaaggtatcatgcagagtttacatgaaatttataaggttttaagttgtttgcannnnaaatcaaata

SEQ ID NO: 1956 - DNA, 728 bp, Macaca Fascicularis
  misc_feature (1)...(728): n = A,T,C or G
tagcatcagttaacagnnntatggacgattgctcagatgaagagcttcagaaaagtgtagtgaccgctgaatttttagggcacttttccttaagaaatagaacttgatttttatttgttacaggtttccagatggctccagaggactaagcaataatgtagattgataaacccttattttagtactaaagagggagccttgctatttcagtgggtataatttaaactttttaaagaaaatctgtacttttataaagatgtattttatataacttaaataataatgctaaagcatactagggttttttttttcttgagaatgttactgcaattatgttgtagtttgcacagatttttatgcataattcactttaaaaatatagaatatatggtctaatagttttttaaagcttttggactaaagtattcctcaaatcttacctcttcaggtcactgatggtcactccgattctgagtgccgcattggtagactcctaaaatacaattgacaacttagccaattgcaactccagtgttgatagttacaatgaaacagaatagcagcagactgtaaggtctttagagatttttttttaaggttcaggcaataggtccctcagagaatctcttaaggtttgcccaaagattggtacttcctttcagtagggcgctaatgtatacacattaatgataagttgataacataaaaaatgtagctgactatcctat

SEQ ID NO: 1957 - DNA, 137 bp, Macaca Fascicularis
agccacagacgctatgggacacgcgtcttctcatggaaagggggcgcgcacagagagtgtctcggggcacgagagagggagaggggggaagaatatgcagatctgtggcccccgtgtggagagagaatattgtgaca

SEQ ID NO: 1958 - DNA, 717 bp, Macaca Fascicularis
  misc_feature (1)...(717): n = A,T,C or G
ctnnnaacttcacagaggccacgaccttccacaaggagcgnnnnnnnnnnnnnnnnnnnnnnnnnnnnnnnnnnnnnnnnngnnnnnnnnnnnnnnnnnnnnngaacgcccacgtcttcctggggcgcttcgacgtggctgctgagtactacaagannnnnnnnnnnnnnnnnnnnnnnctcagggaccaggcggtggaggcgcaggcctgctatagcctgggcaacacgtacacgctnnnnnnnnnnnnnnnnnnnnnnnnnnnnnnnnnnnnnnnnnnnnnnnnnnnnnnnnnnnagnnnnnnnnnnnnnnnnnnnnnnnnnnnnnnnnnnnnnnnctgggaaatgcctacgtgtccatggggcgcccggcgcaggccctgaccttcgccaagaagcacctgcagatttcccaggaggtgagccaggcctgcccccaggggccccaggcactgcccagcccactccagacgggnnnnnnnnnntctgtnnnnnnnnnnnnnnnnnnnnnnnnngccgcccctcatcctttcnnnnnnnnnnnnnnnnnnnnnnccttctgaggcctggtgnnnnnnnnnnnnnnnnacctgggggtttttcccgcagcccccagctggtgctttcctgggcagctgcgtctcctcctccttggagaggttgcacagggtctctgtgggctctgtccattagcaccctcctactgtggtcagggcg

SEQ ID NO: 1959 - DNA, 784 bp, Macaca Fascicularis
  misc_feature (1)...(784): n = A,T,C or G
cactgacacagcagagacaccagtactgagtgagcctgcnnnagacgnngaacncaccagcccngannnncccannccaaggagtnnnncacgacagggannngggtcctaacaccaccatcaaacnnncttaggccatgccaagannnnggacacaggacgcacccccggcacgcagaagaggagttcttgctcactaaccatatccgcctcgtgcccctgcctcctggagcttcccgttccaggagaaaaggctctacttcccagcctttccttgcccctgacatctggactcttcccttgggccaaccactctgttctcattctccttcccaccgccatccatccgtccttcttagacaaaccactcactggctaccccacctcctctctcatatgcccaacacgaccactgcctccctgtccccacacctgcacccaaacagacacatcaactcatcccactcactaacacccctcaccccacccccactgtacagagaccaagaacagaaattgtttgtaaataatgaaccttattttttattattgccaatcccctaagatattgtattttacaaatctccctcttcccttcatccctcccttgttttatattttatgaagttagtgcgggctttgctgctccctggcccaggaaagagggacacccgaccctcacctggcacccccctgctgctgcccaagctgctgggcctttttnnnnnnnnnnnnnnnctcttcatcagctcagcacatgcnnnagaaagcaaaactaaaaaac

SEQ ID NO: 1960 - DNA, 732 bp, Macaca Fascicularis
  misc_feature (1)...(732): n = A,T,C or G
taatattttaaaactatttgnnnnnnnnnnnnnnnnnntgtttggtttcagtaaaggttagtcttgatgatatacataataatctttctaaaattgtannnnnnnnnnnnnnnnngtcagaataatgctaggcatatgctctttcctaaatatgtatgtacagagtatttggaagttaagaattgattagactagtgaatttaggagtatttgaggtgggtggggggaagagggaaatgacaactgcaaatgtagactatactgtaaaaattcagtttgttgctttaaagaaacaaactgatatctgaattttgctgtgtttccattttttagagatttttatcattttttttctctctcttttggcattcttttatctcatgctcttcaaaaggcagttctgcannnnnnnnnnnnnnnnnnnnnnnnnnnnnnnnnnnnnnnnnnnnnnnnnnnnnnnnnnnnnnnnnnnnnnnnnnnnnnnnnnnnnnnnnnnttgaatttaataagcagtttttacggagtttacagtacagaaataggctttaattttcaagtgaattttttgccaaacttagtaactgttaaatatttggaggatttaaagaacatcccagtttgaattcatttcaaactttttaaatttttttgtactatgtttggttttatctttcttctgttaatcttttgtattcaattatgctctcgtacattgagtacttttattccaaa

SEQ ID NO: 1961 - DNA, 1066 bp, Macaca Fascicularis
tcaacatccgattgcaggtacacatttagagtcgtgactaagctaacggcctcaggggctagcataatggcctactcccagggtcccttgcggcgcggcggagcagcgaatggcgagccccacagtctcgcgttagcgctcaggcgctgttcgcggcctctttcttcgctacaagcagagctcctctgggggccgcccagagcctacagttcctagaaagaaaagacgcgattccggaaacagaactgcagttaagaccctcgaaaagatctaagaaagtgtgcatcctaaaacacctgacgaatttcaggacgtgacaaagcgcagaggttgcattatttcaaaacaaaacagaaggctaaaattttcaggaaaaagcaaatcagtaaaccgtgagtactggactggattgtaagcaagatttgaatgagtaagagctgaaggtattaagatagtgatatagaaggtacatacttcttcattccacaagagaaaataataataatcagaaactttcagtgaaaaaaagcaaaactgtacaggaaaagcatcctccaagtaccagacaaaatgctgcaagcttttgaactaatggcgagagtgtgagaaaatgggctctattgcaatgctcctgtggcaggacgtcgtggatcgaggcttggaaccgcagaaaaggaaatcccatagtagcacaaagcttggctgttcagtgaataacatttaaataatcgtaaaatacaaatgtagttatggtttttattgtttaagtacataattatggttacgaagtggaatgcaaatgttatttacaatattttaaaaagagagccggaaatacaggtgggaatgttgaaggagggcggcgggaataaatggaatggtggttctgtccttataaagtgggaacttgaaaggtactgtctgttgttgagtgtggaatgacttttattacagggtagccataaagtttctaaaacggtaatataaaaaagagggagagtggtaggggagaacagtatgaagtcaacaggaaatgcctaaagatggagcgctcaggtagaatatt

SEQ ID NO: 1962 - DNA, 660 bp, Macaca Fascicularis
  misc_feature (1)...(660): n = A,T,C or G
gcnttctgtacccgttaccaacaacattgtcctgtccatgtaggggaaacttctgggctatattacaagtgggtatgaaggtataaggatatacacagtgggaagtattgcttagaatgccagtacttgtttgctgtggaaggtttctaggaatggattgcttaatctaagcactaccaccgtccacgttttcacttaacacagtgccttttaattggtgactaacatcaaaacaccttaacaaaccgttaaaacagtatcagaaaccacgtgtacatccctgtgcctcttagattgctaagtttctgctctcgttcttacttcaaaggacactttttaaagaactgttaatgcttttttataatacaagtcatagccatgttggcaaaaagaagaaagatttggtgagaaagaaaaatcactgaaaattccatcatccagggagaaccactgttatttaagtatatggccttccagacttttctgtgcatttatagatttttttaatgggatcaaagtgtacatactgttttgtaactttttttcactcaacaataccatgactgtcttgctgtatcaagtatatttctacatctcttaatggctgcatgaaattccatcgtatgtgccacattttattaaactactgttgaattttta

SEQ ID NO: 1963 - DNA, 1110 bp, Macaca Fascicularis
aaaaaatctttctcaagcctctccaggctcggggtcgggaacgagcgagggttcggcggattcggggctctgaggccacagatggggcctgtgagtgaggaggacaaaagagaaaggagaagtttggttggaaatcccagagattgttcatcatgtgagaggagccgtgcatgcatttcatgccatactcacaccatggatggagaaaaaatcaaggttcactttctgagaatggccctgggggcactgcagctagtgcctgtgcatctgcagccctgccgaatgcctccaggtgaatcatgccaccccaagcaagaaagggcccagttgccaggagcctggaggcagagaactgaggagccagcccctgacatcagaatggagcttaaaggttggctgggtgtgactctttgctgtggacaggttctcttgggaaatctactttaatgaatccagaggagcaatttgtaatcagcccatcaaatgttcagcgacagttagctggaatctcattgctggactctgtgccccccagtggatgacagttctccatcagggtctgcagttctctaccctggacctgctgcatcctggagcccccagcagtcaggtactggctctcagaactgcctgcgtcccattgccctgagctgctgtctgccagggctgctgttaaccaggcccacagggctggatattcccccaacagggcagctcccagtccaagcccaattgttaccagcccagaaagatgtttcaggatacccatttcctcccagcttccctgccctctgcagctccagctggtgcaccccatcttcctctccccctccctgctaggctgggccccaacaggagacctttgaggtgcctgagcttattctctgaccttgagtactcttgagctactgcctcactctattcctcacttttcttcttcttaaggtttctaattggattttgccagtgtatttatttcaaaacttgtcatcttactgacctcgctcatagtctcttattagttttccagttgattctcttgagttttctggataaacaataatatcatgtacaaataaaaaaaaaaaaaaaaaaaaaaaaaaaaaaaaa

SEQ ID NO: 1964 - DNA, 697 bp, Macaca Fascicularis
  misc_feature (1)...(697): n = A,T,C or G
ctatatatnaagannnnngtaactccactgaattggatacaaggatcagnntggaaagatggaaagaaactcatgatgaagttgcacccggtttttgtatatttatcaaatttgtgctgagaatagtgtctgattgcacgacttttaagcaaagttgggtgttattgggtgaaaatggcccagctcctcctgggagcacagagcggcaaagggctgatcctcttgctctagtctctttgctgtctggtgtagctcttctgctgctcccatctgcactaattgacccaaaatgtgggtgtttcctgctacacaaaagccaaaagctttcacgtagattttaggttcactaaagggtgcccacaaactagagatgaattttaacttaaattttaagcttgaagattaggtactatctatgaagttacacttttttttttttttttaaggtagagatgtgagtgtgtgtgtaggtattaaaaatgtgttgttggtttccaaaaaggaacactggaaaataaattttgaatgtttgtgttctcagaattaggttgacagtcctttgctgacgtggctttgctttgtgtaatatacatgggatctcaatcttcggggtgtgatgaatagcgaatcatctcaaatcctcgagcactcagtctagtgaagatgttgtcattatgtacagtaaataactagttta

SEQ ID NO: 1965 - DNA, 766 bp, Macaca Fascicularis
  misc_feature (1)...(766): n = A,T,C or G
ggtgtggtgnnnntcaccatgctgtatggccagnnnnnnnnnnacgacagcatcccgnnnnnnnnnnnnnnaagatcaaggctgccgagtacaccatcnntgaggatggacgggtttctgagaacaccgtatgtctcatccggaagctgcnnnnnnnnnnnnnnnnnnnnnnnnnnnnnnctgccgatgtcctggaggcccnnnnnnnnnnnnnnnnnnnnnnnnnnnnnnnntcatctctgagtgggcctttgcaagtagttcctgacatcgatgaccaaatgagcannnnnnnnnnnncccaggaggtgaaggtgacggaggagtgctcccagtatgagtttgannnnnnnnnnnnnnnnnngctgctgctggccgaggnnnnnnnnnnnnnnnnnnnnnnnnnnnnnnnggtgccnnnnnnnnnnnnnnnnnnnnnnnnnnnnnnnnnacggctgggccacgacgcacagcccatgacctccttggacacggcnnnnnnnnnnnnnnnnnnnnnnnnnaagtaacagcctcagccagggccaccagcactgctgccacctcttccagccccagccaaaggcatggctgtcagggctgggccctgtagtgctggactctcccgggccgcaacagggacagggcagggacagggacagcccaggtcacatgtggggtcagcagaggtaccacgaagnnnnnnnnnnnnnnnnnnnntcgattgtttggtttttnnnnnnnngaagcctagataactaatctgctt

SEQ ID NO: 1966 - DNA, 758 bp, Macaca Fascicularis
  misc_feature (1)...(758): n = A,T,C or G
atacataannnnnnnnnnnnnnnnnnnnnnnnnnnnnattacagacacagaaattaggagataatatatgaggacatctgagaatcagtcaaagagatataaaacctgaataatgggagcacgtcaaagtctactgagtgacagtctccttactttacaaagaaaggctggcccagtacagtggctcacacctataatcccagcacattgggaggccaaagtgggtggatcacttgagcccaggaatttgagaccaaccagcctgggcaacatggcgaggcctgtttctataaaagtttttttttaaatttttttctttttattatactttttaagttctagggtacatnnnnnnnnnnnnnnnatttgttacatatgtatacatgtgccatgttgatttgctgcacccattaactcatcatttacattaggtatttttcctaatgctatccctccattgcctcacccaacaacaggccctggtgtgtgatgttccccaacttgggtacaagtgttctcattgttcagttcccacctatgagtgagaacatgtggtgtttggtttactgtccttgagacagtttgctcagaatgatggtttccagcttcatccatgttcctacaaagacatgaactcatccttttttatgactgcatagtattccatggtgtatatgtgccacattttcttaatccagtctatcattgacagacatttgggttggttccaagtctttgctattgtgaatagtgctgca

SEQ ID NO: 1967 - DNA, 733 bp, Macaca Fascicularis
  misc_feature (1)...(733): n = A,T,C or G
gtagatccatatnnncataannnnnnttcagtttgaataacttcctttatttaatactgcatgtacgtgaaggattctatcagtgtttgtttcttagaaaatgtttttattcaactttcatttttgaaaaatctatttttaaactgcatatataattctaggttgacttttgtttagcactttaatattctattgtcctctggctgttgtttttagatacttggtgtcgttcttatctttgttctcctgtatataatgtctcccccaaccccatcccacctcaccctcacttttgaaaaaacaaagtcgggcatatttaggcataatttgcatatggtaaagttgacccttttaaggaatattgttctatgagttttgacaaaggtaaagagttgtgaactactatcacaatcatttttagtgtatctgtaagtctgtaaagtcctctcatgcccttattattgattttctatcctcaccattggtccctagcaacccttgatctgatacctactgctatagatttgtgtttggaggcatcatgttagtggaatcacatagtatgagctggttgtgtctggcttctttcacttgatataatacttttaagattcatccatgttcttgcatgtatcactaattttttcttttaatgtgtgagtagtattccattatatgtattaccacagtttgtttatccattcaacagttaatggactttgagttgtttcca

SEQ ID NO: 1968 - DNA, 894 bp, Macaca Fascicularis
  misc_feature (1)...(894): n = A,T,C or G
aaaagtacctaaacattcatgaaattattattattttttnttgctgaaaaatgctggcaagaagaattttaaagcttaaaataggtggtaaatttgaaatatgagtgtgttcaggagaaacatacgcttttcaaaaaaatttgtattcaaggcaaagcaaggaacatcttgagatatgtctcctaagaatataaagatgtattattttaagccaaggaactgaaatatgtctcagtttataaattcaggtatattctttttgtctccatggcaaccataacttttgaaccaaaaaaaattttttttacatctttatgctgaaaatgtgtttaggaatatggtcaggctgaatttgctgttgctccctaaccaaatccacctcctgttttccctgtgagtcaatggctaaatcaaagatgcccctgagaagagacttaatccaagcctggttgtactagtggcatcacttagaaataggctgtccctcttcctagtagatctcaatgttttataatttcttaaaacagctgaaaattgggacaacatactttacgcaatgaacagtagttaaataggaaataaattagttccatataagtataggcctagagttttaattacctttataatgtttcttcaacaaaagtgaaacttagatacaattgtgattggatacttagatactaagtgaaacttagtgtaacaattttgatctgttaaattggattttacatgtacatttgaatgccagaatttctaaataaatcccctggttaggaaattttaaaagtcaaagcttgttttcttcaaccagtaccttctacattggttgacttagaccataagctttttaagtttctcattgtaatttaccttctcatgcagattgctgat

SEQ ID NO: 1969 - DNA, 708 bp, Macaca Fascicularis
  misc_feature (1)...(708): n = A,T,C or G
ggccacaagtcnnnnnnntctgggtccgtgggcgagtcttcatctaagggaccaaggtcagcagaaactagctggggtaatcagaattagttttnnnnnnnnnnnnnnnnntttttgcgctttaagctctatagagttgttttaaaaaattaaaaatcttagagacggttccctttgcatttgttcacaaactactcttaacaccannnnnnnaaaatggcatgatcaaaatgttataccttaagcattttttttttttttggacttagcaatgtaaagttgaaatttccttctttttacagtatttgcttgtaaaccacaaagtactcctctacagactccgtaattctattcttcatcaatcgaccaagatactaacaaaaccagggtaatcaagacaattattgaagaggtggcacccgacggtagagtcctttcatctatggttgaatcagaaaccaagaaacactactattgagctgcatcaagaggaaagtcctcccttcacacagaccattatatacagatgcacggaaaacaaagtctccaagaagacacttctgtcctaatggtctatggaaacaggttcactccctgaaaataaggtgtctacaaggtgttttgtggtttctgtattttcttcttttcactgtaccagacaagtgttaatggaaagaaaaacaactttctgttctcatttactaacga

SEQ ID NO: 1970 - DNA, 739 bp, Macaca Fascicularis
  misc_feature (1)...(739): n = A,T,C or G
ctcccagaagcgannnntnncctggggcttcggnnnnnnnnnnnnnnnnggccacgcagannnnnnnnnnnnnnnnnnnnnnnnnnnnnnnnnnnnnnnnnnnnnnnnnnnnnnnnnnnnnnnnnnnnnnnnnnnnnnnnnnnnnnnnnnnnnnnnnnnnnnnnnagtgggtggtctgtttttctggggggccaccaacacctcnnnnnnntctaccatgtacccaaaagcagtgcaggacctctnnnnnnnnnnnnnnnggagcctggcttgtgggaagagcagcatcattgtggccgccgacgannnnnnnnnnnnnnnnggcccgtcaccgacctttggggaactgggctatggggaccacaagcccaagtcttccactgcagcccaggaggtnnnnnnnnnnnnnnnnnnnnnnnnnnnnnnnnnnnnnnnnnnnnnnnnnnnntccttggtgatagcaagagacgaaagtgagactgagaaagagaagatcaagaaannnnnnnnnnncaacccccnnnnnnnnnnnnnnnnccggagattctccgactccacacctctcgcggcagctgtcatttccacgtgcactgggacgggaagtccaacgaggaattgaaaaaggcaaannnnnnnnnnnnnnnnnnnnnnnnnnagnnnnnnnnnnnntccgttttacaaatgatccaacgttaactacctttttttctgtatgctttccaaagtccctttcgccctt

SEQ ID NO: 1971 - DNA, 732 bp, Macaca Fascicularis
  misc_feature (1)...(732): n = A,T,C or G
acacagaagactgtcaccactctgacagaaggctgtccttgtgaggcccagacttccagtggaacactcagacttgttcattctcttcctccttcttctgctctcggccttctgacatgggtgactctcagaaaatacttgctgctggcaaagggcctttactcaggcttttgctttgacttgatgtcgccaagggactgaggccattggcaggcttagtaccacctgctcctcatcttaggagcctccttttcaagtaattaggctctgttcccgtttgaaaattctgcttgggctgatattggccttcacctgtgactggacactttactagaggcccattttcactaaacaataaaatctaaataaattggaaggaataacaaccacaaaggaaagaatagagttggtctggattgatgatcactgaggatctgtatgtgaagcacccagaacagtagttttgcttcggagtcatcttcacacatgctcttttctctgcctggatctctcttcccctccttacctggccagtcctgtttattatcaggcctagtcttggatatcannnnnnnnnnnnnnnnnnnnnnncccctctaacctaggccctcattactggctctcatagcatagtctactgctttgtacgcactcttaagtatcctttttgcatttaattagcctgtatatcctcagaactttgtgtaatgctggagcatagtaggcagccgt

SEQ ID NO: 1972 - DNA, 1731 bp, Macaca Fascicularis
aaagactgcatcacatggcatttgttatttttagagatattaataagtccttaagaaaaaaacaaaaagccatatggcctctacctggaatctttcatgtcagaaagggccactatttctaaaatgttgaggtcattccgaaagtacatattagggaatgttagtttaggaaagagtttgaattttagaaaagttgtgagagaaacaaatgattcaatttatgggggtatttcactggcatcattaaaatagaatatttgaagaatagaagtttttaattcctaacttgactttgttggctttttacatggatgatatattgggactcctagaaccataaagtataaactggattcagaaggtctctaagaaccaaactttgaacatacacactctaactcagaagactggaggtaaaggaggtcaggtcagtgtgcatatttgtgggaaggtttggttatatgcatgctaattattgaaatcaggcagataaatgtagaacttttggaatctgcgtgtggaggaaaagaaactcaggcccactgtgggaatttcccagaaaggggtgtgaatctctattcttagctggagttagaagtctctattttttttctttttgagaacaagataggtattaaataaatgaagtaaatgaaaataagttagttggactgctaatagttttgagtgggtggaaagattgagaaggatcctagacaaagaaagctgactttcaagctaattgttccaaaaagacatcacagaagggagggactaagaaatccattttcagttttattttgatgaagccattcatttttggaactacaactactgtctaaaaagatacctcaacttggtaatgtgtagtttatgaatcaatcatccacaggattttaggagaggaagcaaataaccattcctttaatacattttcttttctcctaaccagtgtctagttgcagagtgtgcattgaaaatgaaagggaactggcgttggttggtgctatttgtgactgataattaggcaagggatcagaaaaaagggattttcaattgctatgtggccatttttttaacacgtccagatttcagaacatcaaactcctattaatgtataaatgcatggtattcggttgtcaaattcaattgaactaagatttgttgagtattgactattttccatatccttttctttttttgagacaggatcttgctgtgtgatccaggctggagtacaggggtgtagtcatagcttgctacaggctcaaattcccgggcccaacttatcctcctgcctccgtctcctgaatatctaggactgcaggcacgataccaccaagcctggctaaacatatactttcattcacatcattatgttaatctttgcagaaatcttgtgaggtattactattcccattttacagattagaacattaaggtccagaggagttaagagatttgtatctttaaatgcacttaaggagaaaagggtggaactggtactgaaagctaaatctgatggatgtctgatggcaagttcagggcttttttcacagtgctgccctactttgttccagtttctggggacctgaattctatcattgatattgccagccgaccactgtgatgtctttatttgaggaaatccacccagcatgtccaaagagcctggtgaggtgacctaatttatcagaggtattaaaaaaaaaaaaaaaaaaaaaaaaaaaa

SEQ ID NO: 1973 - DNA, 2750 bp, Macaca Fascicularis
attgtctctgcctttacaacaggttcgggcggcggggaagacgggcgggtgcggggccgccccagcccgggctttcttggggccgccccccttctaccgggtgtgcgagtctttggctgcttttattcggctggggaggcctctcttttctttcttaggcaaccaaagcgttattaatcctactaatcagtaaattcgaggcaggcagcaggagagacaaacgcttgattccaagaacctcttcgatttttatttttatttttaaagagggagacgatggactgagctgatccgcaccatggagtcttgggtcttactgagaacattctgtttgatcttcggtctcggagcagtttgggggcttggtgtggacccttccctacagattgacgtcctatcagagttagaactcggggagtccacgaccggagtgcgccaggtcccggggctgcataatgggacgaaagcctttctctttcaagatactcccagaagcataaaagcatccactgctacagctgaacagttttttcagaagctgagaaataaacatgaatttactattttggtgaccctaaaacagacccacttaaattcaggagttattctctcagttcaccacttggatcacaggtacctggaactggaaagtagtggccatcggaatgaagtcagactgcattaccgctcaggcagtcaccgccctcacacagaagtgtttccttacattttggctgatgacaagtggcacaagctctccttagccatcagtgcttcccatttgattttacatattgactgcaataaaatttatgaaagggtggtagaaaagccctccacagacttgcctctaggcacaacactttggctaggacagagaaataatgcacatggatatttcaagggtataatgcaagatgtgcaattacttgtcatgccccagggatttattgctcaatgcccagatcttaatcgcacctgtccaacttgcaatgacttccatggacttgtgcagaaaatcatggagctacaggatattttagccaaaacatcagccaagctgtctcgagctgaacagcgaatgaatagattggatcagtgctattgtgaaaggacttgcaccatgaagggaaccacctaccgagaatttgagtcctggacagacggctgtaagaactgcacatgcctgaatggaacaattcagtgtgaaactctaatctgcccaaatcctgactgcccacttaagtcggctctagcgtatgtggatggcaaatgctgtaaggaatgcaaatcgatatgccaatttcaaggacgaacctactttgaaggagaaagaagtacagtctattcctcttctggagtatgtgttctctatgagtgcaaggaccagaccatgaaacttgttgagagttcaggctgtccagctttggattgtccagagtctcaacagattaccttgtctcacagctgttgcaaagtttgtaaaggttatgacttttgttctgaaagacataactgcatggagaattctgtctgcagaaatctgaatgacagggctgtttgtagctgtcgagatggttttagggctcttcgagaagataatgcctactgtgaagacatcgatgagtgtgctgaagggcgccattactgtcgtgaaaatactatgtgtgtcaacaccccgggttcttttatgtgcatctgcaaaactggatacatcagaattgatgattattcatgtacagaacatgatgagtgtatcacaaatcagcacaactgtgatgaaaatgctttatgcttcaacactgttggaggacacaactgtgtttgcaagccaggctatacagggaatgtgaattcagtattctcccagagaatgagtgctgcccgcgctgtgtcacagacccttgccaggccgacaccatccgcaatgacatcaccaagacttgcctggacgagatgaatgtggttcgcttcaccgggtcctcttggatcaaacatggcactgagtgtactctctgccagtgcaagaatggccacatctgttgctcagtggatccacagtgccttcaggaactgtgaagttaactgtctcatgggagatttctgttaaaagaatgttctttcattaaaaagaccaaaaaaagttaaaacttaaattgggtgatttgtgggcagctaaatgcagctttgttaatagctgagtgaactttcaattatgaaatttgtggagcttgacaaaatcacaaaaggaaaattactggggcataattagacctcaagtctgcctccactgtgtctgacatcaccatgtagaagaatgggcgtggaatatacaccgtgacatcctgaaccctggatagaaagcctgagcccattggatctatgaaagtctctagcttcactggtgcagaaaattttcctctagatcagaatcttcacgaatcagttaggttcctcactgcaagaaataaaatgtcaggcagtgaatgaattatattttcagaagtaaagcaaagaagctataacatgttatgtacagtacacactctgaaaagaaatctgaaacaagttattgtaatgataaaaataatgcacaggcatggttacttaatattttctaacaggaaaagtcatccctatttccttgttttactgcacttaatattatttggttgaatttgttcagtataagctcgttcttgtgcaaaattaaataaatatttctcttacctcaaaaaaaaaaaaaaaaa

SEQ ID NO: 1974 - DNA, 717 bp, Macaca Fascicularis
  misc_feature (1)...(717): n = A,T,C or G
tgaaaacaatggaaagttatttccttcatccagtctannnnnnnnnnnnnnnnnnnnnnnnnnnnnnnnnnnnnnnnnnnnnnnnnnnnnnnnacttgaaaaaccaaatgagtnnnnnnnnnnnnnnnngcttaatatagaaaattctgagagaacaggtttgccgtttcgcgttgataactctgcttctgggaagagagtgaacagtaatgaaacatcttcattatggtcttcacacctaagaactgttgggttannnnnnnnnnnnnnncctctcatcctgcagcaaaatatcatggatcaatgttactttgagaactctctatccacagaatgtataattcagtcagccggtagatctgatgggtgtcagatgccaaaacttttttgccannnnnnnnnnccccctttgccaccaaagaaatatgctataaccactgtgccacagtcagagaaaagcgaatctacacctgatatcaaacttacagaggtgtttaaagctacctctcatcttccgaagcacagtttaagtacannnnnnnnnncaagtttagaagtgagtacacgtgtgaatgatgaaagacataaagaaacatttcaagtgagagagtgttttggcaacataccaaactgcccgtccaactccccaactaatgattttcnnncaaactcnnntgccgttgatggattttgnnnaccagaactagactctatttc

SEQ ID NO: 1975 - DNA, 697 bp, Macaca Fascicularis
  misc_feature (1)...(697): n = A,T,C or G
cagagtttcactccttcccaccagtactcttaccacagcacagtagatctggtagagttgagcatttaattgtcactgcagctctgcaacttatgctnnnnnnnnnnntcgtatctgcctacaannnnnnnnnnnnnnnnnnnnnnnnaaagctctatgtatgcatcctgattttccatgtatgttcatcagtgttcttattttgtattgaaaggacacaaagatagatgtgtacccgcccccaccccgctacaccctttgttctgctctctaatctttgcacataccagagatttcgtaagttctgtgagtnnnnnnnnnnntgcacgtaccagagattttgttttgcacataccagagatttcgtaagttctgtgagtacctgtttttctgcacgttctgagattttgtaagttctgagnnnnnnnnnnnnnnnnnnnnnnnnnnnnntannnnnnnnnnnccataaacctgctctcccgcctcaaaggttgaannnnnnnnnnnnnnnnnnnnnnnnnnnnnnnnagttagccaaatcgccttgttcaaacactagccaatcatatatctgatttgtataataactgtatgcccacttttcttagactatataacactgctcggagctcagtgggggagctctcctgcccatctcgttttgcgagcgagtgagagttccaggttcgaacctgta

SEQ ID NO: 1976 - DNA, 741 bp, Macaca Fascicularis
  misc_feature (1)...(741): n = A,T,C or G
ctcaattgagttttactttccaagttagatgtntagttcattcttcatatgtgatagtgaaagtaaaagctttcctgacccttaagactgacattttcttgttagggaaagagactcgatagcaaggtagactaacagtatttcccaaataaaggcacacaggagaaaacaaatcaatagaatctaattaaaattactactacagggaataagaagtattgaagatttactttattttgaattgattttaagtatggaataattgtctttacagctataaaaagtaattaggggtgtttacacaatgttgggaatttctgctttgacaaataggtaagtcccatggccttcagagaggcaggcagcagtagaaactttcaaaaaagtaacatttctctggatttaatgtggaaatagagaaaaatttaaagaataattaaatcaaaaaaccatggtaaatgaaatttggtgattagatacagttttggatgttaatgctagttgagagaagagaaaaaaatagaaagtagaagcagagaacaggatcattggaagggaccttaaaaatcgccgcttcatccattttagcaaacttattagcatagcgtgtaccagtactaggatcttgagtgagagtgtgtgagtttagctctgcttaatatattactacttgtgggatctttgggagactatattctctttgagattgaatttcttctataaaatgaacataatgctacc

SEQ ID NO: 1977 - DNA, 655 bp, Macaca Fascicularis
ccatgtcatgaggaagcaagccatagcagcctgtggagaggaaccacagtccttccacccactggccaggctgaactcccaggcgacagccagcaaaccttgccagctgcatgagtaagccatcttggaaagggattctccagctgctccagctgacgcttcatggaacagtcctcactgaaccatagaaaacattagagatttgtgtgcaaaattagtgattattattttaaatgataggctttgaggtgacttcttatgcagtaatataacagtgaaaaggggagatggttaagagttccattttggccattctaggttctaggtgcctatcatatgtccaactggagggttcaaataggcaagtggttatacaaagccccaggagaggtcagggctggaatataagttttcatgtcacagagtaaaggcatgagactttacccaggttaaggtcacctgggaaacatgtaaataaaagaagaccaggaagctcttaattctgggatttcctgtgtggacacaggaaccgggactttgaggagctgcttattaagtaaacaggaagaggtgagagctgagcttccatctttactccaagagagctagttctatgggtgaactctgaatgggtgtggatctgtacagtccttcc

SEQ ID NO: 1978 - DNA, 771 bp, Macaca Fascicularis
  misc_feature (1)...(771): n = A,T,C or G
agggagctcagtnnnngagnnncaatcaagcctcatcctccaaatatgcggggaagggtgacgcagggaagggtgacgtcaggagtcaggtcatggactggttagaagattaccttattgtgttgaggcaggnnnnnnnnnnnnnnnnnnnnnnnnnnnnnnnnnnnnnnnnnngggaggtaacagagtgttcccagcaatggcccagctactgaaagcaacagaggcagccaggctgggaggagtcaggtggtagaagagttggtcaggagcagaacatggaaagccagagaaagtgtgcaaagctcagaaatggcatctgtaatttactggtacctgtgtgtgttggatggaaggtgaaggaaggctcaaaaggcataaaaaggacctttcacttatgttaaactgacatgccaaaggtcttattgtagttcatcttaatgtaatattcataaatttattgaccnnnnnnnnnnnnnnnnnnnnnnnnnnnnnnnnnnnnnnnnnnnnnnnntgggcggatcacgaggaagagattgagaccaatcctggccaacatggcgaaactgcgtcttcactaaaaatacaaaaattacctgggcgtggtggcgcacacctgtagtcccagctactcaggaggctgagttaggagaatcgctnnnnnnnnnnnnnnggaggttgcagtgagccaagatcgcaccactgtactccaggctggtgacagagcaagacannnnntcaaaaataaaataaaanannntaaaataaaat

SEQ ID NO: 1979 - DNA, 719 bp, Macaca Fascicularis
tggctcccattgaataccaaataaagtttgaatcccttagattggcattcacagccttctatgttctggccccagctttatctcttgaaactcattactcaccatctgacaatgccactaaatatccacaagagtgatttcaaggtttttctatggtgaaggttcaaactggtaataaaccatgtttacatttttctggtctaaaataatttctatattactttataatagtcagctgaggtttgtttaagctcttggacaagcctaaaacttgtatcttgaagaaaatatttttttccacccaaagaaattgcattcaatttcttaaccttcaaaacaatgtcactgttgtcacctgtgcatttgatagctaaagcacaagtattcttcaggagcataaatactccagccttgaatgaatactccagccattgtccagctcctgtgaaaaacttaatatttgagaaagacattcaacggtatgtgttttctatacacttcacaagtagttgagattttcttgtattaaggttaatcactaaaaagatgtttacttgggtttcattatctaaaccccctaaagatgttttccattttattgttaaacacttggtgttagcaagggtcagcacaagaaaaggcccaatggcaagttgttctgcaaattctgtaaagcttactgaattcatttgtcatttataatgttgctgagtggtgct

SEQ ID NO: 1980 - DNA, 503 bp, Macaca Fascicularis
aaaagacttgaaatcgcgtgaggggactccagtcttttgttgttgttgttttagctattttaagtgtttggttttgtctttctacataagtgctaaccttgttagtatctgcaaaatgccttaattaagaaagctattaaccctatgtgtcgggtttgtgtaatttcatattgttttatatggagtcttcaaataaatgtatagggtatatgtctctatgtgctgtctttgacttctttcatcaacatttggtatttgtaacataacatatctaagaatgttagacatgtatttctttgaccttttttttaatggagcaatcatacataatattttatttttaatatcgggtttcatgtgtaaattcctagtgtataaaaatatacaagaagattattattattaagagacgagatcgtgctctgtcatccacgctggagtgcaatggaacactctcctctactgcaacctctatcctgcgcgcttaagtcatcctcccacct

SEQ ID NO: 1981 - DNA, 731 bp, Macaca Fascicularis
catacacccagagctattttctaaattttgatgcctaaaggtcccctgcttgtaaaagaatcatttattcagtagttttttgtggatcttctcacaaaagagggcattctctggctgttttgagaacctacctattgtctgagtgcattctggtatatgtcataaacagagcccactcaatgcgaagcaagaatgagaatctctatgtgttgggaaatgtggactggccaaggtggccattgtatagaaatagctcaaaaagtagaaaataagaatctcaatgagtgtctggaagtgggaattatgtaactgaaaatgcatttgctccagcgcattgcctttcatgagacgttgctcaagtatgtagtttgcacatacagcagagtgtgctctgtggaaaaaaaaaattacctcaaccaaccagtattagtacttttcagtataaaacagataaatttagccactggaagaggacaagaggcatcaatataacactttgcacagcaaaaacctatctgggtcaccctttttaggatacgcttggaaaactagccacccagtgttaatggctggtaagtattatactgaaacgaactgctggaaatcacacataatcaatgatgcccatcaaatgcatactggcagagattttgctttttagccactgttgtatagatgtgaactgcttaatgacttctggttattgtgatgcagaaaatccaaaccataga

SEQ ID NO: 1982 - DNA, 733 bp, Macaca Fascicularis
  misc_feature (1)...(733): n = A,T,C or G
taggaagcctnnnntaaagnnnnnnnnnnnnnnnnnntttttattaatcaggggacttgcagaactaactcttaatgatttatcctctaaatatccaggtactaaacacttcttcctccctacctttggttctgttggccacttatccatacattccatgggagggaaggtaaaaggatgtcagaccgagcaaaagagagcagattgaaatacatatgggtcattttgatttcttgtcagtcgctcttgcacaagggttgggggtgtgtgtggaggggagcagtggactgaaagaggttgtcagtatttaccagtggaggacactcagcacaccctccccaaggcttgccataaccacaggggtcagaattcgttgtgatgcctacaggacaaacgtcactgaaaccctgtgtccacatcagtccccgggcttgcaaccaagagatggaagctccccaaaccatgannnnnnnnnnnnnnnnnnnnnnnnnnnnnnnnnnnnnnnnnnnnnnnnnnnnnnnnnnnnnnnnnnnnnnnnnnnnnnnnnnnnnnnnnnnnnnnnnnnnnnnnngtttttcaccaagcattttaaataacccagagtttaataaatgtagaaacacgcccctacnnnnnnnnnnnnnnnnnnnnnnnnnnnnnnnnnnnnnnnnnnnnnnnnnnnnnnnnnnnnnnnnnnnnnnnnnnnnnnnnnnnnnnnnnnnnnnnnngattg

SEQ ID NO: 1983 - DNA, 633 bp, Macaca Fascicularis
  misc_feature (1)...(633): n = A,T,C or G
ctctctcaaccaccccaacaaccactacagaaccaacattgtgacacccaggttnnnnnnnnnnnnnnnnnnnnnnnnnnnnnnnnnnnnnnnngggaaccatttcactgccggacttaggctggcgatgcccccttcccccaccccagacacaggggttggccacaatcccactgaatgcccttnnnnnnnnnnnnnnnnnnnnntttctgttgacctcccaccttccagtgttggacaggatggggggggacacttgcttaggggctctcctgggccccacaccagtgcccaccccaaatctggtcgtctcctccccccatacacagcacaagctaagggctgccctctgcccacacgctgcgtnnnnnnnnnnnnnnnnagtcacccccatcgccctccagctctggggcccatgtgttccttgggccaaggtctcatgggggctggggccaagttgggggcccaggaggcggggaggggggaggaggagaagatgcgcagttacctcatgtctgtgcccgctggggaggggtccgggaagaaggggaaggggttcctggcgggtacttttctatcttttatttccaagattttttttcaatctaaacattcttcctttattggctgtcc

SEQ ID NO: 1984 - DNA, 699 bp, Macaca Fascicularis
  misc_feature (1)...(699): n = A,T,C or G
gaccacgtaatgtgncggtcatcannnnnnnnnaagatttacagaatgtcaacatcacactgcgcatcctcttccggcccgtcgctagccagcttccnnnnnnnnnnnnnnncatcggagaggactatgatgagcgtgtgctgccgnnnnnnnnnnccgagatcctcaagtcagtggtgnnnnnnnnnnnnnnnnnnnnnnnnnnnnnnnnnnnnnnnnnnnnnnnnnnnnnnnnnnnnnnnnnnnnnnnnnnnnnnnnnnnnnnctttgggctcatcctggatgacgtgtcctnnnnnnnnnnnnnnttcgggaaggagttcacagaagcggtggaagccaaacaggtggctcagcaggaagcagagagggccagatttgtggtggaannnnnnnnnnnnnnnnnaannnnnnnnnnnnnnnnnnnnnnnnnnnnnnnnnnnnnnnnnnnnnnnnnnnnnnnnnnnnnnnnnnnnnnnnnnnnnnnnnnnnnnnnnnnnnnnnnnnnnnnnnnnnnnnnnnnnnnnnnnnnnnnnnnnnnnnnnnnnnggaacatcacgtacctgccagcggggcacnntgtgctcctccagctgccccagtgagggcccaccctgcctgcacctccgcgggctgactgggccacagccccgatgattcttaacaccgccttccttctacccccaccccagaaatcac

SEQ ID NO: 1985 - DNA, 731 bp, Macaca Fascicularis
  misc_feature (1)...(731): n = A,T,C or G
gctgcaggcaagcttgcacaaaaataaccccctctcgttggagtgttcgggatgtggggggcgctatagtgttcttggacttgtcgtcctggggcacttttagttctttatatttagtgggtcagtgccaagtgctaccacttcccaataaaggaacgggnnnnnnnnnnnnnnnnccctggctaccttgttaggaggttttgttatttctctgacaagactgctttggaaagagctgcttttagggattatgttttgaataccccgagtggggaacagggttctcctcaaaacctcacaaccaagatcataggagaaaggggccctattttcctgctgcttcccagctcagaacatactgaatggaatgtatttttaagagaataaagtctatttttttgtattttaaagattgagagggctaagaaggtagccctcaaataaactgttattgcattataggcccctttgttgggggcagtctgttggtccacacctacttgctcaggcaggtgctctggtctcacccctgccccttggagtctaggtgcagcagcttctacattcctgctccaagcatgggaccaaggaggccggnnnnnnnnnnnnnnnnccagggcaaagcagtggctcagggctccttgggtgcatgtgtatcgttggagctgcctgtctgcatgtatcctctggcgcgaatgctctntgttggctctgcagtacaatatgtaacc

SEQ ID NO: 1986 - DNA, 711 bp, Macaca Fascicularis
  misc_feature (1)...(711): n = A,T,C or G
tgcatctggccaggttctctgtttttaaatcctaaactgaatcgtaaggtgtatgaacgtttttaaagttcttactttaaagtagaacttttaaagtagaaagtttaaagactcccatcaaaaaaaaaaaggaatgaggaaatccctaattttacttggggagacagcaaaannnnnnnnnnnnnnnatagaaaggaatcgataatcccccacaccaagctttccatgctgatactgaacttgtgtcattttttctgctgctcagctccctggcattaagactgcctttagaaagttatccattgaatgagtcttgatgggaagcagagcccactttaacaccacaaatgctgaaaatcccaaatgcttgtgcacccaggctcttgcatctacagcatatgcatgtgtataggacctaggcttggtcaatcaggtgcatctaannnnnnnnnntaattagtgactcaagaagtaggaacaatggaaaatgtgtttaagtggatgataaggatgtcnnnnnnnnnnnnnnnacattggggggagcgatgaagaagggtagttctagctcgaatggtcgtttcttgtcnnnnnnnnnnnnnnnnnnnnnnnnnnnntgtggtgtccagggtttggcagtggccgtgacttcactgagctttgtggtgtgactctagctattaagcttccttctatgcttgttttccaagcctg

SEQ ID NO: 1987 - DNA, 746 bp, Macaca Fascicularis
  misc_feature (1)...(746): n = A,T,C or G
agtgacnnntccccttnntnntcagccctgcccctnnngagccaaacccagtaggaggctgggcctgggtttgcgccactggggtctccatcaccgggacctggagagggaggggctgtgtagccttggaagaacttggggtcatggggaggaagcacagctgtcggggaagggccaggacctcaggcccagccccaactccagctggggtggggtcttccctgcctgtgtcttatgccttatgggaaggcccagccataactcgggggccatgctggagctggggaccagctcaggcctcctccataggaacccagtgactggggggtgacgcctacacccccagctgtttgcactctggtgtgtggtttgactctgcttttcttccggattggccctnnnnnnnnnnnnnnnggggaccaggctgggggaacctcacctggcccctactcctcctgggggtctccctttgccattgggcctcctgagggactgtgggggctcaagggtaatgcccgaggccatggccccagtgaggggctgtggggcgcctagagttctcagtgtgtctccttcattcattggcctctgctggggcctcctatgggtgtctcacgtctgtctatccatctgtccgtggtcagaagtggggtcagtgtgagtgagagcaggagtatttatgaaaataaaacgtcgtttttcctggaaaaaaaaaaaaaaaaaaaaaaaaaaaaaaaaaaaaaagg

SEQ ID NO: 1988 - DNA, 702 bp, Macaca Fascicularis
  misc_feature (1)...(702): n = A,T,C or G
tgtggggcagtgcttcnnnaaattctctatttaaattcatctttatnnnnnagacttagcatattgttaagcatgcatagatgtcacttttgtgattacttagccatttactttacccccttgaacactgacattttcctgactgccatgcatgtgatatatttctttggcatccaaaaggttagtgttgagaaactaatttatcaagaagttaggaggctgatccttcttaagctgtgacttcctcacaacttgtaagagcttcttagtaattaagatcaaatttgttaactttcagtcctgaaattgaatgcccctctggttttgtcagtcagcccgtgaatttgataactcgccgtttcttttcctgcagaatttaatttcacttacagcttcctgctgctcctcccctgcctagccatctagtagttgtggcccgacagcaggtctaattagggacttttatacaaaacaactattaaaatcaatggaaaacctttgaacaattgcataggaaagaaattaagtagattatttttacgaattaagggcaaactcaggtgtgactgtgtggggttttagataaacagaggaacacaccggtgtatatatgagacttctcccaccccctaaaatcaaccagctccatgtaagcatgttttactttaagatataattgtttatgaacagtttcagaaagga

SEQ ID NO: 1989 - DNA, 751 bp, Macaca Fascicularis
  misc_feature (1)...(751): n = A,T,C or G
cataatataaagcaaatctttcnnnnaactttttttactcagactcagaaaatatttaaaattatctctctccccgccccttttaaataggatatttgaggattatgattgggtttgatattaaggatcaggaaccctgtagggttgaactgattcactcgggcggcctgagtcactgggaggccaggtgacannnnnnnnnnnnnngggactcatgtgttacctgctgtcccttcgcagaggtnnnnnnnnnnnnnnnnnnnnnatatannnnnnnnnnnnnnnnnnnnnnnnnnnnnnnntctagtcatgtatgctccctctccctgcctggttgatctccttagcaactcacgnnnnnnnnnnnnnnnnnnnnnnngcctcatctagagacnnnnnnnnnnnnnnnnnnnnnnnnnnnnnnncattaagggccttcaagctaataaagatagaaaacaaggcaggaatttttgtctgttttattcataatgtatctcaaacacatgaaacagnnnnnnnnnnnnnnnnnnnnnnnnnnnnnnnnnnnnnnnnnnnnnnnnnnnnnnnnnnnnnnnnnnnnnnnnnnnnnnnnnnnnnnnnnnnnnnnnnnnnnnnnnnnnnnnnnnnnnnnnnnnnnnnnntattgctataagttctccatttacgggtattttataaatttttaaannnnnnnnnnnnnnnnnnnnnnnnnnnnnnnctgttcttcagatctttgtcaaccaaaaca

SEQ ID NO: 1990 - DNA, 1462 bp, Macaca Fascicularis
agagtccctgggccaccccggtcgctcgctgcgtgcgtcccggagccggaccggggccaccgcgccggctctgcaccgatcccgcgccccctggacagccgccctctcctccaggcccgtggggctggccctgccccgctgaacttcccgggatgaggactcccggtgtggtcaccgcgcgcctaggtcgctgagggaccccggccaggcgcggagatgggggtgcacgaatgtcctgcctggctgtggcttctcctgtctctcgtgtcgctccctctgggcctcccagtcccgggcgccccaccacgcctcatctgtgacagccgagtcctggagaggtacctcttggaggccaaggaggccgagaatgtcacgatgggctgttccgaaagctgcagcttgaatgagaatatcaccgtcccagacaccaaagttaacttctatgcctggaagaggatggaggtcgggcagcaggctgtagaagtctggcagggcctggccctgctctcagaagctgtcctgcggggccaggccgtgttggccaactcttcccagcctttcgagcccctgcagctgcacatggataaagccatcagtggccttcgcagcatcaccactctgcttcgggcgctgggagcccaggaagccatctccctcccagatgcggcctcggctgctccactccgaaccatcactgctgacactttctgcaaactcttccgagtctactccaatttcctccggggaaagctgaagctgtacacgggggaggcctgcaggagaggggacagatgaccaggtgcgtccagctgggcacatccaccacctccctcaccaacactgcctgtgccacaccctccctcaccactcccgaaccccatcgaggggctctcagctaagcgccagcctgtcccatggacactccagtgccagcaatgacatctcaggggccagaggaactgtccagagcacaactctgagatctaaggatgtcgcagggccaacttgagggcccagagcaggaagcattcagagagcagctttaaactcaggagcagagacaatgctgggaaaacacctgagctcactcggccacctgcaaaatttgatgccaggacacgctttggaggcaatttacctgtttttgcacctaccatcagggacaggatgacctggagaacttaggtggcaagctgtgacttctccaggcctcacgggcactcccttggtggcaagagcccccttgacactgagagaatattttgcaatctgcagcaggaaaaattacggacaggttttggaggttggagggtacttgacaggtgtgtggggaagcagggcggtaggggtggagctgggatgcgagtgagaaccgtgaagacaggatgggggctggcctctggttctcgtggggtccaagctttgtgtattcttcaatctcactggcaagaactgaaaccac

SEQ ID NO: 1991 - DNA, 519 bp, Macaca Fascicularis
ccagcatgggggacagcgcgagactccctctcaaaaaaaaaaaaataaataaataaataaagtaattgtcagcttaggcaacatagcaagactctctctatacaaaaaaaattttaagttagccaggcatagtcctagctactcaggctgaggtaagaggattgcttgagcccaggagttgaaggctgcagtgagctctgatcatgccaccacactccagcctggatgatagagtaagaccctagattttatttttttttaaaaaggtaattgtcaagggcaatgaaaagaaatggtcatatttgcaaatcattatccttattgtgaagatagcactgcagaattttaagcacagatagtggtgaagatgggacattacagagtgcgtgattaggccacaaacttgtttctcctagttaatgaattgttttatttgttggtttaaagatccacattaagcttgtagaccatagggacatatggagagtccatttgtaatatgtaattcagtattgttaa

SEQ ID NO: 1992 - DNA, 709 bp, Macaca Fascicularis
  misc_feature (1)...(709): n = A,T,C or G
cagctgcagataccaccgaagttgggtcccagggaaccatgccagctgcctgtcaacacccagctccggtgagtgaggctggcccagggacagtcatctgtacccacgtggacggccactgagctgcatctggggaggccgcagtgggaccatatggcccttcctccagtggtcaactctgtgtaactctttgctctgtttcaactgtgagagttctgttcctcttggccatgatcccaactaacagatacctgtgctttggggacagaatggtgatactgataagaaaagacatgaaagggctgggcacgnnnnnnnnnnnnnnnnnnnnnnnnnnnnnnnnnnnnnnnnnnnnnnnnnnnnnnnnnnnnnnnnnnnnnnnnnnnnnnnnnnnnnnnnnnnnnnnnnnnnnnnnnnnnnnnnnnnnnnnnnnaaaattagccaggcatgggcnnnnnnnnnnnnnnnnnnnnnnnnnnnnnnnnnnnnnnnnnnnnnnnnntgggcggatcacgaggtcaggagatcgagannnnnnnnnnnnnnnnnnnnnnnnnnnnnnnnnnnnnnnnnnnnnnnnnnnnnnnnnnnnnnnnnnnnnnnnnnnnnnnnnnnnnnnnnnnnnnnnnnnnnnnnnnnnnnnnnnnnnnnnnnnnnnnnnnnnnnnnnnnnnnnnnnnnnnnnnnnnnnnnnnnnnnnnnnnnnnnnn

SEQ ID NO: 1993 - DNA, 751 bp, Macaca Fascicularis
  misc_feature (1)...(751): n = A,T,C or G
ctttgtcccaaagggnnnngannnnnnnnnnnnnggtagggcaaggaagggccgctgttgccaagntttnntgtcnnnnnacccacggtgggaaagcggttttgccgggcgnnnnnnnnnnnnnnnnnnnnnnnnnnnnnnnnnntgggccctgggatcccaggccacgcaccagccaggctgtgggcagggaggggccagggacgccgaagagaggatgccatgagaaccatggaccgggcgggatgaggcctctgccaccattnnnnnnnnnnnnnnnnnnnnnnnntcgacgagcttgggtttggggtgggggtgtgtggtcacgtcccctgcttgccactgtgcgcaccaaggtttccccacgtccttcccagcactgttaggaaggcccgggcagggcctggaagcacccgacccgggctgttctcctgtgttgaaggagtgtgcccagtgcccttgggcaggacctgggagagcccccaccaggcagggcaaggggactccgctcaatccccgtggccagcgtgggcacaggannnnnnnnnnnnnnnnnnnaatgacattttatctttnnnnnnnnnnnnnnnnnnnnnnnnnnnnnnnnnnnctattacagaatcccgtgcagtgattctaggatttgaaattatatgatgtgttacataagaatttatttgctatcgacattaccgtataaagaagagagacatatcacgctgctgtcatgattttgtgtcaagatgatcca

SEQ ID NO: 1994 - DNA, 736 bp, Macaca Fascicularis
  misc_feature (1)...(736): n = A,T,C or G
gatgcaccgcgggatcctggctcactgcaacctccacctcccagactcaagcaattctcctgcctcagcctcccaagcagctgacatcacaggcacccaccaccacgcccagctaatttttgcattgttagtagagacaatttcaccatgttggccacactggtcttgaactcttgacctcatgcgatccacccacctcaacctcccaaagtactgggattacaggcgtgagcccccacactcaaccccgcttaacttctgaagcctgcaattcacatactcctcttgacatccttcccaagattcacttgcatgaaggttgtggttaccttccaatggcttcacatggttctttagagaagctggaaccaagggcagttgccccagagcagcattctaggaaagtgcttggtgctgttgatggggtaagggaggggcacctggaataatttaaggagacttgagccaaatcatcaccttggggtggttacacacctgccctgcacaccacccagaagctcgaggctgtggagaggttcacggcagagcctgggagaggcctgcggaagtgatcctcagctgccggaaggaaacacacactcaggccatgctttgcaacagtcttctccatccctgtgtcactctggacatagccagggccaggaccagggtatggcaggcaaaaccagggcctagggcaccaatccangaggcgctggagntnnngtcatgcagc

SEQ ID NO: 1995 - DNA, 747 bp, Macaca Fascicularis
  misc_feature (1)...(747): n = A,T,C or G
taactgtagtcacgctgnnnnnnnnnnnnnnntttccaataattcaggnnnnnnnnnnnnnnnnnaaactgtaaggtctattcatactcaacacaaggaaaaaacctcattaaaattaatgactaatcaggaggcaacataaccaaaagcacagtgaataaaagtnnnnnnnnnnnnnnnnnnnngggtttattgctagaaagatnnnnnnnnnnnnnnnnnnnnnnnntttggctcaccaacctaactttctnnnnnnnnnnnnnnnnnnnnnnnnnnnnnnnnnnnnnnnnnnnnnnnnnnnnnnnnnnnnnnnnnnnnnnnnnnnnnnnnnnnttnnnnnnnnnnnnnnnnnnnnnnnnnnnnnaaactgaggnnnnnnnnnnnnnnnnnnnnnnnnnnnnnnngtaaagttagaatttgctagggctggggtagagagtgatatttctaggactcagacattgaaaactcattcagcctctagtannnnnnnnnnnnnnnnnnnnnnnngttagtcaaattcatggttttaaacttagaagcagctttcgggggagagggtaggttggagcatttattacgtattttactgtnnnnnnnnnnnnnnnnnnnnnnnnnnnnnnnnnnnnnnnnnnnnnnnnnntggggctgtggaaaacatttacctatttaccttggaagttttaaaagacagtccactttttagcatgtgtgttgtnnnnnnccntgtggttgtcnnnncta

SEQ ID NO: 1996 - DNA, 1650 bp, Macaca Fascicularis
aatgtttggatgtctcaaagttccctttaacacagtgtatccaaggtgaactcccctaaccctggtcctgcaccagcggtcctctctgtgactggtaatgaatgccagtgaataaataaccacattctatatagttgggcacactaggaacccttgacttttccttgacaccttcctctttctaacaccctgtgagccaatcctatcaggtttccgcttagtgtctcttgattccatccttgtccctccatctctattaccaccaccctagttcaaggctctctcctggacgaaagcttccaaagcaagttcctgtatccactcttgcctccctttggtttctccatgctgaggtgcaagtgacagtgatgaaaggctaagcagatcaaatggctttcctacttcgcatttcctccaccacccgcatggctgggccgccgccgcctccccagctcttgttctcagcacccagagcactggccttctttcagttcccccagcactgtcctcccgcccactgtggggcctttgcacaagtggatccttctgcttccccttcccctttcatgtaggtatctcccactgcaacctcagatctcagcttaaacaccacttcctctgtctcacaccacagacaatattgaagcccttacaatgtgcgacattagctttctgcagactttcctccgtagaatccgtcacctttgtcacgacatgtgtttaatatccagttgctgtcccatctgtccagcagcccctgtgcctcatgagggcagggtctatgtctgtggtgctgtgccctctcctttctcgacctctgcgcactctttcacaaccctcggcaccattctcctccccctccaccatggccagctcccgtttttcttcaggactcagtttagacattgaatgctcctttccccacccctcaaaggctaaggtagctgtcccttttgaccctacagaacccctgcattcctttgccagtttgcattttttcttttcatttttttttgagatagggtctcagtctgtcacccaggctggagtgcagtggagtgatcatagctcaatgcaagcttgaagtcctaggctgaagtgatggtctgtccatgacctttccagtagctggaactacacgcatgcaccatcacgcccagctaatttttattttattttatttttaagcagagatgagctctcgctattttgcccaggctggtctcaaactcctgggtaccagcaattctcccgcttgcctcagcctcccacgatgttgggattacaggcccacaccttgcctgccatattgcatttatggcactgtattgtaaaggcttatttacttctctgccttctccaggagactctaaactccaggaagacgagagttgtgtattgtttatccttcattccccagcgtctaggatattggctcttacacagtaggcactcaataaatacttattgaatgactgaatgaaagaggtaatagtatatgaaagtgtttagaagaagcaaagcatgaaaacacaaaaaaaaaaaaaaaaaaaaaaaaaaaaaaaaaaaaaaaaaaaaaaaaaaaaaaaaaaaaaaaaaaaaaaaaaaaaaaaaaaaaaaaaaaaaaaaaaaaaaaaaaaaaaaaaaaaa

SEQ ID NO: 1997 - DNA, 736 bp, Macaca Fascicularis
  misc_feature (1)...(736): n = A,T,C or G
catagaataatctatcttttnnnnnnnnnnnttacaccctgacatttcaaactatttatatatttggataaacatctaccatgttactgttttctatttgttaaccttgttcgttattcctattttttacttccattcttcttgtgcctttgatggtgttaatttggcattttgttattctctgtcttctagtgtggttttttttatggttgcccttgtgtttgcagtatacatttacaaataatgcaacccctctttcaaataataatatactacttcannnnnnnnnnnnnnnatagtaacaaaataatcctaatttctctttcctatcccatgtatcattgctgtcattccacttatatataagcacccctaagtatgaagactatacacacacacaaatatatatgtatataatcaaatacattgttgctattattttgaatgaactgttaactgttagnnnnnnnnnnnnnnnnatatggaacaggttagtggaatttactataaaatgctttgggggaaaatttttaattactgaaactaggagctgtgggattgcatgtctatcttcaattagtttgagtaaaagacttgtagtaatttgtctattattgtcagttttcaaatgaattgttcataatatcctcacattttcaaatttcaactgcatttataacatttttatttttccattctctatttgtgttttcnnnnnnnnnnttaccaaaagatt

SEQ ID NO: 1998 - DNA, 2648 bp, Macaca Fascicularis
  misc_feature (1)...(2648): n = A,T,C or G
tttgtaaagcataggaccctcttcttgagtcacaaaatggagactgaaaaggcttggagacgtgtgaggtgtgcttgtatatttttagaggacaccccagaggcattgctgtatccctgtgctctggacccagggagctcaatgtagctggtagctggccagtgcggacagtccagctggtgggtaagatgcagacatgagaaatgattgtgtaaacagtgtttcagcaggaaacatctcagagggcagggctggcctggaccatgggtcttgtaacctttgagttttctagggtctgaggtcctgaggcagcaaagagtagattccagagagggagtgaggagagactgagtctgtccaagtgggaaagaccaaacacaggagccaagagtagtagtgtagctgctgtcaggtcatgaactcctgagagtaggatggcggcaggagggaacagtgctgttgcagctggacctctggttcaagggccagtgatgatagtatctcgagaactttagggtgttgcttttccagctggaaacttctgtggccggtggcgcctttgccccaatttttgcttggtcccactgggctcattccgctcactcagcctggcaggttgcgcttggctcacgctatcgccctggatcccatgcctgccaagggcaaaccaggcatggaatggcaaggggtgtgagcgagtgaatgtggcgtccggccactgcgcccagccaggcacactgactgctgtggtggggcgagcggctccaggcgccagcataggcaccggctccatgtaagggtaaggctagatcacatgtactgcaagcagcttccattgctggcacctgtgtctggacaaggagaacgcagtgacgcccggaagcttggagacaccaggaaccacagagccccaaacagggtgtcacagctctggctcggggagctcctaggtctgggcttcctgaagggctgcagctcttcttgttgctcgcaatggggaaagcggggcagggcatttcagccctatttatgttacacttctttcagtcccaccattcagtgggtcccaagttcttgtcctgcgtccaggaagattgaggtatgcaaacagctggagggtaagcaaaaaggagaggagctttattgagcaacagaacagttcagaggagacccatagtgggcagctcctttccacaggcaggtcatccttatgagtgtccagctctcagcagagagaatacccatagtgggtagcttctttctgtaggcaggttgtcctgaggagtcaaggagacctgaagtgggtagctccttcccacagctggtagtcttgacgtctgtccaagtctggctgaatccggggtttttatgggctcagaagggaggaagtgcatgctgattggtccatgagcaggcccacaaaaagcaccataaattctcactccacccacagattctacccagagctggcagcccggcccccaggccttaggccatccctggcttgaaggtggggtttcacctgggatccagccctttctgcccaggagcccttcttcttcctaccgccatcaacatgccatccatggtgcccatgctgtgcatgccgaggcagcagggggctagtgtgtgtcagtgcccccctgagcgtgtgtactcccagccaggttgcgacagcgcctgggctgagccacaactttgctcctccccagagcaggcaccgggagtggggagaggctagggagtagaagcagacactgtcaagcctgccagggcaaggggccttctggggccctgagagtgcagggatgccagggtctggagctgcagctgggaggctgcagttacactgaggagcatgggctcctgccctgccaactcagtagagagcagggctctcacctgttcccagttcccacagactctgcacagttctatggaaaaacaggtcctggccacacttctcctgctgcagtcagcatcctcacagcggccgctccagatgggccattgctgccatcaataggtgacagggaagatggagagaagggactggccacagtaggacttagttggctgtgggtacgggggtagagtcagaggtgaccctgaggtcataggcccaagcagttagatagatatgaagctgggaagggtaggggataggagggaagtattcactgggtggcatcaaatccaggtccaagtcctggaaagaggtcaggctctaacttcagttcctggagttgctgactcccacagagtgtgtaatggaagctagaaggatctgatggatcgtggaattcagaatagtcaggtggccttgagccaagaaccaggtgatttggccagcatggtggctcacgcctgtaatcccagcactttgtgaggccaaggtgggtggatcacctgaggtcaggagttcgagaccagcctgaccaatatggtgaaacccccatctccactaaaattacgannnnnnnnnnnnnnnnnnnnnnnnnnnnnnnnnnnnnnnnnnnnnnnnnnnnnnnnnnnnnnnnnnnnnnnnnnnnnnnnnnnnnnnnnnnnnnnnnnnnnnnnnnnnnnnnnnnnnnnnnnnnnnnnnnnnnnnnnnnnnnnnnnnnnnnncaaaaaaaaaaaaaaaaaaa

SEQ ID NO: 1999 - DNA, 769 bp, Macaca Fascicularis
tacaggaggatgtgcatagttgtatgcaaatagcaagccattcatataagaggcttgaacatccatggattttggtacagaggaggggtttaaggggtgtcctgcaatcggtccccctcggataccaaaggacgactgtgtgtttcttaaatgaagagactttcattctttaaatattcttgacttacagttttttaaaaagaaaaaaaaaagcatagttgttaaaacaaataatttcaatagtatattcagtagctgaagtgatagggagtattaatcattatttcttcagtataaagttattcttcctgaaaaagtaagatatgcctgggaagtattcttggatccttcacacatccacttaaattcttgaaggaagaaacagacaaaagacatgtaacaacaaaaacaaataaaccacttactgtaaaattccaggaattgtgagctcattccctccctctagtttatttatttgctcatcgttatcacctagtggtagtttgttttctttggtagaatatatggcagtcccacatcaatgataattggtgctcccttcatctgactggatcactttgagattcagtttcacatcatcttagcattttctttgtgtttgtatatcagttgtgataagccactgatacaattttgttctaaaatgaaacatatttgttagttcattttttagtgtcacactgacttaaaatttgaatgatatacagactttgtttttttaatgcaatatgaatatttgctcatgttt

SEQ ID NO: 2000 - DNA, 1965 bp, Macaca Fascicularis
ctgctttcggctcagggtctcataagtggtccatgaactcacacccatcaatctccagccatcaagactcaaacaagcccctcaggttggcaaagattgggggactgacctcatgtcatccccacattttccacattaccgccagttaagaatttcagcccccatgatcagatgggtgagaaataacccatcttcattttcttcaaattagcctgactctgactccataggtcccacccaccaggcaggagaggactgaacctcatggctactggcgcttccccatcttctgaggcttccttttccacctcaggacctcaggagaagggcctcggacattccaccactatgtgtgtggtctggcagctttctgccctatgctcctgtggagctgggagtcttggacaagacagactatctgatgccggggcctcagccttttaaatgtactcacgggccctgaggaggcctggcctcctcctgggaatgcagacagggagcgacatgcatgtaaccgctgcccacaggctccgtgaacctcagatctgttctcaatctaagaaacacaattccacttccccttcacctctctcactccgggacactttgcactaccttttcaatgggcttaaaagagtggaggaaaaattgtcttcagacaacgttaaacagttttaaaacagaaaatttacttacagggacttcgtagatgttagaagaaatcaccaggtagctccaggtagctaggaagtaggaagagcccacctcttcttggaatgaggaagaacacacatgaactctcatctcataaaatccaatagtcaactacaacatggcttatgtgagtgaaaagatcccagaatgagaccacctgcgtgagcctgtgcctggtggtctcagagcatccccctcctcccctccatccctgctctgccctgtatcatgggggtctggcctctgcaggctgtgagccctgggttcctgtgtctctggcttctgactgggttggaccaatgggaagcctggagggacacgggtgtgtacaggagtctgggtgggcttcttgcctctctttgttgggctgtcttgcctggaggctctttccttctacaagccagcttcagccacagagacccagcctggttctagcttccctccagtaagtctgatgggctctgacaattgcctccttccttgtgcatccaagagctggtagccacttcctgatgctgtggacaccagggttgcctcagtgtcccttgtctgactttttggctcttctaccatctgcagggtccctgtgattaaattttctatcttataaaacttaggatgactgtttatcctcactgggtcctgacttagccacttactactgtgtggatgtggtcaagcttctttctcctgctatgctcggtttcctcatctggaaagtaggataataatgggttcttccttagagagctcaccccagagtgagttaaaaaagataatcttcagaacttgttacttggagctcacacagtaagtggtggtgtttggagtctgtgccagagggtcctgaggtgtgggctgagggtgatctttggtggtgcccattcactggattcaacaactgccaatcacagcgtgaggacattgttcacttttccggtggttttgttttttctgtctctcttcttctggatacaacgaaagctgtagtctgttcctagtatgtctttagaacttggagtctccatgaccaagggagaaagagcaggtctcacactgaggaagcagaacacaacagcatcgttctgtttacatggaatttgcttttacagccaacttctactgatggcaaatgatacagtgttccatttctggaggtgattaaaagttcttttcataatgaaaaaaaaaaaaaaaaaaaaaaaaaaaaaaaaaaaaaaaaaaaaaaaaaaaaaaaaaaaaaaaaaagaa

SEQ ID NO: 2001 - DNA, 707 bp, Macaca Fascicularis
  misc_feature (1)...(707): n = A,T,C or G
gcttggggaacagggacagacttctgagtctggaatctcggtgccagagggaggggactctgtcgtggcgctggnnnnnnnnnnnnnnnnnnnnnnnnnnnnnnnnnnnnnnnnnnnnnnnnnnnnnnnnnnnnnnnnnnnnnnncaggnnnnnnnnnnnnnnnnnnnnnnnnnnnnnnnnnnnnnnnnnnnnnnnnnnnnnnnnnnnnnnggcnnnnnnnacatcggtaagtctggggctccttctcagggcaannnnnnnnnnnnnnnnnnnnnnnnnnnnnnnnncacccggccttcctcgcctcctgggctgctggagcccacaagccctgtnnnnnnnnnnnnnnnnnnnnnnnnnnnnnnnnnnnnnnnnnnnnnnnnggggcaggttctcctcgggcatcacaggctgtgtcaagaacctggtgctgcactcggcccgacccggcaccccgcccccacagcccctggacctgcagcaccgcgcccaggccggggccaacacacgcccctgcccctcgtaggcacctgccagccccacacggactcccgggccgcgcccnnnnnnnnnnnnnnnnnnnatattattattaatattattatgaattnnnnnnnnnnnnnnnnnnnnnnnnnnnnnnnnnnnnnnnnnnnctgggctggactggaggtgggcacgccacnnncacccacacagctgggcaaag

SEQ ID NO: 2002 - DNA, 751 bp, Macaca Fascicularis
  misc_feature (1)...(751): n = A,T,C or G
gtagctgtgatacaggaaagcgagggctgagcnnagaggaagccncgggaggaccaggaaccaggacgcannncagccatcatgcaaagagcagcccagtggagactgccagctgccctggaggtccttgcacccaagatatttcacctaccccagggagagaagccgaaaggcacttcgccactgtcccnnnnnnnnnnnnnnnnnnnnnatactgccttgagtggaggccagcagggcagcgtgtccctagcaagaaagnnnnnnnnnnnnnnnnnnnnnnnnnnnccnnnnnnnnnnnnnnnnnnnncaaggtgatcctgagggctgtggcagacaaggggannnnnnnnnnnnnnncnnnnnnnnnnnnnnnnnnnnnnnnnnnnnncgcgggctacgacatggcccgaaatgcctatcacttcaagcgtgtgctcaaggggctggtggacaaggnnnnnnnnnnnnnnnnnnnggcagggggcctctggctccttcaccctgggcaagaagcaggcctccaagtccaagctcaaggtcaagagacaacagcagcagaggaggcgctctgggcagtgcctctctgggcagtgccgctctgggcagtgcccctttggacagcgcaggtcactactgggctccaaacaggggcacaagtgacnnnnnnnnnnnnnnnnnnggatcgccaagtgccactgnnnnnnnnnnnncaggccgggcaagcagtcaggggtgccaagcccgccgg

SEQ ID NO: 2003 - DNA, 756 bp, Macaca Fascicularis
  misc_feature (1)...(756): n = A,T,C or G
gcagnnncnnnntcaagaccaagggnnncctggaaacaccagctctgacgacaaggagtcatctgggagccctagaaacnnnntcctggccaggcgcagtggctcatgcaccnnnnnnnnnnnnnnnnnnnnnnnnnnnnnnnnnnnnnnnnnnnnnnnnnnnnnnnnnnnnnnnnnnnnnnnnnnnnnnnnnnnnnnnnnnnnnnnnnnnnnnnnnnnnnnnnnnnnnnnnnnnnnnnnnnnnnnnnnnnnnnnnnnnnnnnnnnnnnnnnnnnnnnnnnnnnnnnnnnnnnnatatcacaagaaaaagaattgtaagggatggttcatgagacacatttgggacaaaggtgaaacagaaactccccattgtgagtgtcctagttgggttcctccaactctaaacaagggagttgggttcggttagtgcgcagcgggggctcacttccactgaggaacatgtagaatgtactcaccgggtgacagggannnnnnnnnnnnnnnnacctagcccccatcttctctggctagtccacttatttaaaatgtccagaataagcaaatctccatatagagaaagtagacttgtggttgcttagggatgggaggaatgggaagattgaggccttccttttgcagtgataaaaatgtcctaaaattgattgtagcaatggtcacacaactctgtgaatatgcttaagaccattgaattacacactttacattggtgaattgtatggaatgtaaataacatag

SEQ ID NO: 2004 - DNA, 942 bp, Macaca Fascicularis
  misc_feature (1)...(942): n = A,T,C or G
aagtaggacgaggttgaggcagtttgctgactgaatatgtgaagannnnnnnnnnnnnnnnnnnnnnnnnnnnnnnatcacagtnnnnnnnnnnnnnnnagcttatatgattcttgaggtaactctaccagatacttccagatttagaaatgtatcaaaggaaaaattggtgatattcttctttcccctgccagaaacagcccagatctccgcttaagcggaaaagagattgaccttctaacagaggcaaaggtaaactcctgtaagttacttccgttaccaaagggaggggggcagcttttgtgaatgtttgaggagcttttgccacagagatatttggaggaggggtgtgcccatatgcacacatacattttcccacataaccatatccaatgctagcatttagaggaaggcatttagccaccaaaagtccatccacctatgctgcttccacagggaaaacattttctctttcctcctcttgaacttacataataccctcctcccattccaaccttagaatggagtcttttgggggcagctgcaaagcattctccctaggacagatggagcctcccttccctcatctactctgtgggtggtttcagggcccatgagtcaacatgaggagttgtgctggtggtatgtgtgttggaggctgggctggctgattcacagtgacnnnnnnnnnnnnnnnnnnnataatgagaatgatggtacccaataaagacttttttccccaaatcccatctacaattctttcattgggtgttttgccaagtctttctcaatctcatttcagctttttaaaaaagaaaatgtattcaatacttaattgcatcacaaatgtagacatataagaaaaaaggacttcaaacggaatttatgggaggcaatgtgtgcggctttttgccttatagagctgtgtagaaggcctggaat

SEQ ID NO: 2005 - DNA, 585 bp, Macaca Fascicularis
  misc_feature (1)...(585): n = A,T,C or G
tgccgcagccacctctcgggaagagaggaagnnnnnnnnnnnnnnnnnnnnnnnnnnnnnnnnnnnntccagccgcgcggtcccgaagagtnnnnnnnnnnnnnnnnnnccaannnnnnnnnnncgcccnnnnnnnnnnnnnnnngatccagagttgcatacagaccaatttnnnnnnnnnnnnnnnnnnnnnnnnnggctaggactggagagggctctacggtatttaatggggcccagaatggtgtgtctcagctaatccaaagggannnnnnnnnnnnnnnnnnnnnnnnngacatnnnnnnnnnnnnnnnnnnnnnnnnnnnnnnnnnnnnnnnnnnnnnnnnnnnnnnnnnnnnnnnnnntattggaacnnnnnnnnnnnnnnnnnnnnnnngttatgccagaaacccnnnnnnnnnnnnnnnnnnnnnnnnnnnnnnnnnnnnnnnnnnnnnnnnnnnnnnngctatgggtctcttttgtttgnnnnnnnnnnnnnnnnnnnnnnnnnnnnnnnnnnnnnnnnnnnnnnnacatgttggcattcttattaattacggatgtaattctgtgtatcttact

SEQ ID NO: 2006 - DNA, 724 bp, Macaca Fascicularis
  misc_feature (1)...(724): n = A,T,C or G
tcacaccaggcccagctggctgccccgcnnncgccctgnnngccgcgccctcaccctggctggcaggtgcacgtggggcctccgggtccaccattcactattgagagctagaaatgaggaaggacagtcacaccaactccaaaaggctgtctaggatgagctgcnnnnnnnnnnnnnnnnntgtacccattttacagaaatcatttttaggtctttgtgccaccaccatgaggggcatctgcaaagagggcaacgctggacgcagaatctgtggaaggtgcagcagtgcctcaggggtcctcaaggtcagggagcccccctctccatcttggcccattaccctttgtgacttcccaccatggtgtcgtgtgaccctcaggctggtgggggctgagtcctcactgagcacccactttccacatctgctagaggaacagtgacacggacacttgtgtgacagagagaggagggttagtgaggagggacagacagctcttcccnnnnnnnnnnnnnnngtctaggacatcaccttgctgtgtcttctccttctcaagcttttaaaattgaccctgagcgtgagacagggnnnnnnnnnnnnnnnnnnnnnnntgcaaggtaaatggtgacatatttattcttttcccatttgttctagaaacagtgcctttttcatcaattgcattttccaggttgagagctgtataaaacattttggactgtgacc

SEQ ID NO: 2007 - DNA, 374 bp, Macaca Fascicularis
  misc_feature (1)...(374): n = A,T,C or G
gagggtggagtcggcggaatgtgtgctaggggccgggcaccgggctgggacnntggcgtccctccaggacctgcctcnannnnggaggacagtttggcttcacttnnangaccccagcctcggcggtaaagtgaaggagactggaccagcttcagctttcggactccggttattggatcgtgtcctctccccctcgcctccctctccccccaatatgagccattgcaggcctctgcctgctgccctctccctcctcggaatcgggtccccagagccaccatannnngagcctcccaccccgctgcctggnnnnnnnnnnnnnnnngcctcccacctcaaggaggggaagattgtacagcccaaacccgggagca

SEQ ID NO: 2008 - DNA, 443 bp, Macaca Fascicularis
  misc_feature (1)...(443): n = A,T,C or G
gagagaagggaggaactagtgagagactaggtacgtgatgtcgccctcctccccctttattcttgtatttttttatccattatacgtgtagtacaaccggtcacagcaaaacttttatttccaaggtcccgttaaaaaacaaaacaagccaaaaaaaaaaaaaaacacttgtaccaaccaggtgccacagtcgacaggtgttggggaaaaccaaaaggcaccttttcctggctgtatttgctgactgttgccacgatacatggacacacaagcacaacatctttannnnnnnnnnnnnnnnnnnnnnnnnnnnagaaggcgctatgagaaagtgaatgccttacaatctaagcaagttggaacaccagagcgggttgtaaactgctgtattctttggtttattgtagtcatgcgaagtattttaaattacaaaatgtagagcc

SEQ ID NO: 2009 - DNA, 786 bp, Macaca Fascicularis
  misc_feature (1)...(786): n = A,T,C or G
ctcatatactnnnatcatctctagagtaacnnnntacaatgccatacgttacttcacgtagattcagcataacaccatatggcaaattcaggtattgtctttggaactttgtagggttttcttttcccctgaatatttttaatttgcaggtgttgaatctctggatgnnnnnnnnagaacccgtgaatacagaggacctattgttcttcaagttagagataaagcctctgataaaataggaacagttttgcctgaatagaggcaaactcttaacgagttgacatgcagtcttgaaggacaagtttatagatgagtaaggcaagctaaggttattctcttcgcaacactgaatatttttttagggagctcaaaaatacgatggctgtgggaaacctcggagaaggacagggaactttgtagtaatgatgtcggaatcaaactggaccacagtgaatattgactannnnnnnnnnnnnnnnnnnnnnnntaagtgttgaacacagaacagtggtattttgcacctgtcctaaaatgaaacatctataacctgttattggtgannnnnnnnnnnnnnntaagtacctccaacctaaaagtaataggaactaaagtttactttaatgggtgtgatgcagtggtagagttttcactgatacttggttactctctggttcttctgctgacttcagtttagttcatggtaactgagtgactcgggacattctttatgcctaagtttgttacacctataaaatgaaaatgactgttaataccttgtgggaatta

SEQ ID NO: 2010 - DNA, 740 bp, Macaca Fascicularis
  misc_feature (1)...(740): n = A,T,C or G
cccttttnnnttnngtactgagactctcaaggtcccatagctatgtnnnnnnnnnnnnnnnnnnnnnnnnnnnnnnnnnnnnnnnnnnnnnnccnnnnnnnnnnnnnnnnnnnnnnnnnncannnnnnnnnnnnnnnnnnnnnnnnnnnnnnnnnnnnnnnnnnnnnnnnnnnnnnnnnnnnnnnctgttgttctgttttttagcacagccatttagatataacatccttcacttaaaaattaaaaacatcatcactactaccaccaccaataacaacatcaacacagatcttcacatctgcccattctgtggttagtcnnnnnnnnnnnnnnnnnnnnnnnnnnncatctgtaggaaacatttttgtgattatgaaatactttagttgnnnnnnnnnaatattgaaaggtcttnnnnnnnnnnnnnnnnnnnnnnnngcatgttttggggacttggcccttctgatgaggggcccnnnnnnnnnnnnnnnncaaagcttgtgcagagtggtaaccatgcttacacactaaacaataatataaaggaaatgaagccatgttaacctgagagcagtgtcgccatagttgtgttgtttacaatactctataaatgggttcctgttgccctgtaattannnnnnngcccgtagaggcctttcggttccttttctgtcctgtcccttcttaacacaagctcaaattttctaacttgtttttattttgaaaacttttaaaatgaa

SEQ ID NO: 2011 - DNA, 1717 bp, Macaca Fascicularis
ttcttggcacagcggagctcgggcccggtatctccgtaggggctctcagtggccccttctgggctcagtccgggaaccagtttgttgggggagaacaccgtccccattgcggggcctgggtgttcgattttctgcgaagcaccgaaaggtgacttcccgcgagggcgatgaagtagcccgagaggcgcatccccgacggtctcggacctaagcagcccggcggacttcggggcgacctcccgcgggacttggcccggcatatgcagacattcgggcctgccgcggtggcggcagtggggcgtcgagtcgagaggccaaccgaccgacgcgccacccgcgcgcttggcactgtgcgctctgcctgtccgcccggagtctccagggcaagggacgcactcggcggccccgagccacgtgctccctgcgcgcggtgcgtgcagaggcccgcgcgcaaagcccgccgggcgggggatgcgcgcctgcgcgccgcgacctccctgcccccacagctccccgggactttgtccgccagggggcgagagcgggcggagctggggtccggggtccggggagcggggtgggccgacaggtgggccgaggggtcccgcaggccgggacgcctgttggtattggcggctgtgtcgtgtggaaaaaattaccgggcgcccggggcggcgctgccttttggatcctgggcggagtcccacccacgaggtgcggtcgggacccctagccttcgctgggaggccgggacttggttactccggaggcaggccccggcctggggcaccgccaagcagcggtttgcggcctctaggaatagcggtcggatttgggggtcagtgtgctttggtttttttcagagacctgatctggccggggcggtgcgttctcgcgggtcttccaggctggcgcgccagtggggccctccccgagcgcaggcccctccctccttgccttatttatttctgggacatatcctgccaccttcctagacggctcgaggggcgggttccttgcacttggaagcaggctgatgggcgtgagtgtccggggctcgtccacccggcccgacgggttggggctgtggcgccacatggctcctttcctaggaagcgccagggggcagtgggaaccgccacaggggccgctgtagcgggccttaaaggatgggaaacccgatcacagatgcccccgccggccttcctttcaccggaccagtgggaaagggaccagtgggaaagggaccagtgggatagggaccgcagggacattaggcccttctccacgtgtcgcgtgcgactcttaatttgggatggacgcaacagaccagtagtaagcgcctttgcttaccctggggttgctcggaagacttactggttactggttccttcttcccttttgaaggacttaaaggagaagaaggaagttgtggaagaggcagaaaatggaagagacgcccctgctaacgggaatgctaatgaggaaaatggggagcaagaggctgacaatgaggtagatgaagaagaggaagaaggtggggaggaagaggaggaggaagaagaaggtgatggtgaggaagaggatggagatgaagatgaggaagctgagtcagctacgggcaagcgggcagctgaagatgatgaggatgacgatgttgataccaagaagcagaagactgacgaggatgactagacagcaaaaaaaaaaaaaaaaa

SEQ ID NO: 2012 - DNA, 2010 bp, Macaca Fascicularis
catattgaaaaggcatagatagcttctcataaatttactaaacctcatccattctcacaaatccaaatgctctactatgctaaatctccatataggaactcactcccaagtggagatttacatttattactgtctttaagatctgtaactgaaataataacagtaaaatatttagggcagtgtctggcacatagaaagtgctcaacatgcctttcacctccactcccgtactattgtttagtgaccatactaatcatttatattttgaaatggatgaaaggatagatgttataagtggagtgcttgctttaaactataaacatttgtttattttaattttgattaaagctttggtatgaaaattaaatctaataatgtattcatatcactgcattgcaatatttttgccaattttttcccaaatttttccaatttctaaattgatacaattgcataatggggctaccaaatgttccataagttagtaatagtcttacagttttgacagattatggtataccagtataattattattattgtcattcattattttcttaattattgaataaagtacatttgaacaattataattagaataaggaaatggagtgttttaccctggttaacaagaaaaacactagatcttgtggcagttttcatctaaagtggagaatgtattcagttatgtgtaaaagtatagaacgaaggacatagaaataagatgtcatggaattttaacttgatgtgaaaagagatagtagaattttaagaaactttctaaaaagtgcccatcataattaagaaaaagaaccatcatgattcctccgaccctccaggaagaatgaattattgccagggaggggtcgtagcagggaatggtaaagaaagtttgaaatcctaggttctccattctccactcttacgagataaagatttttaaaattacattattctttgaaacaattaattgaattaactcaaatattatattatgtaagtagaaagttaaacgtatgacaggagtataaaggaatgtcctagaattctcttgtactacatttgtcagtttctttcactttatgtttatgtcaaatcagaatattctcagttcgtttccttttttttatttatccaatataaccttcccttttatgcaccttcgataagaacaataattctgttcctcaaaatatatgtattggatttatgtgggctatgtttagagcaaaacaattccaaaagaaagaaacattgaaaatgatagatgtaggtggattatattccttggtgtcctgaaatggtttttatcatttggatatctgcttctaagcattttattttaaacaagaaattgcattgttttttgtcattatcacactaatgtactgagaggctgcaaacagaagtacacatgacaattgatccatattccgttgggacaacagatggcacgtaaaaaaaaaatgtctaaacttaggaagagcaaatcttattttcagatcaggtttacagagtgcttgatagggtaccaagcaattatattctcaagtgtaagaataaactaatatatattgagaaccttaaatctatttaacaatttcttttttgtgtgagtttttaacttttttgcttattaatactaataattctatatgcttatataattcctgtttggttagagattataaatcatacattaaaacatattaggcaacaatatgtcctccaaagttttttcttagttttacttgacttttatatttttacacttgtgtgaaaccagttatggtcttgagttttctttccctagataacattatacatgaaacaacttcttgagtggtacttcaggaaataaatatcctcttggattggtttcaggacaaaactattttgtattgaattttactccgtagcctttgctattatggggaggtagataggtacataaacagtgtcttagtccatcccagatgctataacaaaaataccaaaaaaaaaaaaaaaaa

SEQ ID NO: 2013 - DNA, 2799 bp, Macaca Fascicularis
tgcagtaagctgagatcatgccgctgcactggcaacagggggagactgtctcaggaaaaaaaaggcacacaagaacgagttcaggggcatcattgtggccaaatctggcatatttcgaatcccagaataagaatagtgatgaatgataaaccactgggaaaaaaaatagaagttagtgaattcatactgataatgaataggtaggtatgtcaataaaaggggatgatgacaatatttcttgctgactgatagaaaaaagtgctggagttgggaaatcgttttgcagccaccatattaatgattggtttggcacaagttatcattagatgccaaatttaagaatggcggtgagacttcagtgagaaacaatgtgatcatatttcaaaatgtgtccctgaggttgctgttggttgcaaggagaaatacatagtatacagtggaaaaatggactacaccttaaaaaagtaatcaaaattaacatcactagtgagagacagataggaaccttgtgactctggttacgatatcctgaggtcaaatgtagtattatggggtacataaccagagtctcctaaggacacaggcacctcagatgaacctcaaatgagaagcattctgttaagggtgaaggggcttgcttgcattcttcaaaaataatttcaaaccaaacatgtcagtgtacacctgtaatcccagttactcaggaggctgtggcgggaggatcatttgacaccaggagtttgagtccagcctgggcaacgtagggagaccctgtgtctaaaaaaaattaaaactaatcttccagattaaaggacactgaaagataaatatgactttttaattttcatgtgatcctggtcctgaaggaggaaatgctataaagacattgagtcagttggaatgtgtatggtgaattaggggtaagtatcatatattgtcagatttcctaaaactgataactatactccagttacaagaaaatgtttttattccaaggaaatgcactttgaattattttgggatatgtaactttcaaattattcagaaaaactatgtgtttagagaagaaaaaatggggtaaaatattagtaattggtgagtttgagtagagtacacaggacttcattgtattattcttctaactttcctgaaagttcaaagttatttccaaatagctttaaaaaaaaaaaaaaaaaaaaaaaaaaaacagtgacaactatactggcataccatttttcatccatcattttgggaaaaattcagacacttgacaatacattcccagtgcctctggggaaacaagcactctcaatattgctggtgcaaatgattacatttcttttgagtggaatttggcaatgtctaacaaaattacatatacatatatcctacccagcaatcccatttctgagagtataccgtggagatataccatgcacagtgtaaaaacacagatacataagtttgctgcagcatatttgtaattgcaaaacgttgaaaactaaatgttgaaacaagaaatttattgaataaacattcacaatggagtactatgcagctgtaaggataaggaagatgtcagtgcactgaaatggaatgatttccaggatatatttctaaacgaataaaaacaaaggacagaggaatatagtatgtgacttttgtgtaggaaatggaaataagaaaacatatgtatacctgtacatattctgtttactttttcaaaatgtacacaaacaagaaggatgaaccagatagtgataaagttggttacctgcttaacagggtgggtggtgaggcagggaaggaaatgacatttctttgagttacacctatttgtatagttctttatttttgcaagaaggatgatctttccagtagtccccccaaaaatgaagttaatccaataaggatgatggaggagactaaaaaccaaaagcaaaccaattctaacttatctcaagtcagtaacaaccacattgaaataaataagctaatccaagtaacatttgtactcagtagtcagtctagagagaagtgactgcaaagaaatactgaactcttaacagtttttttgtagtggtatgctgtaatgcttctgtaactatttaaatgtctaaaagggttgagcaaatgagtagataggttttgttaagagccagcattctgttgaaaaagacaaatgtgaagtgtgggaaggtgagaaaaaagcccttgtggggatggcttggaattggggatttaagtgtgaactcatagtttttgaaaatacatgtgtgtatacatatgtcacatacgtgtgtgtatatattctttgtccagtggaaaggcccagaatcaaagagatacccaaatagcaataagtacattgaatacctagatctgtatttcttatatcattccccactaaaagataccaaggctgttaggagaaatgtttggttccagggctggcacagagaaatggttataagataagcctggaatatctttttatgccagaaagtaaggaaatgctcagaaaatgatagaggcatatcagaatgacacaggagtaggctctgaggggctcccactgacctactctgggacggtatgatcccccagataattaaggacaataatgagttataaaaccttgaaaagtaggctgggcgtggtggctcacacctataatcctagcactttgggaggccgaggcgggcagatcacttgaagtcaggagttcgaaaccagcctggccaacatggtgaaacgccatctttactaaaaatacaaaaaaaaaaaaaaaaaaaaaaa

SEQ ID NO: 2014 - DNA, 751 bp, Macaca Fascicularis
  misc_feature (1)...(751): n = A,T,C or G
gaganngagagatgttgattgtanaaaggagtgtgtgtgggggttagtggggatcccannnnnnngcatcactgtgagggagctccaggccctgtccctggagaantnnngnngcgcagaagtcacaggccatactgggcagttctggtacaaacctgcccttaataataataaaataataataataactccatttgcatagaactgtcnnnnnnnnnnnnnnnnnnnnnntccctaccctggttttttgctgnnnnnnnnnnnnnnnnnnnnnnnnnnnnnatgggccctgagctcttctgtttgcttctggagctcttcagatgctgcccccctgagaataccctaactctggggagagagcagccaaaatcccaatacaatgaaactccacacaatcttgttagcaacannnnnnnnnnnnnnnnnnnnnnnnnnnnnnnnaccagaagaggcccagggctccctttnnnnnnnnnnnnnacccagccattcttgggattgcaacatccatttctagctccagttgaattttctccacccagaccccagaaataaatggatccatgatgataattaagagaagagaaaaaaaagatattatttttgttaggacaaaccatcgtaggtttttagcaatgtgtatctgtgtgtccctcacaccttttcctattctactttttttcttttttttaaaatattatgtactatatttttagtctcaaacacactatatattatatatatttaa

SEQ ID NO: 2015 - DNA, 365 bp, Macaca Fascicularis
  misc_feature (1)...(365): n = A,T,C or G
ccggctcggtgactgcggagggcgagctaacacctggccgttgccacgatgggccgcgagtttgggnnnnnnnnnnnnnnnnnnnnnnnnnnnnnnnnnnnnnnnnnnnnnnnnnnnnnnnnnnnnnnnnnnnnnnnnnnnnntaaaggagtcccnnnnnnnnnnnnnnnnnnncgggagtctttctttcgcatggtgccgcagtttgtnnnnnnnnnnnnnnnnnnnnnnnnnnnnnnnnnnnnnnnnnnnnnnnnnnnnnnnnnnnnnnnnnnnnnnnnnnnnnnnnnnnnntgagcaatgcatctggatgacggttccctgtctctgaaagacctttttctggaagaggagtctgcattgta

SEQ ID NO: 2016 - DNA, 723 bp, Macaca Fascicularis
  misc_feature (1)...(723): n = A,T,C or G
gttatagaatgcttgtgtagaaaaaccatgccatcatcaatgactaacaacatgtagggacttcattgtcatgtcaaagatagttctttgcaagtgccttgattaaatcagaaaactgtcatcgtttagcccaaatatctgaatggtcatctgataactcatgagtttttgtcctcataagatggtccgctctgtacacaggcattcctcatgcaataatgttgtatctttgagaccattgtcagtgtacacaactcacatccttcatattgaaggtgactcatttttctgcacacttttttgatgtgatgtttgacgtgaggcccgacnnnnnnnnnnnnnnnnnnngaatccagtaccttgcacatagaagtagcaacccatcacttgcctattttcatcttgctgttttctttttttttaaaaatggatgtgacttgttttgaatgttttgtattatacttgtttttgtgtgtgcattaattcattctgtaggctcttaagaaagggagtcccagaatgttgcttctattattgtgcacaaccattgagaagtgttacaagaatgcagttaattttaacatgtgtgatgtgtcatggtggaaaagtactattggaatagctctgcagtgacagaatttgaagtttggctagcatccatacttttttactgtaaatatttcactctcctctagctatccttgatgagctctcacatcaaac

SEQ ID NO: 2017 - DNA, 741 bp, Macaca Fascicularis
  misc_feature (1)...(741): n = A,T,C or G
gcagcatttcncnaccntttcccatgctcatcacaatgccnnnctngtctttttcgataggatgattctgaatggtggacagtgtcaggggtctctctggcttgggtggttgcagagactcaggattgggaaatgccaccaagagttctgggaagaaaaggaaagtgtgaattggctttggcaacagaagctttagggaacttgccaaaaacagattcttgtgctaggaactcgtaggggttagaagactacagagtctggaaactacatgtcattaataaaagttggaaaatccggctgggcgtggtggctcacgcgtgtaatcccagcactttgggaggccaaggtggacagatgacgaggtcaagagatggagaccttcctagccaacatggtgaaaccccatctgtactaaaaatacaaaaattagctgggattacaggcttgagccacagcgcccggcgttgcgtgggtatcttattctagaactgttcattcagttacaagtaaaggaatttaaccacttaactcaagtggttgtagcttaacttgcccacaggtatgggatataacaattttaaaaatcatttttaaacacctattttctcttaacaggaatctctgaaggaagaagatgaatcagatgatgataatatgtaacatttactccagcatctattgtattttaaatttctactccagtccaatgtaactatttagccctggattatacatactgtc

SEQ ID NO: 2018 - DNA, 727 bp, Macaca Fascicularis
cgtagaaaaggtgatataggaaggaactgtcttcactgctggaagaataaaagagtctgaggtatagacactgccctggtgacacctcctcagaacattgttgggagactggggaggcaggcacgagtgggggatagaatctgacctgacatgaagctatcacctggcagagagacttgtcaaagaaaattgtaacaaccagcactattttattgttttggaattgaaaacccaagaagccccaaaataagaacagtgagatcaaaggctagtttctaaaaacagtgtagaaaatagaaacatgttggaattcctaaattctagctttcaaatactctcgtttccaaaagtgaatccttgacagagcctgaatgtagacggagttttgaaacattttcggtagctacctcctctcttgaaacgcctataagtggcagaagaaaatccaaatcctttaatataacatgtccatctcctgactcctgcttacacacatttccattgatttgcttcagttctggaggatgggaatttgcagggctggtgacatttccttctttagacaccaggaattcaccagagagagacagatttgtgccttctctttttaggatctggtcattgatactttaataaatgtggtgtaaagaaaatccatgcctacagtctgtatagaaaatgtgaatttttttgataagattgtgttcttaatgtaaaaaaagtttat

SEQ ID NO: 2019 - DNA, 1641 bp, Macaca Fascicularis
ttttcgcgttggagctcagaacagcttgcttatgtctaaatcctgtgtcccttttaactaagctgctgtttggcttgaaggcttgggccttcggccaatgagttctgctcgtgttcagagtccttctcaggaaagcatccctggcagagttccagggcccagctggtgaaatcaacttgttgctcttttggtcttgaaaccgagagaaacactacatcttataaaagattcctgacagagaggtatgattaagtatagcaagaaacttattgatgagcttgtgtaagctctctactaacattttgcggagaataactggagcccattattgtaagtgctttagatgcctttggaggtcgtatcatgctccagatcttgcctgctgcagttagttttaggggaaaggaaaatgcatattttaatcttcttacgaagaagcagcatggaatagaattacataaaataatgtatgtaaaactatgtagtacagtacttgacaaatagcgcttagacagtacctggaacataatgacccagtaaggaaagtcaaaaagcacctaccattaacaccattgattcataaaggaaagggcattttaccataaaagaaagggagaaagaacatattgtaataaagtacaatcctttaaatttatcattaagtaaaagtccttgtttttctcattttgtcctagactggggaaaacattgttatgggtgcaatatggcttagaggttaaaggcgtgggctctggagtttgtctacctgcccagcaccactcctaattcgatgtgaccttgagcaagttactttacctttctgtacgttagttttctgatccaaagaatggagttcacataacctacctcatgggtgtgttgtaaatgtaaataagtaaataagtagtacatgtacttagaacagtgcctggcacatcataaatgctcaataaatgtagcctttccttgtagtcattaaggcacttgccagatactgccagcttttcaccctcaggcacacccaggattgtgcttctcagccagcctcccattttgtgattgggtggggccctatgactagtgggctgtgaacaatattgatttgagccgcttctgagctagagtattatagttgctggcatgagactctctagaactcccacctctagcacagtgattagtaacactggagataggggctgctctgtcagcctaggtttcttagtgcctcaggcaagcagagtcccctagcccccaaccaatgataacatgtaatgagtaagaaataagcctttgttttaaacccctgaggttttaaggtctttgtaatcgctgcatatcttagcttatcctgactggcgcagatgttaataataatatggctagttatcatttcctaggacaatatttggaaataatttgtcgaaatcagtacctctcgaaatgtgctgtttgaatccctgacgatccctgaggcactttcaggaggcctgcaagggcaaaactgtttgtataatagggaaaatgatgtggcattctcgtgcctcagtttctatgtaaaatagagtttcaaagtcacacttgctttatggggttgttgttaagaataaatgacaatatcagacagaagagcctttggca

SEQ ID NO: 2020 - DNA, 620 bp, Macaca Fascicularis
ctccaggggctgatggaggtgaggtccccccacctggaggagctgctgactgcgatattctatgccactgcggacgctgcctccccgtttccgggatgtaagccagtggtggtggtgagctccctgctgatgcaggaggaggagcccctggctgcagggaagccggatgcggatggcggcggcctggaggccgtgcggctggggccctcgtcaggcctcctggtggactggctggagatgctggaccccgaggtggtcagcagctgccccgacctgcagcacaggctgctcttctcccggaggaagggcaaaggtcaggcccaggtgccctcgttccgcccctacctcctgaccctcttcacgcatcagtccagctggcccacgctgcaccagtgcatccgagtcctgctgggcaagagccgggagcagaggttcgacccctccgcctctctggacttcctctgggcctgcatccacgttcctcgcatctggcaggggcgggaccagcgcaccccgcagaagcggcgggaggagctagtgctgcgggtgcagggtccggagctcataagcctggtggagctgatcctggccgaggcagagacgcggagccaggatgggga

SEQ ID NO: 2021 - DNA, 703 bp, Macaca Fascicularis
gagctgcctgggcagagaccaagagggtgggagacactgattttaccaggttacaggagggtttaagacagaaggaaaactaacagaggggagccagggatgatggggtgggtaggggatttgcatgatgaagaatatcattctgggtctgtgcagggtggattggaggggacagggtggagtggggaggcctgtgcaaagtgggaaaagggtgccagtggcctgagccagggcgctggggctgtgggtagggacaggaggccccagcacttcagagaaaggccaccccttcacccactggaccccaagccgcacaagctggggaggtaggaagggtcactgtgaaggcccagggcccctctcttcccatctcccttgtcctggtggcctgcagtgtctcctccagttcaggagctgctaggaagctggccttggttgctggtgacagggaaaccatgagactaggaggtggcctacacacacggctggctggtcccgaggtcacccaccctgctccaggacatgtgccctgggcccggtgtaggggtagaggcagagggcagagggtagcccttggtactgtgggtccctcagagaggagggtggggtgcagaaatgcctcagcacggcttatgcacacagcattctcctgtgggacagggctccctcgtgcaactgtggccagcctctatgcctgtctctc

SEQ ID NO: 2022 - DNA, 725 bp, Macaca Fascicularis
  misc_feature (1)...(725): n = A,T,C or G
ctgcagatgcnnagtaggggctacctcattctcgtgctgttcttgtgtggctttctgggcagtagggatcttgaatttcctttctaacactgtgccaggcaaggcagggagcattcctctgccctttctcttgtgccaacctggtaaggtgcagtctagatttcagcgagaaccctgccagccgagccctgtgcatccactaccttaacacaaagtgttttcccaccagaagccctgctgtgctctcctggcccaagtaggggattccatgccttccctttcatgctcttagtgccagcagcctagtttctcccttccagagtctcctgggatgacaaattggattggagacaaacctcatcggatgctcatcccctaaaaggttaagtgtgtatttgtggctgcgtgtgcctttgtgttttcattctctttccatttttgtaaaattgggtcgtctctgtggttttatacttggtcaaaagtactcatcttggtattgcactgttgtatgcatgagaaaactgggggaaggctcacgtggtacaagaaaggacgcctgacccatttccttctctgtggtccccggcattagattgggggttctgggagaggcaggtgaatgtcctaagtgaattgttctgtttgtaactggagtgtttttgaagtctttggtgttgctctgtgagaggacatcgccacctggtgctcatgaggtgtctgtgcag

SEQ ID NO: 2023 - DNA, 728 bp, Macaca Fascicularis
  misc_feature (1)...(728): n = A,T,C or G
catgttaagtgttcttaccatatatatatacacaaagaagcttttggaggtgatggatatatttattaccttgattgtggtgttggtttcacaggtatgtgaaactatgtctaaactcatcaaattatatacattaaatatatgcagttttataatatcaattatatctgaatgaagttataaaaaagaaaagacaacaaaattcagttgtcaaaactggaaatatgaccacactcagaagtgtttgttactgagtgtttcggagtgtgtttggtttgagcaggtctagggtgattgagcatccctgggtgtgtttctatgtctcatgtactagtgaaagtggatgtgtgcatttgtgcacatctccctgtgtatccttatcagggctgtatgtatttgannnnnnnnnnnnnnnnnnnnnnnnnnntatnnnnnnnnnnnnnnnnnnnnnnnnnnnnnnnnnnnnnnnnnnnaagtggatgnnnnnnnnnnnnnnnnntgggttctctactcttgtgcttgtacagcagtctccccttatctcatatgcttggtggatatgttattagaccccaagtgggtctctgagaccccagatggtaccaaacctcatannnnnnnnnnnnnnnnnnnnncacaaatannnnnnnnnnnnnnnattttctgaattaggcacagtaagagattaacaactaataaataataaaattgaatagttacaataatat

SEQ ID NO: 2024 - DNA, 2445 bp, Macaca Fascicularis
gtattttctacaacagcacatcttaagacttaagacatgcggtgtttctatctgaattatccttcatttctctttctatccatcttcttccagggagaaggaactcccattcctgctctaccaagcaaacctactcaggtttcaaaactcaactctaatgtccattcttccttgacgtttttaaaagtcttagtctagctaaactctacccaacttcataattctaacgtattttacctttacatctgatattgtatactatccggttgcctgtgtcttctcattaaacttgaggtttttaaggccacaaaacaaaaatatattgttcacttttacatcttcagtactcaacagtgtgaggagtctattgattcaatcaatcacttaataaaagtgcccggataatttttgtgtatgtaggtagcattgttttagggaccatggggagtttggggaagtataaaataatctccaccctaaaggaaatgacaatcttaataaagaaataaaactcactctgatggaacctgaaagagcaatagtctacattaacattttaaatctgtggtcccaaaaataaggccaagatttggatggtggtcaggattggagggaagcagggacgaagttatggctaacaataatagagtcaacacatacgcacgtatgcccttcttggaacttctcagtggatagctacacaaaaagttgacaaattcatcagaaattagtttaatttatttgaccctgaaaccatttattcatgaaccatctattgtcattcttagtttctataccatttgccaattaattttataaaaaaattaatcaaaaaacatagcatgaaaattatgtatgaggagtaccttataataatccttgaaatcttattataagcattttcccagataaatccctataagaccagcaaaaactaaaagaattagctaatgtttggtgactggaatagaaatttactagccttattaagtaccacaaatattaaccagatttctaattatctttgcttatttttctgaaagaatcactaactactcagagtatgttctatttttatattaaattgaacatattctacatttatattattaaattgaacagtctctgttcttagcctgtaaaaaatgtaattacgtaaatgtaacaggaatacttgaattctatgattctctcatctcagtttctgctcaattctcttcttatctaatactctttttactgaataaaaggaggagctggtcaaaaccttgtgtgaggctgctgtccttgcctgtgaaaaacattttgtaaatagacatatatatgtacacacacatatctatatgcacacatttatgcacaaatgtatagtttttgtagataattcagtagttatatacaatatatatgcatgtattttatttgaaacaatagatttgctagcttatgattttctgtaaaaaaggaaaaaggaaatcaaaatcatttctaatggaaaaggccaaaccaaaatgggaacagcctgacatgtagtcatcaagtacaaacttgtatgctctagaaagggaagtgaattttaagggacactttctacatttagtctcacctaaacatatggataaaatcttggaattgtgtccaactaatcttattggcatattcccattatgtataatggtaatattgaaatgtagacgcaagtaactcagcaaagctgagtgctctgaaattttaaattaatcattttatctaatctcatgtttaatgagttagtttgaattgattcttcaacacaaacattatttattattaatcattcttaaaaactttttttgccactgtgtctcacatgccttcaaagcacactatacttttacacacactgtcttccattctcctacaatcagtagcttatcaaaaatcttggctttaccaagatatttataccttaagtattttcgacttttatgcacacaagttctttgaatctctctaatcctcaattttgtagtcaatttaatagcatgcatatgacaacacatatgcacagatatttttaaagattaaaataatttaaataaggggatcagaaacgtgtgtgtgtgtgtgtgtgtgtgtgtgtgtgtgtctatacagaagccaatatattacaattgtaagaaaaaagtaaacattaatcaggaatagctgtatgtttgtgtacccaattcacttcctaagggtccagagaaaggaaagatttctattgtctgtgaggaaccaagaagattaacactaagcaaaataatggtgtccatggtagatttaaatttgttttaatagtgcaaagatatagtgctcagcatcccaagaattccacaggaaatgggactagaactgactgatattagtgacttatatctgtggcatgtgtccattttatccaattaaaaaaaaaaaaaaaaa

SEQ ID NO: 2025 - DNA, 156 bp, Macaca Fascicularis
tgtctttaaaggaatatgtgttttattaggagacacagagatttattttgcgttattttattctctatgtacatggagagcgtaatcagtttgtgtcataatggggtagcaatgaatcacggaggatagtgggaaacactcaatcactacaacacg

SEQ ID NO: 2026 - DNA, 676 bp, Macaca Fascicularis
ataaagagtatgttgtatgcaaatcaatctgtatccctagcaaagtgtctggtacatagtaagcgattaacaaatgtgtagagtaagaagttgtatacatgtgatcccagaatgactgcatccttagcaataggaattcaatagtccattcctgagactgagcatatgctgtatagctttgtcatactgttgcttgccatcttgcctagccaggtctgttggactccaaagtttactttctcatggccttaacagcctaagggactccttaaaaaaaccttactcttctgctcatatgggagccagcacaatccatggttaatcttgatgctgcacacaccataccatgtccacacagatgctgtgacatgtcatctgcctgagtgccccattgtcaagaaaagaatgtcctgaagtcacattccagaactcaagtcacttagactcagcccagaggtctcagtaggtactcacaacttcagagattgctgggaaaagagctgaagttgaattgacgaggtcttaaatattttatccgcaagtacatgtgcaacgtgagttccattcagtgattgctatctttaggtaagtagacgatgtactcagcggctggttatgttccattcttctgccctgtgtccaggtagtgaggaggggaaataattcttctcactca

SEQ ID NO: 2027 - DNA, 1850 bp, Macaca Fascicularis
tagccgcccgtcccgcccccgcgctgccgccttatatgttgcctgccgcggcctctggggcatggagcacgctacccagccccggcgatggcgacggcggtggcggaggagctcctgctggccgaggagcgcatgctggccgcgctcgcctacctgcagtgcgccgtgggctgcgcggtcttagcgcggaatcgtgagacgaacttggcgtacggccgccacgcgtcgcccagctttagggtccgagtgccggcgcgggccgcctgggtggtgcaggagctgccctcgctggctctgccgctctaccagtatgccagcgagtccgccccgcgcctccgcagcgcgcccaactgcatcctcctggccatgttcctcgtccactacgggcatcggtgcttaatttacccatttctgatgcgaggaggaaagcctatgccactgttggcgtgtacaatggcgattatgttctgtacctttaacggctatttgcaaagcagatacttgagccattgggcagtgtatgctgatgactgggtaacagatccccgttttctaataggttttggcttgtggttagccggtatgttgataaacatccattcagatcatatcctaaggaatctcagaaaaccaggagacactggatacaaaataccaaggggaggcttatttgaatacgtaactgcagccaactattttggagaaatcatggagtggtgtggctatgccctggccagctggtctgtccaaggcgcagcttttgctttcttcacattttgttttttatctggtagagcaaaagagcatcatcggtggtacctccagaaatttgaagagtatccaaagttcagaaaaattctaattccatttttgttttaagtgcattttcaacgaaattatcttcaagttgaagctttccaatggtgtttctctagggactttgtaaataagttatatctttgtaattttcctgctacttcatcattttcaagatgtcctctagaaatattttttctagtaattttgcaagctacctaataagtacttaaataaactgaaatggaggttgaagtatcctactgtgtaacagatcagaatttcaaactccaggtaataactgctgacatttgttctaatttcgaatttacctcttttggctatgtcttgccaagtgtatctaagactagagtttacaactgtctttgatggcattttcagaacaataaatgtcacaatcccttctatagccccctacagtgatcccttcaaggtcaacagcagtgttgctttccccctgtagggctgggatatgtcttggagccctctctcggaggccacagaggccgggggtagccattgtgcagtcatggcccaggggaaacttgccaaccttcattgtcaggtgctgtgtgtaagtggagaacttggggatagaggaggaagctcctggtggctcttccaaggcaggggcaaaggcatctggacttgttccagcccagccccccaggtgacatcaccaggcagggaggggtgctggtggtggtttagacggagtaagttgctttgcctgtgcaagtggctcccgggccctaaacaggcacctttaggccatgggtcactcaccatgagccatcaatatgctctggtctgacatggtttctctttgtcctctagtctagacctagttttttgttctgttctccacgtatggatatagtagagattattgtctgtgaaatttctcctttgtggattttgagttttccgttgtagtgtaaagaatgattaccttctgtaacaataaaaagaccactttttaagatttaaaaaaaaaaaaaaaaaaaaaaaaa

SEQ ID NO: 2028 - DNA, 763 bp, Macaca Fascicularis
  misc_feature (1)...(763): n = A,T,C or G
gcaggcagatccagaatcactagtgaactgccatctnggtggggttggcttaaatgtaattgaatgtttagattctatttcttaattgattggccagtatgaaaatatgccagtgcaagtaaccatagtatcacaaaagttaaaagttatgcaaagctatagcttatatatcaggtactgccatttactgtaaaccacctgcaagaaagtcaggaacaactaaattcacaagaactgtcctgctaagaactgtattaaagatttccattctgttttactaattgggaacatcttaatgtttaatatttaaactattggtatcatttttctaatgtataatttgtattactgggatcaagtatgtacagtggtgatgctagtagaagtttaaataagccttggaaataccactttcatattttcagatgtcatggatttaatgagtaatttatgttttaaaaattcagaatagttaatctctgatctaaaaccatcaatatatgttttttacaataatcaacatataaatatttcagtaatataaactgtttgaaaaggctgctgcaggtaaactctatactaagatcttggccaaataatttacaattcacagaatattttgtttaaggaggtgctttgtttttgtccttaaaacttgatttttcttaaggctttattcatgatgccaaagccaatgaggaaaaaaactcaaaaccagttgagtatcattatagacaaaactaccagtagtccatattgtttc

SEQ ID NO: 2029 - DNA, 718 bp, Macaca Fascicularis
  misc_feature (1)...(718): n = A,T,C or G
agaaagctttttctttagctaaaatcaattgtaaacgatttttctagattattttttgtatgttttagtgtaagtagaggataaactttttattcataaaccaggaagcaatgttctttatagtgattctcttgtgtacatgcttgtgaattaaatttgtgtaaaatcccttggcaattgggtcttttaatataggaccaaattaaaacattttactgaaaatgtatagtttttcacaatttcattaggtaaannnnnnnnnnnnnnnnnnnnnnnnnnaatgtacacattaaaaggccttgctgacaacttacacaatgttgaacaccgcctttaagcatcgtttaaattttaaaggaattgattttttcagcctgtggcccagcactggtcaggaaaacaagatggcaacatatatgctttcagggtcaaattttagcaaactgtaaactgttagggtgataaaatgtttctcctgatgtttacatgcacaagctttggattctgactattaaaagtgtgaacaaatcaatgccagattcctgttttgcgcattgtcatgggattcttaagtgaacatttctnnaannnnnnnnnnnnnnatgctccannnnnnnnnnnnnnnnnnnnnnnnnnnnnnnnnnnnnnnnnnnntgnagcattccagtgtcctctttctagattgccagctcatgacatggtgcttataaagatttaa

SEQ ID NO: 2030 - DNA, 760 bp, Macaca Fascicularis
  misc_feature (1)...(760): n = A,T,C or G
ggcagccctgtggaagtgtttagtagttctcccnnnnnnnnnnnnnctcgcaggatccatcccctaggcctcacctgtaagccaagccgcacgtgcccctatggtctgcagcgccttgcatgcatgggctcccttgtttgcagccccgaggcctccgtggggggcaggcgcaggtgcagtgcttgtggtcacccccttgtgtccgtctttgccctggcttcctcacgacacctgcctgcttgcttgtccttttccctcgtttcttgtgtttcctcagtcctctcctcctcactttccctggagtgtccnnnnnnnnnnnnnnnnnnnnnnngaggttcattcttgtgttgctgtgaccgccaccagtgccaccaccttgtgaggcgtgtcggccaacgtgctcagtgtcctcagtgtcttctctgtcctccannnnnnnnnnnnnnnnnnnnnnacccatccctgggccccaggagtccggccggcatggaccgcagccatagcacccctgtggccctcacttggtggttggctttggccagtgggggctcccagcaggaggccaaggaggaagaggagagcgagggcctcgtctttacttgcccggcttctctctgagctgcctggagctggccgagtccagcctctccctccttctgggttccggcaatctctccttccctggtctgtcctgcggatagctgcagcccggccctgactggcacagggctcctgcactgcccctgtggctcacctgctc

SEQ ID NO: 2031 - DNA, 729 bp, Macaca Fascicularis
  misc_feature (1)...(729): n = A,T,C or G
tttattctcaccgaccaacaatcatctgtgagtgacgtggctatgacctgtaactggtgcttgacgatcgcaaacacccaccagctggtggagnnnnnnnctccctgcccaggttgatgcttcaggaacttnnnnnnnnnnnagtgcttcctggtggacaatttttaaaaacacacagagccacgtgggtcaccaagagaaaaaagatagaaccttgaaattagtgacgcgatgggaagaatttggacctgtnnnnnnnnnnnnnnntcttatttttcccgtaaccgtgtgaggcatcacacctnnnnnnnnnnnnnnnnnnnnnnagtcactgactctgccagcctccaacccgtgtgctggtgtaggaggannnnnnnnnnncctgaagcaggagtcacttctgcgtccttctcagtggtgactcctgtccctgctcaagtgctccgccctcccccgcagctgtcgtttcccttcgaaaagcaggatgcttgnnnnnnnnnnnnnnnnnnnnnnnnnnnnnnnnnnnnnnnnnnnnnnnnnnnnnnnnnnnnnnnnagtgctnnnnnnnnnnnnnannnnnnnnnnnnnnnnnnnnnnnnnnnnnnnnnnnnnnnnnncagctgccggcgcctctgtccagtccgagtcgtaactctgaaccctcaacatcaggcagccaatcttgactggctcccgtttctacatcttcctcttcttcatacttct

SEQ ID NO: 2032 - DNA, 743 bp, Macaca Fascicularis
  misc_feature (1)...(743): n = A,T,C or G
atcaaannnnnnattcaccatannggttaggcnnaanntgtcagcttgtatttatatagtgcttaccgcagtattggaaataccatgagttttgtatcagaaggacgttattactagtgcattttaaagtgatactcaccagtcatagttgcaaaagtaagtacacaatggaaaatggaagagaaatgtaggcaatcaaaacaaaactagttttttcctttataacagaagttttattaattcttctttcatataagtgtagttctcattaaaaatgccctaaagcttaaagtttgcaaggctgcccagcctaacccacaacagtttgatgctgccccctagcgtttgattcccttcgctttttcctaaaataagataatgtttaaattacaattagatttacttagtgctataaatttggtctattttaaagtttcctccgtctacttagtgttgctaataagatggacataagtgttttttaactggttaattatgattgcttttagcctccagttttccaaatgggggtgaattttgggtaaagatagaacaatcacaaagttaccttgctccaaaaaagaaatttatgtatgggattgttttcaaannnnnnnnnnnnnnnnnnnnataacagcaattttatttatttaatatgggcttctccttatcttgcatgatataaaaatctactttctagattaatttagttccgtataactttgtattgctttgactgaact

SEQ ID NO: 2033 - DNA, 693 bp, Macaca Fascicularis
  misc_feature (1)...(693): n = A,T,C or G
gggacatttcactctactcctacctcccttaccgccaggagcagtcaagctctggattnnncagcagatgtgcccccagtcctgaaggctgtgtcccaggagctctgatttcctcagnnnnnnnnnnnnnnnnnggactgaagctgcctcccttcaccctgggactgtggttccaaggatgagagcaggcgttggagccacggccttctagggacctgtggagaaagggaatccaaggaagcagccaagnnnnnnnnnnnnnnnnnnnnnnnntacctcttgctaaccccaccaccacactgccaccctgccctagggtctcactagtatccaagtgggtcagcgcggggctgaggacggggctgaatgggaccctgagagagccaggggtcccctgaggcccccctaggggctttctgtctgccccagggtgctccatgggtctccctgtggtagcaggcatggagagtcagagctgccttcatggcagtaggctttaagtgggtgactggccacaggctgagaaaagggtgcagcctctaggtggggttcccaaagctgccttcaggctggactgagctgctctcccacaggatttctgtgcagctggattttctctgttgcatacatgcctggcatctgtctccctttgttcctgactggtgggccccgcatggggctctgagcaggctg

SEQ ID NO: 2034 - DNA, 681 bp, Macaca Fascicularis
  misc_feature (1)...(681): n = A,T,C or G
gactgtaaatacagcctgtggaggttcannnngataaaccttttacctgactgttcctcagccatgctccttgccagcttctggcacattgtacatagatttgttgaatgtttaaatcatttgtttttctaaatgctattctctaaaacaattttttgaatttctgttgctttccattgttttggactttgtgtgtttgtttaaaaaaaatgtttcctaaatatttaacaccaggaaaaatatttttaaataaactggtgctaattgaaacagaaggaaattttcagatcgaagatgtacaatgttcaatgttcacaccagttaaactgcactttcccaaggggacagctggcatctacttgaaatgggcatcaagagaccaccaaatgtttacagtttctgtggcccatttaagtgtaaaatgcagaagtggctctgtccccccagagttgaggatttgctacactggtcctctggaagcatttaagtagaagaaaaggcttatagtaagaatcactttagtaatcgtcttctggtccttggacttttctgttctgtaatgcttgtaacaatgaatatggtgttgccaatctagtctgatatcatcgttgacctgtacttactttgtggatggttctacctggggttgcactggcacagagccagaacactggactttca

SEQ ID NO: 2035 - DNA, 748 bp, Macaca Fascicularis
  misc_feature (1)...(748): n = A,T,C or G
tcctttggcctcgtttgctgagnnggcaacattggagatacaattggggctcttaagaaggctgccaactatctcccccatgaacagccttctctgccctcagtgagtttctcctgtgacctgcttttccagccacactgggcacagaactgaaaagtcaaaggaagagaccagagaggaggagccttgggaatgccaaagtttcttttctttgatttctctctcagtgaaaataccacacagccacctgtcccaataattagtatgtgaattttcatattgagtagggagttagagaatatatgaccaaaaaaagaatatattttagcttttattgtttctgactctaaaagtaatatgctttgtggtgataggacagtcatgtatcttgattttggtagtggttgtacaaattcatatatgggataaaatggcaccctcctcccccaccaaatggatgcatgtagaaaatggtgacagctgaatcaggtatgcagtctggttaataataatgtacctatgtctgttttctgattctgatctagaactatagttatataaggtatcaccattaggggaagctgagtgaaaggtacactgactctgctggctttgcaatttgctatgagtctacaatttcaaaacttgaaaaaaattgaaaagtaatgcatttctactgtaaagctttctaaattacagaagtatacaacattgaatgtaaaaacctcattcccccatgtaacaacct

SEQ ID NO: 2036 - DNA, 752 bp, Macaca Fascicularis
  misc_feature (1)...(752): n = A,T,C or G
tgaagaggaagatgctgatgatgtttnnnngctcnncctaaacaattcgacatgggagatgaagttnacgatgatgtggatacctctgatttccctatttcatcagcagagatgagtcaaggagctaatattggaaaagctaagacagaagaaaaggaccttaagaagctaaaaaagcaggaaaaagaagaaaaagacttcaggaaaaaatttaaatatgatggtgaaattagagtcctatattcaactaatgttacaacttctgtaacttctaaaaagtggggaaccagagatctacaggtaaaacctggtgaatctctagaagttatacaaaacacagatgatacaaaagttctctgcagaaatgaagaagggaaatatggttatgtccttcggagttatctagcagacaatgatggagagatctatgatgatattgctgatggttgcatctatgacaatgactgacactcagctttggccatcctgctgtgttccttaggtgtcagtgtgaagtctggattttaattggcatgttattgggtaccaagaaaatcaatgcacaaaaccacttattatcatttgttatgaaatcccaattatcgttacaaagtttttaaagtttgaacatagaaaatgatctctgcttaattgttatgtcagaagactacatgagtgagatgtaagaattattaaatatcccatttctgctttggctaccattatgaagaatttgaaggtgcttcttaaga

SEQ ID NO: 2037 - DNA, 1352 bp, Macaca Fascicularis
atcaatagtgagttgtttttgatttaaaatgtttctatctgtagaggcattttataagtttttatggggatactagcaatgggatgtgaaacctgagttcattaggtcatgaggtgatcagtggaacacttatgtatatacaatatacatggttatatgttttggaaagcatagaggctattatgtctgcatgtttctaaatacatatacacacacgtaaacacacacaaatctatacacacacacacacatagtgaaagcttttgttccctccctcacataggcagatcacttatgcgtgtaaataattgagcagctggaggggaattttgttacatgtgtataaaacagtcaaaatatataattgttttgctttaattgtttagtctttgatttgtaggaattactgacatgtgtatttgtgtgtatgcgggtctatatatacgcatacatatcactgtgtaaacaacattttttgtcatagagtagaaatattcttaagttgccagagctattgtatggctgctaaatacgtagtagacaaatgttaccttttgctttttagcatctgcatacagattactaataggcatttatcgtgaccagtaaaccactagacaagggcaaaacactttagtttgatcagtagaattgctatgccatgtttatgtgggatttatttgattgatgcagaatatataattgtatatagaagataaaacaacatttttgaatattcaagttctgccatatttttggagatatatttttattcaaaagtagaatcatcatttgccaatagagttagcatctttgtgtgcttgtgaggtttgattttgagggttttcttggttttgttttgggttctggagttttaaaaaaatgagactgtctttgtctaaaaaaattttgatataaaaatgtacatttttatattattttttcttattccaacctaattggtggcttgtcccttcctgtgtttattggactgttgggtgcctggatagagctggataccatttgactgctgtgtgaataatagataagcgtcttgagtaacatcgaatttcctaggtatatagaaacacccaccatatctttaatatcctgtgttgattttttttttttttcagattacaaagacaatacatgttctttgtgggaaatctgaaaaatactaccaaatagaaaataaaaatcacctgaattccaccacgaccacattgtttaaaaccacatttctgggttttaaatcagtcagtggctgggcccaaaggcacttttgggtaagataagaaatgcccacaagaccaaggtgtcacttaaagaaacaaaaaaaaaaaaaaaaa

SEQ ID NO: 2038 - DNA, 2206 bp, Macaca Fascicularis
  misc_feature (1)...(2206): n = A,T,C or G
gtcagctggggctggcttgtccaagatgctgtgttcacacacctgtgggatcgctacaacaggtgaggctggacagatccccctccctcccccacctcacagcttcttcccatggctggctggggcttcctcacagcacggtgggctcagggcagctgtacttcctacgaggtcaccggagcagaggctggaaggtaccttatgacccagcctaggaatcatagagtatttatctctcctcaagtcactaaggccagcccagattgtggagagaagagaaaatccacctctccacgggaggagaatgacttggcatcatcttcaaactgcctcaatcattcttcatccagccctggattggtgcctgggacacaccgcactcctccttactcacgtcctgtatgctggcggttcctacacggaacagactcacccaggaccaccctggactgcgtccctcctgtctgtccagctcagatccacctctgacaccccatcccgagatagccacccccaccacctcgcattctctgcttcattattgattcccacgatgccaaactggctctgctctcacccttgtttgttcttggaggtgtgcgtcccacctcaggggagtgtgagctctgcagggatagcggctttatcccgcacgcagccatgcagctctgtcaccaacacctgcacacactccagaatcgtcattgagagagggaggtgtcaactgaagaaggacgaggtcatcagtttggaagggagcactttacttctcacagagcgctgcaggctgagtgtggctgttctgaccggctgggaggcacagcctctggtaggaagctggaaacagacactttgagggagggaagactaaggcagagatctacactgagtgggggcggctgaatatgcatattcaataagctgtgggaggggcatgaatattgatgagaggagaaagcaggcatatgcacaattgggcttcacatctctccatgtgcaaaaaccagaggagttaacctggtctgagggtggagttttgggccctctgatgtcaaaaggtgaagcagcggactcggaagccctacctgcacctcttccctggaacggccagggcctctccacgggggtctcctgtcaggaagaagagaggggcagtgtctggggttcactgatctcagcggcgcagtctccacaaggtacgttcctgttttccctgaggtgagtgtcaggctcctgagcccaagctaacacatccagatggcctgaagcaagtgaagaatcacaaaagaagtgaaaatggccgtttctgtcttaactggtgacgttctaccattgtgatttgttcctgccccaccttcactgatctattaaccttgtgaaattccttctcctggctcagaagctcccactgagcacctggtgacccccacccctgcccgcaagagaaaaaccccctttgattgtaatattccactatccaccaaaatcctctaaaactgccccacccatctcccttcgctgactctcttttcggactcagcccgcctgcacccaggtggttaaaaagcgtcattgctcacacaaagcctgtttggtggtctcttcacacggacacggatgtgcgtgacagttagggacctgggtcgtgacttgccaggaagcaggaggaggcaagtccggcctcgcctcatagccaggacctcagcttgcaaggtttccctgtaaaccaaacataaaatgctaaggctcctccccgaccatctgaatggacttcctcctcagcgagggttgttttaaaatttaacccgagaaactatgatgggcagtgggggtcagccatgcctcattctgcctctccggcattaacatccccacagactttaagtctgataagaaacgtttcggccgggcgcagtggctcaagcctgtaatcctagcactttgggaggccgagacgggtggatcacgaggtcagnnnnnnnnnnnnnnnnnnnnnnnnnnnnnnnnnnnnnnnnnnnnnnnnnnnnnnnnnnnnnnnnnnnnnnnnnnnnnnnnnnnnnnnnnnnnnnnnnnnnnnnnnnnnnnnnnnnnnnnnnnnnnnnnnnnnnnnnnnnnnnnnnnnnnnnnnnnnnnnnnnnnnnnnnnnnnnnnnnnnnnnnnnnnnnnnnnnnnnnnnnnnnnnnnnncaaaaaaaaaaaaaaaaaaa

SEQ ID NO: 2039 - DNA, 715 bp, Macaca Fascicularis
  misc_feature (1)...(715): n = A,T,C or G
aggcacagcccggcatagtataggcactcactggatatgtgctacattaattaataagttagcacccggtaatctccatgccttactaaatgtaactttgttttgtttctttgtgagaagcgctcccctgccctccaaagaaatcctaatgacagggctgaagccgcatttccaacttgaaggatccatctgaggctgccagggctgccctcctactctctcacttggcaaaatatgaagtagatgccgatgggacacatatgccaccaggttgctaagatacttggcgtgttcctatttccacctggacatacccattggttcttccctggggtctccaggctgagttctgtgcacactccttgaattatttgtgctgtttatcaaatagccaaatttccagtgttgccactatgttgattatctcaatatatgtgtctaaataacagatgtttaaaagtattccacataggctgggcacgnnnnnnnnnnnnnnnnnnnnnnnnnnnnnnnnnnnnnnnnnnnnnnnnnnnnnnnnnnnnnnnnnnnnnnnnnnnnnnnnnnnnnnnnnnnnnnnnnnnnnnnnnnnnnnnnnnnnnnnnnnnnnnntcggcatggtggcgggcacctatagtcccagctattcggggggctgaggcaggagaatagcttgaacctgggaggcggaggttgcagtgaaccgagatagcaccac

SEQ ID NO: 2040 - DNA, 664 bp, Macaca Fascicularis
  misc_feature (1)...(664): n = A,T,C or G
caggcgtgannnnnnnnnnnnnnnnnnnnnnnnnnnnnnnnnntaaaaaaaaaaagaatgaatataccctgaaannnnnnnnnnnnnnnnnnnnnnnnnnnnnnnnnnnnnnnnnnnnnnnnnnnnnnnnnnnnnnnnnnnnnnnnnnnnnnnnnnnnnnaatcnnnnnnnnntccctaagctaacaatcactaggttttgtgattatccccattttacagtagggaaaaccgagggctggagtagtgaagtcacttgccagggccgcagacctccttgccgctcgactgtcttactgccttgttttcctggcttctcctnnnnnnnnnnntgctccagccaagtggaaccctccnnnnnnnnnnnnnnnnnnnnnttattgcctcctgatctttgctctctgtaatcttccactcatctnnnnnnnnnnnnnnngtactgtcttcaatactactgcaccctcttctgttctaaactctatgtccttgccgaatctttccgggaacatcagcaggacccaggtccaccccaagccaccttccctgcctggcacgttctaaatattggaattattgagtgannnnnnnnnnnnnnnnnnnnttgattttttttcttaaaactcatatatcactgtacaatccataaatcactgtacttatcacac

SEQ ID NO: 2041 - DNA, 662 bp, Macaca Fascicularis
  misc_feature (1)...(662): n = A,T,C or G
tcattcggaggaacaataccaggggtgagaggtttgtaggctgnatcccccaggcatggggatgcagggtgtcnctgaagtgtgcccaaagcagagctcgctggcctatgatctctgcccttgctcccacagtgtaagacccccaggaagcaactggggcctgaacctctcacctaggaggtgggtttattttatttcttgttagcatcaggctctgaaaggagacggtgtacatttcgttttgaaaacatcttctggactgaagccagagtttagtgtcgtctttactatggaaagagaggagaatggacagaaatggtttaacggtgtggggttttgtttgttttgttttaaatggaagaaagaccaaaactttcctggtgaatcagatagggcatttgaccatgcaataaccatggcattttataacaggtaaagtacagggaaagaaatcagccaaatggaataaggaacacaagagtttggaattcgagaccctgacatttttgagttataggaaatccannnnnnnnnnnnnnnnnnnnnnnnnnnnntgcctcatggaccaggctctaacactgaggtcctcactgttcccaacacaggcaaagcttcctgagggctggagcggggaaggggagaggagaatggggaagaagcat

SEQ ID NO: 2042 - DNA, 691 bp, Macaca Fascicularis
atataaagcagaatgtgcatgttaaagaatatatttatgggaaaaaaattttttgaaacttaaataaattgatgattttgcttggagatcagcttctactagatgctcccttgcaacatgttagcagatctcagcttgttttagaaatcatatgttcatgctagacctaatcagttggccaaatacctatgatagagaaatcatttctgagaaaactgataagagctctcacttcagtcttacttaacccactgctattccctgtggagaaatccagctaattgttttgataaggctatctgccattgtagaatacctttctctagtagctgaatgacaatcaactgtatgttccatactaaacatgccagagataggacttttaggccttgctttacaaaactggtttttaacagctgacatgaatatttcccgtttctattttctcctgttgtccagtcactctaatttagtctctgtgaaactgtagctcagaacacaagataagcacaaaaagtcttcagggtaggactgccaacatacaggacattttaatgccatcttctttatatttctgggactattaaaattcaaatctctgttgaaaatgaaaaatataaaacagttgcaaacagtatagaaaataagtgatgatgaaatatttgttttcatacaaacatgctttcccatt

SEQ ID NO: 2043 - DNA, 627 bp, Macaca Fascicularis
  misc_feature (1)...(627): n = A,T,C or G
tttacctnnnnnactttnnnnnnnttctcggcctctgctcgggcctggaaggctccgggctgcggttggagccagcctnnggcggcggggccaggccgagccacctccctcagtgcccagccatcttgggctccgcggcggcagccggggtctgggcgcactcgttgaggggcccgcggcgtcctctagctcctttttctttatttttttttttggtgagattttctttttccacggggagggctggcggcctccaacaaattaggagagaggggagaaaacgcgaagtcccgatttctctccacctctgctccacccaccccggtcctgtccaaaaaataaaaaaaagatgagaattggaagaagtcggcagaaaggcaagcgcccgcggtccccggctgctgcccaggcgacgcgtccggggcgggcccgcgcccgttgctcggtccgaggtccgtctgtctgcccgctgcttctcaagagaggggagggcgcttcggacaaggtctccnnnnnnnnnnnnnnnnnnnnnnnnnnnnnnnnnnnnnaaaaagaaaaaagaggaagaaaaaatcccaaccccaacactctcatcacagccaccttcagccatcttgcgcttattat

SEQ ID NO: 2044 - DNA, 184 bp, Macaca Fascicularis
tttggagaagaaacagcagcagcatcggccaacgagtccaactaccaagaatgctgcggaggacagggtggtggtgcttgtctggatgaggccccgagtacctcccctccttccttcttcgggggagtattctgcctcaacaacaagaaggagcaggaccccgcttctccccggagcatcttct

SEQ ID NO: 2045 - DNA, 766 bp, Macaca Fascicularis
  misc_feature (1)...(766): n = A,T,C or G
tgtaaagaaagaatannnnnnnntgaannnnnnnnnnnnctgccagatgnnnnnnnnnnnnnnnnnnnnnnnnnnnnnnnnnnnnnnntnnnnnnnnnnnnnnnnnnnnnnnataaatactttctgtgctccagggaatcccttttttcagacaannnnnnnnnnnnnnnnnngttttatggtgttttctgtgttttgttctgcnnnnnnnnnnnnnnnnatgtatttttttccatgcgtctccacatctgttggggtagacgtgttgattgattnnnnnnnnnnnnnnnnnnnnnnnnnnnnnnnnnnnnnatgctttaattctaacatacagcccataccacannnnnnnnnnnnnnnnnnnntgtttgtgaatgtcttcacttgtattctaattcggacttgccaaagtatttgctatttactattatgggtaataatcttctctcgcctggttgttttagagctactaaaatagaaatttacttttatggatagaagtacagaattttaagaagaaactaaattttaaggaaaaattgtcagcatctaaaaatgttcttctacatctgcttcaccttaccttcatactctgaaattcccttatagcagacagagctagggaaacattaaannnnnnnnnnnnnnnnnnnnnnnnnnnnnnnnnnnnnnnnnnnnnnnnnnnnnnnnnnnnnnnnnnnnnnnnnnnnnnnnnnnnnnnnnnnnnnnnnnnnnnnnnnnnnnnnnnnnnnnnnnntaatgtaac

SEQ ID NO: 2046 - DNA, 2795 bp, Macaca Fascicularis
  misc_feature (1)...(2795): n = A,T,C or G
attctgtgcctcggctgccgcaagggctagttcctgtgtcatctcctagcggcctggcgccgaggcggcggtacccaaggctggagccgcagcgggagtccccggtgagcggggtgggctcgagggcgggtgggcgtgcagggaaggcgacccgggacgcgggcctgagcttgctgggactgcacagccctcggtagcccctcccgggcccggacccccggcacggtccgtccccagctccgtgttgggggtcgacgtcgtggcctcggctgggcacgcagctggcccggaggaggtactgaggacagcagctccgagtctgtgtgtgtctgtggacgagtgctcctgtctaacggactccactggcgctttgagaagagctgcctcagcagcctgcgcccccagctcaggcctttctgctcttcctcagttttctctgaggctaatgcacagaaacattctgaggcttccctatacccatggcgcccagactcctgaggacggatttttgtttgtttgttttaagggatggaacaattttagtttttttagtcttttagttttgtaatataatggtatttaaaaatcaaacttgaaaccacccatactaccattacttcaggcaatacattttcacccaaagtactaagaccgtaaactcagaataaatgctggccttacgcgtgcgcgcacacacccacacacacacacgcactcacactcattgccaacctgtcagcgacgattgttactggttttctctttttgcagcttgccagattaaagctttgtcgtggactggtgtttggaaaccgttgttttagaacagttgttgtttgggtttcataagtctcttcgtagatggaattgttttggacttctggaattagaatccctgaattcagaatttgctcccatatctcaactagctaagtggctttgagtggattcgctcctctgatccttttgttcttttcaacttctgccttgaaaaccttttgtgagacgcaaataaaatgtatgtttaagaatttgttatttttatgttatttgaaaattattcgaaattctttttaaaaattcctttccattacccccagatcagttaccaaggactgccaagtttttctcaattatcttatccctactgggggatgagtaagttcctacttcgtttagaacttaagtcatgtgtttattacaaaaacctaactgatctttcttgatatccagtcctctcacccccacaattcctcactaatagaatcctgacacaactagactctcctcatgctcggagtggaataggtctttctaattttggtacaatacccggaagtcgtaaaagattgactgcatggcaaaaaacactttaagcaaagtcacatggcacatgtagtcacaaagacacttgacaaactgagaaaaatttgcagctgccattgtaaacagaggactaattttcctgtgataaaagtgtgtacaaattaacaagacccaatacctcaatagaaacatgagcaaaatatatgaatagttacttcaaaaaatatacaagtgactcaatatattaattcattcaaaatggaagttaaaaatttggcaaagagcacacaactttcagaaccgtattggtgaaagtgaggaaaggcaggcccatacaactgtttttgatggaggtataaattataaattggtacaatcctaatgaggtcaaattggtagtgtcagaattatacatgcatatacattttgactcagcaattctgtttcaaggaatctttcttatatatgcctacacacatccaaactgatgtatgctcaggattattcatgataatattattggtaataagaaatgattgaaaactacccaaacaaaccatcagtgctggcatgaataaattatgatacatctatgcatccataaaaatgtggagaaggactgtgtattcacaggaaatatctctaagacatggtattattgagaagaggaaaatgtagcatgtcattcatggtgtcctaccatttgtgaaaataagggaactagataacgatatatgtacacacacatatgcagaaataactggaaagataagaagctaacggagaaggaaactttacacagtattcattttataaatttaaattttgaaccaagcgaatatattactctttttaaaagtaaggaaaaatgtaaagtaaaacctttttaatgcttaaatgtaagtaaaactgctgcacttacaggacaggatcatctcctcagaatactgcctctcgagcagtagttagaatttaacttctgtttacctctctgctctactcctacactcttgcctctgaagttcactttccttctctggtcttccttcacagagttatgtgtcctcccttgcttttgaaaatagagtttctttcttcctggaatggttttcctcatagtccaatgatccttttatttttccttaaaagcccagtccaaaattacctttcatggcnnnnnnnnnnnnnnnnnnnnnnnnnnnnnnnnnnnnnnnnnnnnnnnnnnnnnnnnnnnnnnnnnnnnnnnnnnnnnnnnnnnnnnnnnnnnnnnnnnnnnnnnnnnnnnnnnnnnnnnnnnnnnnnnnnnnnnnnnnnnnnnnnnnnnnnnnnnnnnnnncagctacctgggaggctgagacaggaaaattgcttgaacccatgaagcagaggttgctttgagccgggatcacgccactgtactccagcctgggtgtgagagtgagactccatctcaaaaaaaaaaaaaaaaa

SEQ ID NO: 2047 - DNA, 737 bp, Macaca Fascicularis
  misc_feature (1)...(737): n = A,T,C or G
agtcacatgagataaaagaaaagtcagccagagaaaggcacaggactgggataggtcacactggtccaatgcttacaaagtatccaaatgnnnnnnnnnnnnnnnnnnnnnnnnnnnnnnnnnngctgcagcacattggggtaactatgnnnnnnnnnnnnnttctttggtagttgttttcagactgtcttagcaacctggcttcatggctgtgcatataaagagaatgagatgtaagatggaaagcaaggatttcaattctgagccatctacttactggggtgtgagcgtgggtggggcccttggannnnnnnnnnnnnnnnnnnnnnnnnnnnnnnnnnnnnnnnnnnnnnnnnnnnnnnnnnnnacatcctggcaccnnnnnnnnnnnnnnnnnnnnnnnnnnnnnnnnacagggcccagtcgtctgtgagttaacctgccctnnnnnnnnnnnnnnnnnnnnnnnnnnnnnnnnnnnnnnctgagcccttctgggccttgcttccttatctggccacttcccagggtagtgaatgaggatcaggcaagagaattttccatgaatgtgttctgaaatctctaaaccatggccacgtgggctatggggcactcacaatgtggtgagttcgaagtcaggtgctgtgtcannnnnnnnnnnnnnntctgacttatgatgaacaaaagaatgtaaaatatctcaatacttcttatatttcttacatgtcgagatgaca

SEQ ID NO: 2048 - DNA, 725 bp, Macaca Fascicularis
  misc_feature (1)...(725): n = A,T,C or G
cagagaagtactgaaaagttaaggacacttgggggctactttttttccctctaaaataaaaaannnnnnnnnnnnnnnnataactagttagttatcaccttgtcccttaaagtcagtgacttcctgtgtttgatgtatattacatagagtcttaagtcggtnnnnnnnnnnnnnnnnnnnnnnnnnnnnnnnnnnnnnnnnnnnnnnnnnnnntagaaaagagtgctggacataagaagggggtgattggtttgaggggttaatgtgaggcctttttgaaaaatgaatattttgataaaaagaattcttgttttagcacagttgatgcatataggtgattctcatatttgttgtataaactggtttaatacatttggaacatagttggattacattcattnnnnnnnnnnnnnnnnnnnnnntacattcaagtttataaaacaatttgnnnnnnnnnaagccatttaaaaagttcattctgaannnnnnnnnnnnnnnnnnnnnnnnnnnnnnnnnnnnnnnnnnnnnnnnnnnnnnnctnnnnnnnnnnnnnnnnnnnnnnnnnnnngaaagtggctacctttcatgtcaaaaatgttgatctgttataaataaaatgtttttgcatatgtttttgttttggtttgggctatgtnnnnnnnnnnnnnnnnnnnnnnnnnnnnnnnnnnnnnnnnnnnaaaatgagaaaagccttatgttcatga

SEQ ID NO: 2049 - DNA, 729 bp, Macaca Fascicularis
  misc_feature (1)...(729): n = A,T,C or G
caagaacacatatccaaatggaattttaccccgagaaattnncattttaaagggcatagcacagcannnnnnnnnnnnnnnnnnnnnnnatattgactacaataaaaaaaacagtcttaattccagatttactgaaaatgtcagatcattttgtattaatctattttcannnnnnnnnnnagccagttatagaatnnnnnnnnnnnnnnnnnnnnnnnnnngtaaatgtccttaccaactaaatgatgtaaaagtttcttaaagtaattttagtgttcatttatttataacttctaccatgtgatttccagaatattggaagtgatttactgtatcttgtgatatatgggttttaacaaattctagtcttcacgctgagagagcactnnnnnnnnnnnnnnnngaaagttnnnnnnnnnnnnnnnnaatctgaagaaaggaagcttgaactgtttgttcttggtgccttgcagagagactcacagcaactctccattatagctttcacacggtttggatgtgcagcacatccaaggcaaccacagctgtggtagagcttggtaaaagactgaagatacattggtgctttgatgaaaaggtcagttggctggtccctctctcaaaaagcttattaagcctgaaaagccaactttgtaacatatttaaaactgctattttcgcttatttctggaatgtaaaaaaaaaaaaaatgtataaaaagaattagtg

SEQ ID NO: 2050 - DNA, 739 bp, Macaca Fascicularis
actaccagttctcctgaaactaatcgattattgaggtatgtttcttttccttccctggtgatgtgcgaagagaatgaaaagggaaaaggggccaggaaggagatgttttttctccttcatacattcaacagctaatctgagtaccagctgtgtacaaggcactaacctagatgcctgggacacataatgaactaagtagacaaaggctcctagatgcctgggacacataatgaactaagtagacaaaggctcctacccttaatcattgagttttattctagttgggggagagggtgacagataataaacaagagtcataatatgaattcattggagagtatgtgagaaacgcgaactgtggggagaagagcacaaggtaagtgggtgaaggagtgttggggagaatgggattgcaatttcagaaatggtagtggtatgaactgaatgttggtgtctcccccaaatttgtatgttcaagtcctcactctaatgtggctgtatctggagatggggcctctaaggaggtaactaagatgaaatgagttcgtaaggatgagcactcattcaacagtattagtgttcttataagaagagacatgagttctccctctcactttcttcccacacgcacgcactgaggaaaggctgtatgaggacacagcaaggaggctgctgttcacaagctgagaagagagccctcacaacagatggaattggctggagcctcaatcttggactt

SEQ ID NO: 2051 - DNA, 764 bp, Macaca Fascicularis
  misc_feature (1)...(764): n = A,T,C or G
tgacaacatgctgcaggggctggcacggagnnnccgctgtctgggtgtggacgcacgnnnnnnnnnnnnnnnngacgaccaccgcagggcggccgagnnnnnnnnnnnggaggggaggatcatcctgacatcggggcagccattccacaagctccgggcccaggtcggggctgggcgctgcctctcggtcgactgctccctgaaggcccagcagcaggctaaggctgtgctcaagcatttcaatgtgcgcgtcacccacgcagacatnnnnnnnnnnnnnnnnnnnnnnnnctgtgaccagtacctgaaggtctccagggacatgatgaagcagctcatgtggctcagcagccaccaggaggggcccaggagctcaggtgacaagaccaccctgagccaggaggtgcaggagccaggcccagccccagaggcggcccctgggggctgcacctatgaccgtccctgccgctggctgcaggcagctgacctgcgnnnnnnnnnnnnnnnnnnnnnnnnnnnnnnnnnnnnnnnnnagctggcaggggtcccggtgggcgtgctgaggacacccggcctgcggcacttctactgctgcacgcgctgtggaaaggtcttctgggatggctcccacctggatcgtgttgccacccacttccgagacgtcctggagagcgcccccagcccccgtgagccgagcccggccagcagcccggccagcagccccttctgaggacaaccagacaataaacatgaaaagtgcctga

SEQ ID NO: 2052 - DNA, 1974 bp, Macaca Fascicularis
ttctctatgtcaaggcaagtcatgtggccaagcccaacatagggcggtttaatacactacatccactctagtggaagggactgcgaagtcataagcaaagggtgtgggtatataattaaaaaacaggggaagcatgactaattatgaacaataaaacagtctaccatagtagactacctgatattctgttatcacaaatggtcataggttgataaaagaaaactagttttttatcctttctgttaacctctaatatgccccaatattaataaataccatgagacctttttccaaacacataggcttcagaagacatcagagccttctccactgcccattttctgttttgtggttctaatgtatcttcctattgatacttcaactcatcataatctctaggagtttggttttttgcttcacagaagtcacttagaccaggtaagaaactagctctgattttaatgcagagaatgcttatgaccattattttagatgggtttaacacaatgagacctgagacctaaaagggccagttccagaaaatcatcagcttcaaaatctagacatgagagaaagagttgatggtttgagggtggttctacaaaatataatgaagggaggtcagaaaaggttagttggacaaggttctcagacactagattctgtaggaggagtaaggagtgaatttagttttttgttttatggaaaatttagaatcgctgaaatttgctcaagtatgggattctttttctacttgaaattttctcaaagctttgaagactatgcactgcatagagtcttggtatataggcttcattatttttggttccattctttgtaacacttggggtcctggttctttgctgacagacctcttaagtttgtttcttttgttctgtacctcagcttttactttgtatttattttttgaaataataatctagttaccaaattagacaccatgcttttggaaagcttggaccatgcctgctttactgttttctgcttcatgcctgaaatataggatgtgctcaacacattgttgttgatgatgataggttcaggtcacaggtatcctgtatccttggtctttgcatccaaaacttgacaaatccttttctcacccattagtctccctctcatgcaaaccttcttactttaaacttattttttaacagccaaacatttcctctaggacacctagtctaggtagccatttcaaagataattttctaaggaagaaatgtgaccttctaagcaaagtgtactaatgtcaaggaatcagtgagtgctagaaaaaccaattcagagtggtccgaggtaacaaggagactaattaaattgattaggtttaataacctgtattgtttcccaaaaagaaagtaatcctggccagaattttgtcaagagcttgttgctctaagtcaactatattgcatgaggactcagagagtaagtgtgcaggaggagagaaatctatttgggaaggttttgtactggaagggatattatgttaagctaatattacagaatgttagctaatattacagaaaccatctattaccactgtggtttactaccatttagcaattatttattgagaccctattatgtgacaggtactgtgataagaagagaggatacaaaggctggccttcaaggagctcaaggtcactctaagaataacaggtggctgcctccaggaagatagattgaacattaagtctattgaacaaagatccttctcttgctgttgcatgaatgaccttgtttaagatgccagactgactgtaggtggcagaggagggggaaagagaatggccctaaatctcagtcagaatacaacttcaatttctctactctcaaatgcaatgagcatagtaatacttttctctaaagaggcaaagaaacttctacagttggatcagggttttagtgtgaaaaacatctaggtttaaaaaaaaaaaaaaaaaa

SEQ ID NO: 2053 - DNA, 758 bp, Macaca Fascicularis
  misc_feature (1)...(758): n = A,T,C or G
agtgangtcacccnnnnnnnnnnnnnnnnnnnnnnnnnnnnnnnnnnnnnnnnnncgtgtccnnnnngagaattttttattgtcacaattggaggggagctactggtatgtagtaggtaccagccagaatgctgctaagtattctacaattcacaggactctccctcccccagcaaagagttatctgactcaaatgacaatagtgctaaggttgagaaaccctgcttcagaagaagttcagataacccaatagttccttctccattggaaagccagggggcagttttttgatggttgagacctgagaaattccctgcactctcaaatttggaaaacaaaagccatatgttatgagaagttggaaagcacacagaaatagtaacagtgggaatcagatgactggaaacaagggtcaaatatatagatatatagatattatctatcatatatatctataagatatagatatatgtgtgtgtgtaaaatttcaggatcattatgtctgctaagtccttcatttgaccttctctaaggagaaacacttgaactcattgctactaatacctcccaactcaattttagaaaacaaatagtcccctaagttgaaatcaagagggaatgaannnnnnnnnnnnnnnnnnnnnnnnnnnnntccttaaattcatggacttttatgggatatccaggactttttcgtgcagatgaagctgatgaaatcaagtaagagttgtagtctgtggccaagctggaaggagcta

SEQ ID NO: 2054 - DNA, 736 bp, Macaca Fascicularis
  misc_feature (1)...(736): n = A,T,C or G
agtgatgatagtcggactacagnnngnttcagatgtgaacatacagaaagttcccataaaaaaagaactggtttctacagggattatgacattccatttactcagcgtggacatatatcaggaannnnnnnnnnnnnnnagaagggtcaacataaaaaatttaaaagtaaagaatatgatgagtacagcacctacagtgatgacaacttcggtaannnnnnnnnnnnnnnnnnnnnnnnntacggtcaggaaacagaggannnnnnnnnnnnnnnnnnnnnnnnnnnnnnnnnnnctaaagaaacctcaaatattgctttagggtcatcattttnnnnnnnnnnnnnnnnnaaacagagaatgaaaggagtnnnnnnnnnnnnnnnnnnnnnnnnnnnnnnnnnnnnnnnnnnnnnnngacgtggcttgccgaagaaaatcaaacgaaaagaacgtgggggaagaaccaataaagggcctaatgttttttcagtatcggatgactttcaagaggtactaagaatttatatataaggaagggaggagctttttcatcttttaatttatttggtggcaaagaaagcattgtgattttaatgatactttcctagtaaatgannnnnnnnnnnntcagataaaatgagtatcagtaacctccaaaaaatagttgttaattagttgtgaaactagtatagaagtacaaatgatggtgactttgaaataaaattgttatgtt

SEQ ID NO: 2055 - DNA, 723 bp, Macaca Fascicularis
  misc_feature (1)...(723): n = A,T,C or G
caagaacacccgaggttccagggcactcaggacaannntccacggaacaagtcaaccaggaaagaaaagtaagttctgcaaggggcatccatggagcctgtgataggggctgatgagatggaatctgtcccacttctcattaaccaccctccgcaaaccccagaacccctcacctcatttctgtaccgtctgccctcttgggggatgggccctcccactttccccggcctgcttctccatgctgtgagctgctttggcagatctgtttttctgtgtagtcaggggaaaaacaaaaacgaaaaaacacgcacaactgtgtgggcattgtcatagctgttgatgtcaccactgctttgggggaaatggctgggatgaggctaatacattcatgcaatatttatattttcagggggctacgttatcagcgtgctctccctgccttgggcttttcttttcgtcaggtatctgttttccttttcgtgttccttctccgacttctcgtctctgctgctcacaggcctgcccatcagtcccgcacagatattcagtgtctggtttctggccagctccgtggaggggctttaagcagaattctgactctttggggtgggggattagcaactgggggaaacttaaggatccagagattcccccaagaggagtgtctggaaggatctgtgcctggacagtggctgaacctttcccagtgttctttcgtttctg

SEQ ID NO: 2056 - DNA, 620 bp, Macaca Fascicularis
agtagaagaaagccaatgggtatgagttttctgagatacatcatttagcggctggagtgcaatggcgcgatcttggctcactgcaacttccgcctcccgggttccagcgattctcctgcctcagcctcctgagtagctgggattataggcacctgccatcatgcctgactagtttttgtatttttgggggagacggggtttcaccatgttggccggactagtctgtaactcttgagacctcaggtggtccacccacctcggcctcccagggtgctgggattacaggcctgagccaccacacctggcctctgatttcttcaatagtgtttaaaaaataatgagtttttttcattgtcctaaaccatctaaagaactcatggaatattgaatatgtaacatcctaaactgtttgtagttgtgtctacctatctgcctgttttgacttaggataagtattaacattggtttctgtgcatttcagatgagcacctaagaaaggaggagcggaaaagtactaacattgaagatcttcatgtttctcaggcagtaaacagataatgctttgtttggggtatcttttatcttaaaattgtattattaaataacttatttattgttcc

SEQ ID NO: 2057 - DNA, 732 bp, Macaca Fascicularis
  misc_feature (1)...(732): n = A,T,C or G
tgaggctggtnnnnnncgagnnntcccggctaggcacgcctggcnnnctgnnnctgcctctactaacttcctttctttctgtatcctcctgctcaggtcttgtcttcccctctctctgccattttctctatcagaaaacattaaagctgagtagaaacttcaagatgatcattctgggccaacccttttatctctttnnnnnnnnnnnnnngcgttttaagtctctctgacttggtttttccgtccctatctcccgcagttgttccgtctctgcacctgtgtttctgtttctctctctctcttacatctttttgtttctgcctagtctctgtgccctgtctttgtttctttctctgtctgaaacccnnnnnnnnnnnnnnnnnnnnnnnnnnnnnnnnnnnnnngttatgtgtcaaagactgttgaaagagacagggctactctaggaatggatgggtggggatattttccttccccatggattaagatccagtttagggtcaggaaataaaggatagggannnnnnnnnnnnnnnntcagtcagcagatactnnnnnnnnnnntactatgtgttagatactgtatacaaaagacatgaatgggctgggtcnnnnnnnnnnnnnnnnnnnnnnnnnnnnnnnnnnnnnatgcttttgtttgcaannnnnnnnnnnnnnnnnnnnnnnnnnnnnnnnnnnnnnnnnnnnnnnnaacacaattttcttctgtat

SEQ ID NO: 2058 - DNA, 174 bp, Macaca Fascicularis
aaccccaaatattcacattctcaccccatatgagagagagtatacatctgagaaatagggggcggcgcgagaggtgtaaatcacaagagattatactcaataaagagatttttcttctgagagtttgtgttttatatataaagcgcaaaaaaagagttttattctcaaagagag

SEQ ID NO: 2059 - DNA, 726 bp, Macaca Fascicularis
  misc_feature (1)...(726): n = A,T,C or G
tgctattttatnnncttaaaaagacannnnaattgcatgtgctagagaaaagctaccatgtaaattcaccccaagtaaatnnnnnnnnnnnnnnnnnnnagaaaaatgatccctaagcagataggtagacagaggtaaacattcacaggattcagctctctagctcttgcattctgagcattcttgctttggttctgacttctgggaactgctttgcatttcccctatagatctgtagtttaagagaaccaaggggtcacnnnnnnnnnnnnnnnnnnnnnnnnnnnnnnttgattaagagaacagaaatctgcacagaagatactgtcaaggagtgagaaaatttgtttgagggnnnnnnnnnnnnnnnnnnnnnnnnnnnnnnnnnnntgttgaaaccgtacaatgttctgtggggttactctctaaggcattctctgaggtgtgtgaggaagtcactactcctagnnnnnnnnnnnnnnnaattttaaatattcagttatggtactatgtttgcaactctcatcttgtcacaatgcctcagtagtttgttcccttagaaacatttagatgtgcacaaattaatcttttatatatctaaaggtttttctatcatgtattgggttgctcagaataaagtatctattagactttgttttggtaaataaattctccctgttgtagattaatataaaatnnnnnnnnnnataatatatctatatagcc

SEQ ID NO: 2060 - DNA, 640 bp, Macaca Fascicularis
  misc_feature (1)...(640): n = A,T,C or G
catgtcataggagtctacagtttttatcacatgccctggtcttcattcttttatggcatgagcatttcagtgtgatgatggttatccctgaaacaggaaggctgaagttactgaggcagaacaaaccaacccaagagagaccttgttccccatcttcctctagaattcaagtatagattcttttcacatgattgggtaagaccaagagacgtggcatgagagagaacggtgcacccttaggagtgtacaaatcctttatctgggcacagatgcctatgaagtagcaacttcttcaggatccccccttcattctttttctccctcccttttgtatgagtttttctcttttgtatgctatgttttcttgttgtcttaaaaaacatccactctgtatgggaaagtgaaagtcatgccaggcacttttttccattcttaaaaagtgcctcttccagtggccaggtgtgnnnnnnnnnnnnnnnnnnnnnnnnnnnnnnnnnnnnnnnnnnnnnnnnnnnnnnnnnnnnnnnnnnnnnnnnnnnnnnnnnnnnnnnnnnnnnnnnnnnnnnnnnnnnnnnnnnnnnnnnnnaaagaaaagtacaaataaaaatcagtccagagcgtggtcagtgctctgccgtgt

SEQ ID NO: 2061 - DNA, 746 bp, Macaca Fascicularis
  misc_feature (1)...(746): n = A,T,C or G
gagtgtgctggctgtgggcctggtgatgtgtttccagagaggaggggtcaggatggccatggagaccaaggcaatgcnnnnnnnnnnnnnnnaggggaagcaaagagtgcttatttttaaaggaaaggtgactgacacaaccctgtctcctgcctctgaaaatgttgttcctcctgttccacaatttccagtgcactcttgtttgaatctnnnnnnnnnnattcagagactccctattacaaaggtgatgtccaaactcctttgtctatcatccaaagattcacacctgggtttcagatgcctctccagcctcacatgtcactcctcgcctnnnnnnnnnnnnngctctagccagaccagtctggccatcgggcacagcttgggtgtttcctgggccataccttagatgaccctgcctccaagcctctgctcactcttcccccctcttcctagaccacttctcttctcctccccagcttctgaaatccaacccatctttcactgcatcctccgcactacttggtaactgcctggtgatatctcttgaattgttatttcactttgcaggcatatctttcttatctgcccagctaggttctaaactcccaactgagtggagtcnnnnnnnnnnnnnnnnnnnnnnnnnnnnnnnnnnntggctgctgcttagcaaggcttgtgggttggtaacttgaannnnnnnnnnnnnnnnnnnnnnnntgnnggaactgagggagaggaggcca

SEQ ID NO: 2062 - DNA, 589 bp, Macaca Fascicularis
ttgaaccttgaccttaccatctttttaaataaatgtggagttgatttctctactaaataatagaagcctcacttcttcactcccatggtaagtaacttttatttaagtaaactcaggcaggaaatcacctttgacttggcttccagtagtcattaccaccttttactgcacaattcacaagcatttttttcctgctgaatgggattgagacttacattaagacaacttttccttttatccccaacttttgccagaaagcagaaaaatgctctatttttataaagattaaattctctggtgatattttaaaaaatatcaacctatatgcactttagaatgtaaaataacagtgagtattttaaactcgaagacccactattttgagtattttttatagacttagtttttccatgtaaatactgggttttttcctccctcaatttcaggcttttctccatcttttaagcagcctctgtaactcccttttgtccacaggtgttgtgtgcctctcattgtggggtagtattattcaataaaatttatgttacaagataacttttagtgcgcatgggcgtgtctatacacacag

SEQ ID NO: 2063 - DNA, 1727 bp, Macaca Fascicularis
ctatacagggatcctgacaggaaatgaaggacgatcgggccaccaggaaagggagctataagatccaatgtcagagctcctccctgtgccctattggggtgagcggaaggtgagggaggaaaggttggctgcccatctgcccctcccagcataactcatgacctctcttccccacgttgcttacacaagacggtggatttccataatgcctacttgggttcccatcccataaaaccctgcagctcagctcccctcagctgactcatgcctgtgtctcttggtcaaacaaatgacacagcctggcctctagcttggtcccatcaggtctggcatctgtgccagcagctgcatctgtagccaggaggtggatgggcttgtgaggtgtaaacaggctattttggtctgtgaccaggggcacagtctcttggagggggtgagggtagagatgcaaagactgagcatctggcacagcattcccattcagcatccaggtcaagcgggtgtggacccagggttgcagttagtagattggatctgctttagaatgacagtaacatagcgcagcaagcttggacctgtcaaatatttgggggcatttagggtagtggttctcaaactcaggcttacattagaatcccctagagggcttgttaaaacagattgctgggccccacttccagaagttctgattctatagggatgcagcctgagaatgtgtatttctaataagttcccaggtgatggtggtgccagggccacactttgagaaccactgctttaggggaaaagacttgtgggactgggatggtggtggtgaaatttttgttgttgtcctttgtgtttttccttttctgtcactgaatgaaggaattgtacttttttattaatgaaggtgatttttacaatgaattagctacagggtggaggagcctgagacattagtggaacttcaaaggaatgagtgggatccaatcatcgaatgggctgagaaaagatacggcgtggagatcaactcctccaccagcataatgggacccagcatccccgccaagacgcgggaggtgctcgtcagccacctggcatcttacaacacgtgggctttacaagggattgagtttgtagctgcccagctcaagtccctggtgctgaccttgggcctgattgacctgcacctgacagtggagcaggctgtgctgctgtcacgcctggaggaggagtaccagatccagaagtggggcaacattgagtgggcccatgactacgagctgcaggagctgcgggcccgcaccgctgccggcaccctcttcatccatctctgctccgagagcaccacagtcaagcacaagctcctgaacgagtgaggcctgggcagcacacactcagcaggatagaggcagcgcagccacagctcccccaaccttcagggctcctcagcctgtggggctgacttacttgacttttggggcctcggcctcagcatcaccctgagatttccctgaaacacagtgcgctagtgcgactgtccggaggtcagcctgatttcaaaccaggtgcccctggcctggtcagcaatgaatgtgggagatgaattgtacaactaactttctctcaaccctgattttattaaatatttctccaccctggaaaaaaaaaaaaaaaaaaaaaaaaaaaaaaaaaaaaaaaaaaaaaaaaaaaaaaaaaaaaaaaaaaaaaaaaaaaaaaaaaaa

SEQ ID NO: 2064 - DNA, 844 bp, Macaca Fascicularis
  misc_feature (1)...(844): n = A,T,C or G
acacagataacgtggtgatnnnnnnnnnnnnnnnnnnnnnnnnnnnnnnnnnnnnnnnnnnttattttcacaaggctccttctcctgaagaagccgaggaggagagtgagaggcttctgagggaactctnnnnnnnnnnnnnnnnnnnnnnnnnnnnnnnnnnnnnnncccnnnnnnnnnnnnnnnnnnnnnnnnnnctagatcatcgattttcttcctattacttgtctctgccaccagaaatgagaactccaaaaaatgggatagaaaaacatctcctgagagagacatttgaggagtccaatctgatacccannnnnnnnnnnnnnnnnnnnnnnnaagccttcagtgatggaataacttcagttaagaattcctggtttaagattttannnnnnnnnnnnnnnnnnnnnnnnnnnnnnnnnnnnnnnnnnnnnnnnnnccagaaatttcccttcaatactcctaaaaccaaagaaggatattactaccgtcaaatctttgnnnnnnnnnnnnnnnnnnnnnnnnnnnnnnnnnnnnnnnnnnnnnnnnnnnnnnnnnnnnnnnnnnnnnnnnnnnnnnnnnnnnnnnnnnnccactacaagtcnnnnnnnnnnnnnnnggaaacccaggccacatggagaggctgcatgtgagttcattgctgaccaccctagcaaatggctcagataggggaannnnnnnnnnnaactcaggttannnnngtcagggagtgaggctccagatggttccagctgctaatctttgagtcttctaccaggagcccacacatggaaaggagagaggnnnnnnnnnnnnnnngtgctcgtccaagttcttcatc

SEQ ID NO: 2065 - DNA, 729 bp, Macaca Fascicularis
  misc_feature (1)...(729): n = A,T,C or G
aaggcccagatgaccaaagcaccagagacannntgtggcacaacaaggannncggcactgtccaggtggctctgtgcccagggcccaggctcagcagtgctccctgccctatctttgggaaaatcttgcttttacggtggtccccactcccgccctcaagaacaagggccttgtgcgtgggctttcccattgccgctttcccaagaaggcctgtgaggattcaggggagaggcctccccagggccgcttcccctacacccgcccagaaacccgagcaacccctctctgggtggttcagggctggtgctgcctggcggaaggacagtgagggcagccctggccagccccgccctcttgtgcctctgccctctcccgatcccctcggggcttctgaaaatctcagggacagatgaggctgagcccccagtcccctctgtgtgctttgagcctccagactcaaggctggtcactgcgggtcccaggtagaattnnnnnnnnnnnnnnnnnnnnnnnnctcccgtaagcccccaacaaggggagaccctcatccctgcccctgtgtggctgcccaagtattctgcctgcctcccaccatcagccctcnnnnnnnnnnnnnnnccgcctctgctcccctccctcctcctctgtcttgccctggctcacgcacgcctgtctcgtcttccttgttttgtgctcacttttttatactctgacaaaaaaataataata

SEQ ID NO: 2066 - DNA, 752 bp, Macaca Fascicularis
  misc_feature (1)...(752): n = A,T,C or G
tagacnnnnctcccacccctggnncccacccctgaagtctcagtagggtaaagagcagggagtgctgggaggagacggcggtgaagctcagagatgagattagactgagggtggaagacggaggccccacacactccactcctgatgtctccacttcagaatcagagtctctggggtcccaacctctaagtcctgactcatgggtgacaaaaacagccactcctagctcaagagaagtttctaggctcatctcattgctacctccaatattcgggatcnnnnnnnnnnnnnnngagggcagggtggacagtagggtgtggtccgcgtggcttcctggtgctccagggatggggcaggtgctccctccgtggtggtcagaggggagggaggtgtctgaggttcggcattgatgagtggagcagcggggactttccccctccccaagcaggattcccaggagccatcacctctcatggggagccagggccaggggccatcacaggcaggtgcttgctctaggagtcaggtgggaggagcccggggaggtggggcttggtctgtgatggctcagcctctccttgggaggtggaacttctgaaaaagctggttctccttgcacccaggactccccatctgaataacggggaactgcctggatgtgaccaccccaaagccccttcatttctgaccttctggggcatctgggatgcggctcatcctagatctgctcccgcctgcagccctctcaggcc

SEQ ID NO: 2067 - DNA, 723 bp, Macaca Fascicularis
gtataaattaggttctgcagaaataggattcttaattgaaacatatcatttgcttaattacatgaataatgaaatgtaaaatcagggtccctaagcctttatttcatacagtcctaggattaagctgtttaactgcttggatcccagctggtctctggcagtgggattctggagaggagaaatcgtgacctctgctcatgtgcaggccgcaaccaggctggggtatgtgtaagtgtggttaagttctctgccacttttttcaatgtaaaaagtaggcatcaaagatatgacttctatatacatttctctgtctctgagaacagagaaacctaaccctgtaggaaactggttacagaggacctcctagagcatctgccccattcctccaagtccaagcacagccatgctgagtggaagcgaggccaccctctgagtggattggtcccaagtgtgtaatgaggaaagtgcccaggtactggcacactgcctctcccagagcctcaagaagggccatttaggagcttacttcaaccattttccaaccattttctgtgaaatactgtagcccaaactccaaagggatgtgcagcctttggttttaccaaattctttgttgtcatttggaaaaaattggccgtgtggtggagacatttaaggtgatttttacagataagtgattttgctgtaggtgattatccaaacaagtaaatttgagtgtataat

SEQ ID NO: 2068 - DNA, 777 bp, Macaca Fascicularis
  misc_feature (1)...(777): n = A,T,C or G
gacaaataatagtacacattcatgggtacacagtgatgtnnngatacataaaaatgtatggtgatcagattagggtaattannnnnnnnnnnnnnnnnnnnntatttctttgttttaggaccattcaatatcctccttctagctatttgaaactgtctatnnnnnnnnnntatagtcattctacagtggtatagagtagtagaacttattcctcctatctagttataattttgtatcctttaacaaatctctccttgtccctctcttagccttgatagccactatttactttgcttannnnnnnnnnnnnnnnnnnnnnnnnnnnnnnnnnnnnnnnnnnnnnnnnnnnnnnnnnnnnnnnnnnnnntttattatgtttatacttacttttaaatcgttggaacaaattggaaataacttgctttacttccactgtctgttgtaacagttcctgataacagttaattcctagtgaattaaggttctgtgttcacattctttatttcaatatgcctaannnnnnnnnnnnnnnnnnnnntgcatctttcactgctgctgcaattctggatttgttattctggtattgatttgattgatggacagtagtaaatatttatttttgacaaatatttaataccaaaaaggctgtatgctgggctttaaggcacatgatataagcactgtgaaagtagagatttttgtcttgttcatctttgatggacagtatgtttgatatgatacttgatatatattaagtgcttaataagtgatggcaaa

SEQ ID NO: 2069 - DNA, 823 bp, Macaca Fascicularis
  misc_feature (1)...(823): n = A,T,C or G
ctaggaggttcatcnaagatcttatggccctgcatcctcccagcnnnnncacaggacattttcttcccacaggtggaaaaggagggagctactctcaggctgcgtgtaagtggtgggggtgggagtgtggagaacctcacccatcctgtaattcctcctgtcccacgtctcctgcgggctctgaccagctcctgtttttgttctactccagccggcaacagtgcccagggctctgatgtgtctctcacagcttgaaaaggtgagattcttgggatctagagtggggggcggggggacagagggaaaagaaatgtgtaatagagattctttgattgggatgtttcaggtgtgtggtggctgttcagagtgtcatcacttaccatgactgacttgaatttgttcatgactgttgttttctgtagcctgagacaactgtcttgtgtggggctgnnnnnnnnnnnnnnnnnnnnacctctccttttgtgacttcaggagactctggcatctctttctgcaaaggcatctgaacgtgtctgtgtccctgttagcataatgtgaggaggtggagagacagtccacccccgtgtccaccgtgacccctgttcccatgctgacctgtgtttcctccccagtcatctttcctgttccagagaggtggggctggatgtctccatctcagtctcaactttatgtgcactgagctgcaacttcttacttccctgctgaaaataagaatctgaatataaatttgttttctctaatatttgctatgagaggttgatggattaatgaaataagtcaattcctagaatggagagagcaa

SEQ ID NO: 2070 - DNA, 796 bp, Macaca Fascicularis
  misc_feature (1)...(796): n = A,T,C or G
cagagcagcagacgacaggtnnggcancgcgcgnnncgctgcaagcacctagcgagagaagacgatgacaaaccacgacngtcatcgaggtctacccggacaccaccgaggtgaacgactattacctatggtccatcttcaacttcgtctacctcaacttctgctgcctgggcttcatcgccttggcctactccctcaaagtgcgagacaagaagcttctcaatgacctgaatggagccgtggaggatgcaaagacggcccggctgttcaacatcaccagctctgccctnnnnnnnnnnnnnnncatcctcgtcttcatcttcctgcggtaccccctcacnnnnnnnnnnnnnnnnccaggcacgtccgctggcggagacaagcactgagacatgtttattctcatggtccatgaaacgcaggatcccatgaggttggggcagggcagagcttcttgtcctggggctcccttgagctgtgaaccgggcagcaaggccatcagaagctgagtacagcaagggggcagtgagcttggccctcagcccaccccctccgcctcctggcctccgccctgcctgtgtctggggcctgggggcttctcccctcgctgctgcaccctggcttccagtgtctgtgtccctgccctcacgtgccccttcccaggctcctggggctccttggacctgacacctagcaggaagggcttaggcaaaagtgtcccaggatgggacgactcactctatgctccctgtccctgcctcctccacgctgtgaccctgctcagagccctcgtgtc

SEQ ID NO: 2071 - DNA, 531 bp, Macaca Fascicularis
  misc_feature (1)...(531): n = A,T,C or G
gtcatagcatattttatcttagttatagatacgcaatttagattaatggtttaagtgttatattatcattaataaagagaaatagttggtttcaacctaaaatttttacctctttaaaataaaatatattcaaggtaatatatggtcctgtgatcagattttttagtattttctaaagatttaaatatgagaatttattctctataattcaggtttttaataaataaataatattaaagtgcagatggacagttacgcttttgtgtatttatttatgtttactttcctaatcagctacatagctgggcgcggtggctcacgcctgtaatcccagcactctgggaggccgaggcgggcggatcacaaggtcaggagatcgagaccacnnnnnnnnnnnnnnnnnnnnnnnnnnnnnnnnnnnnnnnnnnnnnnnnnnnnnnnnnnnnnnnnnnnnnnnnnnnnnnnnnnnnnnnnnnnnnnnnnnnnnnnnnnnnnnnnnnnnnnnnnnnnnnnnnnnnnnnnnnnnnnnnn

SEQ ID NO: 2072 - DNA, 746 bp, Macaca Fascicularis
  misc_feature (1)...(746): n = A,T,C or G
taatcatgctggaaancngtaaatatttggagctcttttttttaatagagtattcctctaaaaaaattaaaaccagccatttgtatggcagatgtctgttttcctcgtttatattttaagccataaaacctagtcactattttttgacatataactataaaaatagttttaaatgtgaataaattatgcagtggaaaattgcaaactaagccttatagatacattgtttatttttattttataaagagagcaatgagattattaactcaaaatacaggaatgctctctaggacaaaagaatcttagtatttattgaagaaacagacaatttttgtgaaacattcccgtatcgaagcaataacggaaaggttccagtttactgccatatttggttaaatgtgtttccttgctaaaatagttaatctcagactgttaactattttttttttttgagatagagctttgctgtgttgctgnnnnnnnnnnnnnnnnnnnnnnnnnnnnnnnnnnnnnnnnnnnnnnnnnnnnnnnnnnnnnnnnnnnnnnnnnnnnnnnnnnnnnnnnnnnnnnnnnnnnnnnnnnnnnnnnnnnnnnnnnngattttgtacttttagtagagtttcatcatgttggccgagctggtctcaaactcctnnnnnnnnnnnnnnnntcccaaagtgttgggattacaggtgtgaaccactgtgcctgccctgttaactaattttgattactgtaagaggaca

SEQ ID NO: 2073 - DNA, 756 bp, Macaca Fascicularis
  misc_feature (1)...(756): n = A,T,C or G
gtgacgtggggtggggnncggcgatgnnntagagggaacccctaaattggttttggataagtttgagcccttgaccttaatttcattgctaccactctgatctcttagcacatttcttaggattaagggtcannnnnnnnnnnnnnnnnnnnnnnnnnnnnnnnnnnnnnnnnnnactttttatttaaaaaagctctgcactgccatctatgaaagcctctttatgatgtttgtttttttgccatttttgttctttacatcannnnnnnnnnnnnnnnnnnnnnnnnagaatgtatattgcctctgctcctatcagggnnnnnnnnnnnnnnnncatcgtatataaaatgtattaaaactggggttnnnnnnnngttgctgtactttgtatatagaatttttataaattgtatgcttcagaaataatttatttttaaaaagaaattaaaagttttaaactcacatccatattacatcttccccccctgaaatgtatagaatccatttgtcaccaggaatcaaaacccacggtccattgtgaagtgtgctatatttagaacagtcttaaaatgtacagtgtattttatagaattgaagttaacattcttattttcaagagaatttatggatgttgtagaaatgtacaaatgcatttccaaactgccttaaacgttgtatttttatagacattgttttttaaaaatcctaagtttttaaataactatggatttgtgtattttttggttgttttattaa

SEQ ID NO: 2074 - DNA, 720 bp, Macaca Fascicularis
  misc_feature (1)...(720): n = A,T,C or G
cttatgtgcctgaagcccgggannngtgtggcagggtgccagcccggcggggtccggcgggggcggcatccccccggaacggcccctctcacctccgcagggacagcgctggcccccgtgggcgcccctgccctccgcacccgccgcagccggagccccgcaccgccgccgccaatgccgctgccccggcccccgacaccgcccgccggctgctggcagtgggacgggccctggggctgcgggggtgagggtgccgtcccccgccaggccctggatgctgcagagtgcccgccctgtgccatggccgggcccccacccgccccccagcctctgccaggggatgccagcttttacagcctcccgccaccaccgctgccgcccacctcggagcccctcgagaccccggcgccctcccctagccccagccccagcccccaggccgtgtgctggcccagcggctggcattagctctgcccgccctgccttctcttctcatatgcaatatcagtcattcacaggggcggccggtccccaaaatacaagacgccttcagcccccaacggaccccagtattggccggcgccccccatctgccgttttcctttccaaatggaaggaaacccataaaaccaacagaaaacacacacacacacacacacacaataggcgattatttatttgtttttaatttattttgtcatatttttgtaaaacggcaga

SEQ ID NO: 2075 - DNA, 713 bp, Macaca Fascicularis
  misc_feature (1)...(713): n = A,T,C or G
atagaaaaatactnannntagatgttctataatgggaaggtatgaatctatttcattcaagtaggagctcattttgttgttgttgttttcgcttctgttttttgaggcannnnnnnnnnnnnnnnnnnnnnnnnnnnnnnnnnnnnnnnnnnnnnnnnnnnnnnngcttccatcttctggattcaagcgattcccagctaatttttttgtaattttagtagagatgggggttttaccannnnnnnnnnnnnnnnnnnnnnntcttgacctcaagtgatccacccctgtcagcctcccaaagtgttggaattataggcctaagccaccacgcctggccaagaccaatgaattttaatctaacagcatacaaaacatgcgagacacaatttcagatcccacatcacagcaaacctttaaggtactaccactcattgggttttaatacagcatcatagaaaaaatatccataattatctgaaaagagtattaaaatactctattttcagctgtatatctgtatgaaagtagatggtcttcacaatcttaaactaaaataacatatcccaacagatggaatgtagaaacatttgttccagatgtcttgaagagatttgcaaaaatgttaaacaatgtctttcagaaaaattttttggaaaataattatttttcataataaggtgtcatttatataaccatgtaatgggtttattatt

SEQ ID NO: 2076 - DNA, 625 bp, Macaca Fascicularis
  misc_feature (1)...(625): n = A,T,C or G
cataggnnnnnnnnnnnnnnnntacaaggacagaaacacacatacacaaggtctggaggattcctgtgagacagccatatatccctgtcacttcacaataagtaaagacattcttgtttgaggggtaagaggagcattttttttaaagacaacagctacagatttcagcaccctcagcattcagaacatgtatttaaaccaggataagctgtaaattgtatgataatcatccctgtgtgtttaaacaacacaccatgggcctcaccttttccttcattcttttgggcgtattaaagcacctctaaggtggatgagtcagtcacctgcagatctgaaactgctgattttgggaaaacacttaatggcttcctggccttaccagaggggttgggaaatagctggggacagcccaggccacccttcagttagggtcacttctctgttactttaaacatttgactacnnnnnnnnnnnnttatgacttcttttttccttttattccatagggtagaatggttttgaagaagaaaaaaannnnnnnnnnnnnnnnnnnnnnnnnnnaaaaaagaacctatttttgtgcatcatttaccaatcatgccacacaagcatttatttttagtac

SEQ ID NO: 2077 - DNA, 740 bp, Macaca Fascicularis
  misc_feature (1)...(740): n = A,T,C or G
gaccttgctagccacacnnnnnnnnntcccaaagtgctgggattacaggtgtgagccactgcccctggcctgtgtcatgattcttaatagttacttggttaaaatcacatttgatactatccttcnnnnnnnnnnnnnnnnnnnnnnnnnnnnnnnnnnnnnnnnntagcttaagaggaannnnnnnnnnnnnnnnnntttaagttaaagataaattatttctcatgcttattctcttgcggcagtcatcttagaaagaccctcaaaggctttgtgattgtannnnnnnnnnnnnnnnnnnnnnnnnnnnnnnnnnnnnnnnnatcctcaacttaggaagaaaccaagacagagagcttaactcacttctctcagggaaaattaggagttgagcacaggacaggagatgggctttgccacttttagctccaggcttttccaaccagattttatttccttatgttctagaaagatcactaatggtcaagtggaacaagcactacacgactaacccctattggggtttttaacttaagggaggctaatttttaatttaaattgcttgagatatgagttctgcaaaaggtggtccgtatccttggccctctgggcattatcactaaattgcttgtgcctgttaatgagannnnnnnnnnnnnnnctcttcatgtagctcatacagttggttcacttcatgcggttcttgacgtgtttatttctacccttaatgcaatgaaatg

SEQ ID NO: 2078 - DNA, 743 bp, Macaca Fascicularis
  misc_feature (1)...(743): n = A,T,C or G
agagaattgttactcgtaaagtgtcattttctatttagcaagtgcattttgatgagtttctttctttgtatttcaacatgtttcattcataagaacacagtagaacagaactggtcagtttaagacctgaagttatcccacttgtaatgagggtttacaacagcattagacttcttccaaatgcagtgaagattaaacccagtacagaaccactatgtggaaagacccttactgtgacccgtcatgcatgtgcatgtctagaagccagagctttataaaatgtcttgaatgttttgccaatatctaagttcttcaggactaaagaacagcttggttgacttgtttcttttagaacattctatcttagtactaaatccatttatgtaatttcagcagaggggatggtagtgtattttggcaacaggggtatctttccaaagactcagctctggcagatttgttatgaactgatggatcttttcattatgagaaccaaacacgtcaagtgcagagtattttccaggcaattgaatatgacttgtgcttattaggcttctgaaaacagaagtttcaatactttttacttaaaaatagaaaagataaactacaggacaaaggctaaattgatgctttcccttatcaaagaccactatttgcagagcactacannnnnnnnnnnnnnnaaaatggtttatgatgtggcatttttgaaacatnnnnnnnnnnnnnnnnnnnnnnnatat

SEQ ID NO: 2079 - DNA, 218 bp, Macaca Fascicularis
tgtaacattgcacagtttacccagcatgactttccttaaaaggccccctcctcacgctggagcataattcccacccaactgaagtcctaccagaaaaagtggtagaagaagctttgctgcttttgtgcctcttacaggcgcctaaagtcattgccatgggaggaaaacggattggggggcggggttggtggggctttccctaatttatcttcatgtcc

SEQ ID NO: 2080 - DNA, 720 bp, Macaca Fascicularis
  misc_feature (1)...(720): n = A,T,C or G
atcatgtagacagcatgataaaaatnnnnnngatacagggttttatctggctttaaactcaggaaccaagttaattatgccagattgaactttgatttttactaccttttcaaagacattttaaaaagtggataattatacgtatataatatgcataatatttctttggagctgacatttctttacgaattctatgttactgttacatctttccgttctgatggcctctgggcctttgtacctttgtctttggtgccttattcctagtatgtttctatcaccttaatgaggccgcagacggagtcagaatgtgaaattacaaataatcactggatccatctactgttttccatcaccttccccactgatgctctgggtaagacagtgatgtgtcacttcaactgtgtgtaatatgtcagacacgtcctataataacaggcgtcatatttgtattcttatttttagtttactgtagaaaataatggcatcaccaaaggtgatgagagtttttgtaggatctgttttcttatacttaaagacagtcttctgttatggtaattgccagtattcatggcttcctctctgcgtcagaagagaagggatctgctttctcttggctgatttcacatagtattggtaatagacttgcatttctctttctaaaggggaataactttttaaacccttcctgattttagcctggcaatgtaagtgtcctta

SEQ ID NO: 2081 - DNA, 751 bp, Macaca Fascicularis
  misc_feature (1)...(751): n = A,T,C or G
cggcaaccgcgagcggcccctgaacgtgttttgtgacatgggagactgacgggggcggctggctggtgttccagcgccgcatggatggacagacagacttctggagggactgggaggactatgcccatggttttgggaacatctctggggagttctggctgggcaacgaggccctgcacagcctgacgcaggcaggtgactactccatgcgcgtggacctgcgggctggggacgaggctgtgttcgcccagtacgactccttccgcgtagactcggctgcggagtactaccgcctccacctggagggctaccacggcaccgcaggggactccatgagctaccacagcggcagtgtcttctctgcccgtgatcgggaccccaacaacttgctcatctcctgcgccgtctcctaccgaggggcctggtggtacaggaactgccactacgccaacctcaacgggctctacgggagcacagtggaccatcagggagtgagctggtactactggaagggcttcgagttctcggtgccnnnnnnnnnnnnnnnnnnnnnnnnnnnnnnctttcgctccccagccgggggaggctgagctgctgcccacctctctcgcacccgnagtatgactgccgagcactgagggtcgccccgagagaagagccagggcccctcaccacccagccactggaggaagccttctccgccagcgatctcgcagcactatgtttacagtggggggaggggatcgtacgg

SEQ ID NO: 2082 - DNA, 718 bp, Macaca Fascicularis
  misc_feature (1)...(718): n = A,T,C or G
cggccagttgacnnnntgggtttggtttttttgttttgttttgttttacnnnnnnnnntaagatannnnnnnnnnnnnnnnnnnnnnnnnnnnaatttgtaataaagcatttgttaagcgtgtagaagtctaaatcaaaagtcttcaagaaaaacagctatagcaatgagcctggacatttttcaaaaaaaaaaaaaaagaaagctaagccgtcctaccagcagtctcttgctcctaagaatgtcatgccttttnnnnnnnnnnnnnnnnnnnnnnnnnnnnnnnnnnnntttataatagcanctattatgaaagtaaaattcagttgcttacagtttggccgctttgtagcacnattataaacagcccaaatgtatggtcttggccgtactgcatgacacatggcctggtcacctgtaatggaatatgctgcagtggtggtttgccaagcttctgtggatgtctgaagactttatttttgcagtcttaaccttgggctggacctaagtgtatataaaccatgtgatgtctgtattgtttatagatgctgacaaaagaaaactagaccttttgttttttgttgtaagatttttgttttcatacctatgttcataggagatagtnngcaaatgaaagttgatttgccatacttttaaataatattgttttagcttgaatattctataatacacttttatagagtatacacatgctaaat

SEQ ID NO: 2083 - DNA, 1380 bp, Macaca Fascicularis
attcttaagctaatgggcaccaactgccacaggacagttcttccagtgaacggtttctctctacaagggtcagtacatggaacacagtaacggtcatctgaggatacccttcagagaggaagtgcgaaagctctgggatagttaactttagggttctcatcagataggttcaaagtgatcaatggacagctacatgtactttatacgacttttgattttcaaaactcctttggtccctgcagatacctaaggcacacagggtttaagtggcttgctcaagaccacagggctagtaaattatggcattgatattcaaactctgcaggttatagaattccgtaagtttccctttcatttcccaactttgaaggactttcatctcttagaatcaaggaggtataattacaggtagaaaaaagccttatagacaatccgagctaaccctccccatttctgaaatgtgctcagctgaggtctagagaaggaaaaaagaaaaacccaccactcttatgtgcaacaaagccaggagttcagatcctgatctgggtgctgtattcaaattatgctacagaaagtgtcgtcctactcagttttcaaaagccagatcatgtgactaaagtactcccattatgaagagccatgtcccatgggctccagggcaggcatctacacattctccaaggaggctaacttccaacgactgatgaagcaagcagcagcaggagacaggctctgcacaagatcaagtgtcgcaggaggcagtggaaatgtggttaaagttgtgaagattttaaaagaaagagtttttaaggaaaacatggacaaccttcactgtacgtacgcaataaagagaccatatcattgccatctatacaacacctgcagaaaattaaagatgggcagcaaggacgggaacaaccacctttatctttgttctaagacaaagtgtactcctgcttcagatctgcaggagcaccttgagaatcccgtcctgagctcacctgatcaagaaaccaagaacaaaacacaaatccaagatttatacctccaagtcctattgcagcattcaaaagagttcttctcagaaggaatgagaggaggcagacaagtatcagattgcctgtactgttttcaaaatacagatgaccctggaacaacacgggtttgaactgtgtgggtgcacttaatatgggattttagaccaacccctccctcttcctctgcctactcaacataaagatgacaagggtgaaggtctttatgatgatccacttccacttaatgaacagtaaatatattttgtctaccttaaaaaaaaaaaaaaaaaaaaaaaaaaaaaaaaaaaaaaaaaaaaaaaaaaaaaaaaaaaaaaaaaaaaaa

SEQ ID NO: 2084 - DNA, 728 bp, Macaca Fascicularis
  misc_feature (1)...(728): n = A,T,C or G
agaattcattcaaannnnntatgccaacagaaaagttccttcttgtgtaatatctctttacctcagtcctacactttgattctctggaggagattttagcttgtcttaaaaagccaaatttggagtcatcaagcctgctgaacctgatggggcagctttttgaacagctttccggaagcaagagcttcagttgaaaagccctttgatcgcttcagcccaggacatggccttcacatggcttattctcagtaaagctttatgtagactgtgacgctatatatgtgtgactcatacaactttgacgtgtttctgaagtagtttaatcatatttgttattagcctctttgtggaaatgcaatttttatactaaaaacattgcttatttgcaatgcagtatgttataaatgtgttgtttatattatttgtattagtcttagcctaatgaacctaattatttttctttctgtattttttgcttccttaaatagcatctgcagcaattggaatgagaaatccagatacgtgtttcaagtagtacattgcctgaatcacaaatcacttgatcacagtattgtatataatccccgatcctatttgtttcattttattgtaaattcccatttgcatcaaaacctaatgatagtgattaataagtaaaaacaaatggtgtattgcttttcatacaagtgttttcacaaaaannnnnnnnnnnnnnnntccatccaatg

SEQ ID NO: 2085 - DNA, 1689 bp, Macaca Fascicularis
gagcttattcagaaggctggacaatcaagcttaggagcagggcacgtgtccgaaaggactgtgattgcagatgggagtctcagccatcccaaggaacacatgctctgcaaagaagccaagttagaaatggtacataagtctaggaaagaccattcttctgggaacccagggcagcaggcccaagcccccaccgctgcagggccagatgcaaacttggatcagccagtcaccatgatttttatgggctaccaaaatatcgaggatgaagaggagacaaaaaaggtgctaggctatgatgaaaccatcaaggcagaattggtcctcattgatgaagatgatgagaagtcattgagggagaagacagtgacggacgtgtccactattgacgggaacgcggctgagcttgtgtccgggaggccagtctcagacaccacagagccctcatccccagaagggaaggaagagagcccagccacagagccagccccaggtacccaaaagaaaaagcgctgtcaatgctgtgttgtcatgtgaccacttctttcttctcctttcttctgggcagcctgtactctccatcactcacgtagacctcactgtaccactaactgcaatactgtgaactggaagcaaacacctgccttgccttgcagttggattgctttgatctctctcatttttttccttttcctcacctgagagacaacgtgcatgtgtgtgcttcattctctccaagaacttgcttttcctctaaacctttccttgtgtcttcaagagtgaatcacttccttcctgctcgactggaatggactcttcgtatcagccagtgatatggtagccttaactcacttgactggaattgaacccattggcactgggggtttcattttgtagtgtgttcctgtaacgtagtcacacactgccatgtccctggtttctcacttgcctcctttgctgtggatctttgtttttatatcttgtgtggcaaaatgctgttggctctagccggttgctagtgtagccaaaagtggaccttacttagtctgtctgatctagggtgatgctttttgctgccttacataagcttccagattacagtattgtgcattcgtgactttctttctgttaaaactgaaatgaagtcgatgcagaagaacccagagcttgtcacagctgaaatgtagggactgattccataacctgcccatcagcggttgtctctctttctatggtttaaccgatgaaccctttatataagaagcaccatttaaaaatttctaaggacatgaaacaaacattgtttgaagcatcagtagcaattgatctccaaacttaggcaaattcacaagccttgtttctattctcttaaaaaaatgtaaatttttatagtgtttcttttttcatggacattttcttgtcatgttaatctattttcaatgaggggatcatcttgagaagtatctttgcagtgaccatatttttaaaacagtctttccaacatacagtggttgccatgatgctcccacttcatcatggatggtgctgtaatgcattaactgttcatctcatgcccggttgattacaaagccttgcatctgtactcttttctttctggccccatgagaaagaaaatgttttaggtaacttcaacttgtaggtttatctgcccttcaaaaaaaaaaaaaaaaa

SEQ ID NO: 2086 - DNA, 734 bp, Macaca Fascicularis
  misc_feature (1)...(734): n = A,T,C or G
tattgacccagaatgatgagctctgagacatatcctaccaactatacttgaagccaaaggaaaagaactatgtaagcctgtaggccaaaagacctagtctcttacaaaggaaagatctggttggcatcaggcttcttaacaaagcgagatagcaatggggcaaccttttcaagaaactcaaagaaagtatgaactgaggatttcatatttcgccaagctttcctttaagtatcaaggatataggaagaagttttaattacacaagaacccagggactattgtacccacgacttcttccttagaattctactaaaagacaagcttcatccaactaggagatgattggggaaatgagcaaaaggactggacgtgaccattgaatatttttggttgtagacctgagaccaaatggaagtggggataagggtggaagaacagtgttagtctattttcacactgctataaagatagtacccagccgggcatggtggctcatgtctgtaatcccagcacttagggaggccgaggcagaaagatcacctgaggtcaggagtttgnnnnnnnnnnnnnnnnnnnnnnnnnnnnnnnnnnnnnnnnnnnnnnnnnnnnnnnnnnnnnnnnnnnnnnnnnnnnnnnnnnnnnnnnnnnnnnnnnnnnnnnnnnnnnnnnnnnnnnnnnnnnnnnnnnnnnnnnnnnnnnnnnnnnnnnnnnnnnnnnnnnnnnnnnnnnnnnnn

SEQ ID NO: 2087 - DNA, 751 bp, Macaca Fascicularis
  misc_feature (1)...(751): n = A,T,C or G
gatgattagctgcccagctggactctgcacgtggggatggacccttcctgcctgctccccggtcctcagcctgggctnnnaggacaggacaggatgggacagcaggatagacaggacagcaagcccattgggtgggaggaaggatgagggccccactgtgtccatactgggaaggggggctccacagctacaggctgaggatctagggccgggacctgtcagtcaaggaagaggtcactttaggaccttctctgtaatcttgtgacatgagtctgccctcctcacaggcagctcccaggtcaatagggaaggagaatatggggccagtgtagctgttcccagggttctgggagctccctgtggcctgtctgggaatccctggaggctgagactacagtggccaggttttgtgcttatttattggggggtgggttgagggaggagctatctggccttggggtaccctgnnnnnnnnnnnnnnnnngatacgtcttggtcaaggctgtctgcctgttgcccttggtccttgggcactgggagccatgggtgccactgcccgtccagcctggctcccttcctgggcctggctaggaccagaggccttagatcctgttctggactccttggctgcggctttgtgttgccgaccgggatactcgaaaacacaggatcaatgtagtgcctcatccaggggcatccttttttttttttttttcaaagagtttggggtagggaaggtttaatagtaaaa

SEQ ID NO: 2088 - DNA, 762 bp, Macaca Fascicularis
  misc_feature (1)...(762): n = A,T,C or G
ggcaggcagattgctgagnncagaatttcatgaccagctngggcaacctggtgagattctnnnnnnacaaaaactacaaaacaatnnnnnnnnnnnnnnnnnnnnnnnnnnnnnnnnnnnnnnnnnnnnnnnnnnnnnnnnnnnnnnnnnnnnnnnnnnnnnnnnnnnnnnnnnagtgagccatggttgtgccannacactccagcctgggcaactcagcaagaccctgtctcaaaaaaaaaaagaaaagataaacatggtgttaccgtttgacccagcagtttcatacccaggagaattgaacgcgtgtgtccacacagaaactcgtacacagaagccaaaatgtggaaaccaagtgtccctctacagatgaatggttaaacaaaatgtccatccgtagaacggaatattattcggtcataaacagaatgcagtactgacacatgctacaacgtgggtgaacattgaaatcattaggttaagtgaaaagccagttactatatattgtgcaattccatttatacggaatttctagactaggcaaatccatagagacagttgagtggttgcttaagactgggagtggggggaaataggaggggacagctaatgggcagtttcagttttgacataacgaaaacgtacttacatcagcagagcaggcagaaaacgtgccctaagacggtggtaatggtacacttctgtcaatggcataattggtggatgatgtgtgagttatgtctcttgttgataacagcttca

SEQ ID NO: 2089 - DNA, 709 bp, Macaca Fascicularis
  misc_feature (1)...(709): n = A,T,C or G
cagacttggatacatcgtaannnccgcctccacggaacgtctcgccttgcgagcaagctccgaatcnnnnnnnnnnnnnnnccctccaaaacccacagtcccagggacgccgctttccgggattccggccaaacgccggaccctcagtcgctccaggtcccctcaccctcaaagtgtagcgcccccagccgagcaacctcggttttgtccctaaaacccagcctcctctataagctccgccccaactcagacaaaaccccgnnnnnnnnnnnnnnnnnnnnnnnttcttttcttctccgcggggtgattcagtccagtgattgggtttgtggctccannnnnnnnnnnnnnacggacagactcctccctttcttactgcaaaaggaccgagccctggggtagtagcgcccccacactccggttttttccaagtacattttcgtccctccacccaggtctctgcctattttcttgctaatcccagaacctttccttttgttttttttttaaggacatttgggaagttcctggagtaggatccttctccctgggataagaaacctgcctgtaaacgctctgtaaatactcccttccacccatcccagcccctgggcagccgggcagaagggaatccaggctatgggacctcccaagtccccgctccctgctcccctcggcggcccccgcctntnttgatctgtgtgtgagt

SEQ ID NO: 2090 - DNA, 504 bp, Macaca Fascicularis
caggcgccagccaagagggaagtctcttatgagagagtcgaaaatctcatctatgataatgtggccgccatccaggcccacaagttggaggtgtaagtgacgagagggctgggtctccagcccacgcatcttcaagctctgaacgcccacttgagccccgattcttagaagagcagagggctgggttcccacactcttaggtgctgtgggaggaggagactgggatcccacactctggtttccccaggagagagtggtgtgatggggttcagatgaaccctatgggagctggggatatggatttctggttccctgaaggagagagatggtagcttggatatctcatgtctctcagggaggaggaagacgggagtccacgatacgggaagagacagactggagcccggattttgaggcaggaaggaaattgggtctggagttctggctacttgaggacccaaggcaggcaggatcccgccccgcttttacatcacaaaccaaatc

SEQ ID NO: 2091 - DNA, 730 bp, Macaca Fascicularis
  misc_feature (1)...(730): n = A,T,C or G
aaaaagaagngnnnnnaaagaggaaacaatgcatttccaggcaaccacttaaaggatttacatagacaatcctataagatcttgaacttgaattttatgggttgtattttaataatgtaagtaaattatttatgcactcctggtgtgctatgaatattattccagttagccttggattatttcagtggccaacatatgcagacatttgtactcctcaaccattttctcaaagtaatgggcattctatgatttagacttcaaggaattccaatgatgaagattttaaggaaaatattttatattcaacaggnnnattctgatncatgtactgtactccagagctgttatgtaacactgtatataaatggttgcaaaaaaaaacaaaaaaataagtcagtgcttataaaaagaatttaagataatggtttttaaaatgcctttataataagctttgtttctttgtgaaactaattcagcaggctgaaggaaatggttcatgtgataaagtgggctggtatcctctagagtacctgggtacataaacagaaactccnntaggtgaaaagtaatttgtgccattagtctttctatgtttctgcatccagatagagtgcagttcatgagggagggggcgggggactgaaggggcaagggcgttaaagtgatacatttttataccannatgtgtttatttttttgtgcaagtaatccttaaaattgcaatgtatta

SEQ ID NO: 2092 - DNA, 703 bp, Macaca Fascicularis
  misc_feature (1)...(703): n = A,T,C or G
atggcagagaaaaggccataagaacagtggaagaggagcatggactcagacttcaagnnnnnnnnnnnnnnnccaggtccttccttctgcatctcatcacccctagttacaaataactccactgaacagcatctattcagaaactataccgaataaaaagattggtggaagggctcatgtggttagcaactatgaaacagaaataggacactcagttacaaacattatctcctttagtttttcagaaaatgcatccctgatttcattcatttccagcttgaaagccagccatattatctagtccctaccaaactgctctaggaggtcatttccattttgttggtgatatttagacgcgcannnnnnnnnnnnnnnnnnnntaacttcagcattccagatgaagtttcctgactcagtgcttttgcataaggaactagaaaaaaaaagtggtaaggaaaattggagatgctaacatcctcccccatcccaactgcaccttaaaatatgcatgtcaccttcaaggttttataattgcactgtttgttttatgtatgtacagattaaaattattgctacatttgaggaaaataaaattgcttgcttctatgtaattcctgtcattccacaggaaattcacttttccagctactgaatagaatttgtttaacaacctcaaaaaaaaaaaaaaaaaaaaaaaaaaagg

SEQ ID NO: 2093 - DNA, 737 bp, Macaca Fascicularis
  misc_feature (1)...(737): n = A,T,C or G
tcaggatctnnnnncnnnnnnnntcagggaaggccgagggtgactttctctagcctcgtcactgtttctctagccttgtcactgtctccctgcctgtcaatcaccacctttcctctagaggaggaaaattatctcccctgcaaagcccggttctnnnnnnnnnnnnnnnnnnnnnntgctaagaaccttccgtgttcnnnnnnnnnnnnnnnnnnnnnnnnnnnnnnnnaagggaccccatatgtagcaaannnnnnnnntgggggagagccaggttcatgccctgtcctcactggtcgtccctatgaattgtacgtttcagagaaattttttttcctatgtgcaacacgaagctnnnnnnnnnnnnnaatatcccgatgataaggaaagaaaatgttgttgttgtgtttttttctggaannnnnnnnnnnnnnnnnnnnnnnnnnnnnnnnnnaaggacacagcccgtcctcccctgcctgnnnnnnnnnnnnnnnnnnnnnnnnnnnnnnnnnnnnnnnnnnnnnnnnnnngcgtgggaactgctctcctttgcagctccatttcccaagctctgttcaagttaaacttatgtaagcactctgtggcnnnnnnnnnnnnnnnnnnnnnnnnnnnnnnnnnnnnnctgtatttggatgccaatccacannnnnnnnnnnnnnnnnnnnnnnnnnnnnnnnnnnnnnnnnngcaatgatgacnnnnnnaaaagctgc

SEQ ID NO: 2094 - DNA, 1451 bp, Macaca Fascicularis
  misc_feature (1)...(1451): n = A,T,C or G
gcagttcaggctgcacttcagtcagctctcggaggcgagctgggaaatagtgactgctgacccatgacaaagaaacctctttactatgttctatttccaaggcctgaagaagttctctggaacacataccgtgtcctgagttggctcctgccggtgggttcgtggtcccaggaaggaagctccggacctttgcagacccaggttaaaggagaacctcttatttgagatgtgccaagcatcacaaatttggatttatttgggaaaaatcaagggagctggtgagaacacacagtggatcttacagcttctgttccacctggcatacgttaacacaaagaagtgagtgagagagctgggatatgacttcaggaatccatattcttactaattacattatgctggttttggagaattgagaggacctctgaggaatcttcctgaggaacgctctttgcaaagctctgctccagagatgatggagaacagctctgaacaaaacaaaaacctcagccaccatgaagctcagtgacagacaataaacacacacatnnnnnnnnnnnnnnnnnnnnnnnnnnnnnnnnnnnnnnnnnnnnnnnnnnnnnnnnnnnnnnnnnnnnnnnnnnnnnnnnnnnnnnnnnnnnnnnnnnnnnnnnnnnnnnnnnnnnnnnnnnnnnnnnnnnnnnnnnnnnnnnnnnnnnnnnnnnnnnnnnnnnnnnnnnnnnnnnnnnnnnnnnnnnnnnnnnnnnnnnnnnccatctcctgacctcgtgatccgcccgtctcggcctcccaaagtgctgggattacaggcctgagtcactgcacccggccaaagtaagtctttaattgtgcttgtcaatttccagatttatcccagggttcaacaaatacctaatttaacttgaacactagtaaggtttttctgtaggtattactgtgtcttcttgcatgtgttttgctgtttggaaagttttctgtcatgattcccatggatgtgaggaggtccccaattttacctggatttaaatgatttaataggatacgaccagatgtgctcaaatagtttaaacattatgtattgtgctaccagatgtgcctctattaaatcaagaattcaaggtaatacgtatgccactgttgtatgttcactttcattaaaatctatctctaggcaattcatctttattaatttgtgacttccccccccccccgcagaaaatggccaaaattcagactccctgtcttctgtagaataaacagtagctcttttgacagcagtcttcattcaccttgcaatggaatgatgtctttttctttgtatctttatcattatttaatatgtattgtattcatgtttataattcacatacattgtagacattgtataaattttaaaaataaagtataaaataaattgtaatcccagtacctgtaaaaaaaaaaaaaaaaaa

SEQ ID NO: 2095 - DNA, 641 bp, Macaca Fascicularis
gccccagtgactccagctgctgctgtccccgaagcaccctccgtgacccccaccgccccaccggaggatgaggatccagccctgtccccacacctcgtgctccccgacagcctcagccagctggaagagtttggccgacagaggaagtggcacaagaggcagagcacacaccagcggccacggcagttcaatgacctctgggtccgcatcgaggacagcaccaccgcctcgccgcccccgctgcccctgcagcccacccacagctccaggacggccaagccccccttccagccctcagacctgctacaacagcaggacctgccagggcccgccagcagctcggcacccaccctgggcctcctccccgccgttgccaccaccatcgctgcctgcttcctgctgcacagccttgggccctcttgacctcggccaccccaagtggagaagccagagaaatgacacaggggtcttcggccacaccccaccgctcctgccaccacctgcaggggtgcccaacacctcgagggcagtccagacgggatcggctagacactagagctttactgtacccaagttacatcttcttttttgtagaaggatcttaatttcccatagtgctatggggctcttttgtaaaatac

SEQ ID NO: 2096 - DNA, 694 bp, Macaca Fascicularis
  misc_feature (1)...(694): n = A,T,C or G
gaaagtcaaacctaactttatcagtctctgtaggcttcattgaggacaatattgtgacatcatagccaagttaaccccatgcccaatcctgcttccttttcttccccaaaacaggtatccatctcaagaatatcccctaataaacatctgcacactcgtctccatctcagaatctgcctcctgataacctgacctacaacgggaactgctaggcagggaatgtcctgggagcaattagggaaggcttcacggaagagacgctgtttatgttaggccaaatctcagcagatgtagggcttagtgggtatcattgtgctgtagcaaaaagcacagccactttgtnnnnnnnnnnnnnnnnnnnnnnnnnnnnnnnnnnnnnnnnnnnnnnnnnnnnnnnnnnnnnnnnnnnnnnnnnnnnnnnncctccttgagcctcggtttcctccttagtaacatgagactgataatccctccttcctatggttcttagaaggttttcaatcacagtgaatttcttagcttcctccccatggagacggggctgaggggtcttcctgtgcacttggtcctgccttttttttttttaacccataaaaattcacctgttttattttgtggcgggttgggaatatccattacctcagacatttatattttatttgtattacaaacaatccagttatacttttttatt

SEQ ID NO: 2097 - DNA, 755 bp, Macaca Fascicularis
  misc_feature (1)...(755): n = A,T,C or G
ctgacagtggtttcagtgtgtaccttatcntcattataataacacactatcaatccagcaatctttagactacaataatacttttatccatgtgctcaagaannnnnnnnnnnnnnnaacttatactaaagagctagcatatagatgttaatttatggatagatcagttgctatattttctggtgtagcgtctttcttatttagtgtgatctagggataccacagaaatggttcagtctatcacagctcccatggagttagtctggtcgccagatatggatgagagattctgttcagtggatcagaatcaaactggtacatcgatccacttgagccgttgagtgctcccaattgtacaatatgcccaggcttgcagaatgaagccaactttttattgtgaataataataaggacatatttttcttcagattatgttttatttctttgcattgagtgaggaacataaaatggcttgataaaagtaataaaatcagtacaatcactaactttactttgtacatattattttgcagtatagatgaatattactaatcagtttgattattctcagagggtgctgctctttaatgaaaatgaaaattatagctaatggtttttcctcaaactctgctttctgtaaccaatcactgttttaatgtttgtgtgttctttataaaatttaaatacaattcgttattctgttttcaatgttagtatgtatgtaaacatgatagtatagccatttttttcatacg

SEQ ID NO: 2098 - DNA, 600 bp, Macaca Fascicularis
  misc_feature (1)...(600): n = A,T,C or G
agaaatcccaccttcctattnnnnnnnnnnnnnnnnnnnnnnnnnnnnnnnnngaaagggaacagnnnnnnnnnnnnnnnnnnnnnnnnnnnnnnnnnnnnnnnnnnnnnngagaagcactgctcaaaccccaccaccgggtcagagcccaggcaannnnnnnnnnnnnnnnnnnnnnnnnnnnnnnnnnnnnnnnccaacactcttcctggctcccaagccttcccaannnnnnnnnnnnnnnnnnnnnnnnnnnnnnnnnnnnnnnnnnnnnnnnnnnnnnnnnnggggagctgagcaatgatgagcagaatcttcatgtctctggcaggcggaggagggttccagaagtggtagagatgctgtgcaggannnnnnnnnnnnnnnnnnnnnnnnnnnnnnnnnnnnnnnngaggagaacttagaacttgggaaggggtgttcccgggttccagagaagaatgagatccactggccttcactagggaactaagcatgagctgggaggaaatnnnnnnnnnggtcattgctccgtcannnnnnnnnnnnccgggcaagactcaccagtccactagctgggcnnnnnnnnnnnnnnnacat

SEQ ID NO: 2099 - DNA, 746 bp, Macaca Fascicularis
  misc_feature (1)...(746): n = A,T,C or G
cactcaagccnnncagacaagcccagaggttccttggccttctcagtcagctaactttnnngagttctcctttgacttcactagggaacagctcatggaagagaatgaatctcttaaacnnnnnnnnnnnnnnnntaaaatggctcttgcagaggctcacttggaaaaagatgctcttcttcatcatataannnnnnnnnnnnnnnnnnnnnnnnnnnnnnnnnnnnnactgaaattatagctctggagtaggaaggttatatttataatgtggatgttaccagttaggggaagagttttattttcatgaaaagacaataaagcaaaatggaatgtgatgaagtgatgactatttcaaagccagtttagaaagtattaggnnnnnnnnnnnnnnncttttggttgttttgtgttttggggcttagccctcttttaaactgttgtgatctagggaagtcaacacatagtgtaaaataattacatgtctattgaaaagaagatgtcatttcctaattttgatatctcattgtaggcatttttttttaatgaaaaaggaaaacctcttgtgttcacacagattgctgaattggtttctcaatatttgttaataatttactattatttacaaagattcaaatgcttttatgactaatgtaaaatgaaaagaggcttacattttaaatgttattaaaattatgtacttatatctataatttaattactgtaaaaagtccaatcagattaat

SEQ ID NO: 2100 - DNA, 754 bp, Macaca Fascicularis
  misc_feature (1)...(754): n = A,T,C or G
gcagataagtaccagcccacaggaatcaaatgggtgaaacccactttgggcctgaccccagcaagaccagcatctccaggccccagcctttnnnnncaggcctaagagtcagggaaagaggggagactgtcccagagaccacctcctggnnnnnnnnnnnnnnnctggatctatggcgtgactcaagctcttccttacccagggggaggtaaggccaggcctctggcaacctggagttgtctgtaataatcttgaaaggcccacgggcctgtccccatcctgatttcaaggcatctccttccctgtttcataccacatgacagagaaagctgttctcatggcatgtnnnnnnnnnntgaagacagcgttgtatatgattttgtattttttaattcattttaatctacaggttggaatctaatttttaaattttnnnnnnnnnnncattttaaaaagaaataaaaacatttaaaataataacaataataataataataaacctttgaccggtgtcttccaagtagtttgatcaaagaatttataggtgttttcaaaacacagtccagagtgtaaagnnnnnnnnnnnnnnnnnnnnnncttgtgtgtatgaagtgtaaatctggttttgttttgttgttttggattcttttgggtttttgttttgttttgaagatcagacagtgatcactctgaaagattgaagccaagaatttgtaactatgatatttactgtaagctgtagaacactcaataa

SEQ ID NO: 2101 - DNA, 743 bp, Macaca Fascicularis
  misc_feature (1)...(743): n = A,T,C or G
tagttatgagccacnnnnntacttgatttaaactcagattngtcttagcctattgccatatagtactcannntataactatgtaactttctcataatgtatctgtttgtgcaatatggaagctgtgagtggattcatagctttttggtttaattgtacattattgtgtgtgtacatatgtatatatgtgtatatataaggaccaaaattcttagctcgcttacactgttgctagtgtaaacattgttacacttaattttacagggcacaaattatggaattacttcataaattcatggtaatnnnnnnnnnnnnnnnnnnnnnnnnnnnnnnnnnnnatttaattatgaagtccatcagtattgacannnnnnnnnnnnnnnnnnnnnnnnnnnnnnnnnnnnnnnnnnnnnnnnnnnnnnnnnnnnnnnnnnnnnnnnnnnnnnnnnnnnnnnnnnnnnnnnnnnnnnnnnnnnnnnnnnnnnnnnnnnttctgggccctgtaaaatagtgttactgtaatactctgttttgcctcctgccttgtttacattaaacaggatatttggtaaattttttgtatcgaacgttgtgtaggttactgacagtgttaccaacgtctggaattcttggtccatccgtggannnnnnnnnnnnnnngtcattgtgtacctactctctcttcaaaggaagttgtgatcaagttcaactttttgtgctaacaatgcatgcaggactaagagg

SEQ ID NO: 2102 - DNA, 687 bp, Macaca Fascicularis
  misc_feature (1)...(687): n = A,T,C or G
gggctttttccagagacctagtgagtggctgtcctgccttcactgcccacatgcccacactctcacntactcaacatgctttaattccagggtgtaatctgtgctcactaccaggtaaggccgctgtggcccattcagagtcagtccggggacacaacgagacatgaatggacatacagagtcagtccattaacaaatattttgcagagcagaagtttttaattttaatgatgttccatcagtatatcccttaaggaagaagttgaaggagagaaccacttacagagaaagatgagagaactctggatcaggacataccatatgcatgtgtgtgatcatgtgcaggtgtgcatgtgaccgcatattctcctccatgtatgcatgaaacacattccactatgggtttctgaaggtggggctctccggatggatctggtgtctgttgtaagacccagctaagagtttcacaaccactgcccactctcaaagaagttagtgtatggcccccttagaagcttccttacagccttcatgaaaattaactccaagtttattatagacctaaatgaaaaatgagtatctataaaacttccagaagataatgtaggagaaaatctagatgccctcaagtttggtgatgacttattagatacaacaccaaaagaacaatgctgaaagaagcacttg

SEQ ID NO: 2103 - DNA, 735 bp, Macaca Fascicularis
tctacatcaattgtaaatgtcaatttgattttaacgtttttttttttaatgtgacttttttatctaaaaagtaatccattacagttttctatgttttatacatttcaaaagggagggaaataccaaagcctaaataatggaatggatgcatttcaatttaacatatattctggctttagatcccgacattcactcctgtgcaaattacttaggtatgactaggctgattttaagctaataagtgaaggtacattcactccctcaagagaatcaatactcagaaggttagaaagttttctttatagaatttcaatcattccatctaaaaccttaaaatctctacaggactacacaacataaatactgccagtttataaacgattgcctatctgaatttttatacctaccactactttaatttatacatagttagcaaattagcaacccagtaagtacagttatcaaaaatactagcaaactacatccatatcgcttttggtgtcagattgtatctgtgcatctaaaaatattttaatactcaagtgctctcagaaaaaaaaaaaaaaatctgctttctcattagattactgaaatgctttaattcatactatgattttgttattagtgtgaattttaatgtagagaattcagtgtgctaagtgatatgccagtgcttcactacattcatttattaaaaaaaatcattcttgattatgcatgaaaacctgtttgtaa

SEQ ID NO: 2104 - DNA, 780 bp, Macaca Fascicularis
  misc_feature (1)...(780): n = A,T,C or G
cacataagagcagtnnnnnnnnnntacgctttctgagtgnnnnnnnnngttgccatctgcatggatgagtgaatgcttccatgcacgaggagacttttccaacactattcccaggtttcttgtgcaaaacttgtcatttggcccaggtcttcctggaaagtggagtacacgtcactgactagggtggcgtggtgtctttacccttaagtcttgttatctcagtgatgtgaagtcgatgattggagttataaaaagcatccttgctggttcttcacaggacactggaagccaccctgnnnnnnnnnnnnnnnggcccacacagtcttgatgatccctctctgtaatagccagctaacattaagagaagggggaaagagaagagagcagtagcttataggagagatgagatcttatttcattggcccatattttcccctgaccaagttacctgtaaacgggaatttgcaagggggtgctgtgatgataaccgctttctattgctgtaatgttcatataacctgggaaactgagagaaggggatgtgtaaataaaagcttaaacattttagtaatgtgttaaaatgccactctctcccttttcccttttttgccagatgatgattttttttatttttattttgtactttattggatgactgaagcgatgagtattgggttgggataggtgtgttgattttgagagtgcatgttaagaactgaaggggaactaactacttgagatgacttaagaagcatcccatgcaannnnactcacgctcag

SEQ ID NO: 2105 - DNA, 778 bp, Macaca Fascicularis
  misc_feature (1)...(778): n = A,T,C or G
cccaagggaagtgattaaaatttttnnncttctgnnnttgagagaatttctagatgtcctgggccacagtaaattaagatttttacgggggacagaaagttatactgaaatctttagagctcccttccaccgttaaaattatagatatatatatattttaaattataccttaagttctggggtacatgtgcagaatgtgcagatttgttacataggtttacatgtgccatggtggtttgctgcacctatcaacccatctacattaggtatttctcctaatgctccccctcctctagccccctacccctggacaggccccagtgtgtgatgttcccctccctgtgtccatatgttctcattgttcgactcccacttatgagtgagaacatgcggtgtttgcttttctgttcttgtgttagtttgttgagaatgatggtttccaggttaaaattatatatttttaaataaacgaaaactatgtttttaaaagagaacttttgagaagtatatagcaaaaccattaatttagactctgtgagattaggttgcatgaagaaggttttctgaatatttgaagaatggataaataaatgtattcgaaagtaataaaagtataatcctttaaaatataggaaaaataactaatgggtactaggcttaatactttaggatgaaataactctgtacaacaanntcnnnntgacacatgtttacatacgtnnnnnccgcnnnnntgtacnnnntgaaccttaaaannnannnntttaaagtaataata

SEQ ID NO: 2106 - DNA, 747 bp, Macaca Fascicularis
  misc_feature (1)...(747): n = A,T,C or G
cccacttccacagtacagactgtccccaacttaacaatggttcaccttcaaccatgtttcaactttacagttggtctgttggggtattaaatgaattttttacttatgatattttcgtttatgatgggtttatcaggaagtaaccccatggtaagttgcatatctgtatatttttatcactaattcttgacccaaaaataaaccagggcggcaaggaccaacccctaatccctccccagcggcaagcccttcttttcagagtgggcagagggttgcctatggtgggcactaggaatgaggtcccctgccttgatgtgtgtcctaggagaaaaagtcctacttttctggaccccctggtgcagcacctccnagagagtgtttctcccagggcctcctgagtgacaagggtcctgcctccctgtgcctcgtcctcaggctggttgtagcagaggatgggcaggtgccccagcacagactggggggtgctcacaacagggccacctcnnnnnnnnnnnnnnnnttgtccctggggtgtgcttggaccccacctgcttgctttttctcctgcccctcccctactctcactgtaatttatggaccctgcccacctgcgtgtcgtgtgtatgtcctgtgccttttctcactgttgtttgggggtgggagagggtggtttttcactgaaaagggggatacacctatggcttctttgntntnnntcagtcacccgtgtcccagacatnnnnanna

SEQ ID NO: 2107 - DNA, 2329 bp, Macaca Fascicularis
cctcgagcactgtcggccgtggcccagctgtgggaggacgagtgggaggtgctgctgatctccctgcagggcacagcgccattcctgcatgtgggggccctggcagcagtcaccgtgctctcctggattgtggcaggacagtttgcccgcgcagagcggacctcctcccaggtgaccattctctgtaccttcttcaccgtggtgtttgccctctacctggcccctctcaccatctcttctccctgcatcatggagaagaaggaccttggccccaagcctgccctcattggccaccgtggggcccccatgctggctccagagcacacgctcatgtccttccggaaggccctcgagcagaagttgtatgggctccaggctgacattaccatcagcctggacggcgtgcccttcctcatgcacgatgccagcctgcggcgcaccaccaacgtggaggaggagttcccagagctggcccgcaggcctgcctccatgctcaactggaccaccctgcagagactcaatgctggccagtggttcctgaagactgaccccttctggacagccagctccctgtcaccctccgatcacagagaggcccagaaccagtccatctgcagcctggcagagctcctggagctggccaagggcaatgccacactgctgctcaacctgcgtgacccaccccgggagcacccgtaccgcaacagtttcctcaacgtgactctggaggccgtgctgcactctggcttcccccagcaccaggtcatgtggctgcctagcaggcagaggcccctggtgcggaaggtggctcccggcttccagcagacatcgggctccaaggaggcggtcaccagcctgcggagaggccacatccaacggctgaacttgcgctacactcaggtgtcccgccaggagctcagggactatgcgtcctggaacctgagtgtgaacctctacacagtcaatgcaccgtggctcttctccctgctgtggtgtgcgggggtcccatccgtcacctctgacaactcccacaccctgtcccaggtgccttcccccctctggatcatgcccccggacgagtactgtctcatgtgggtcactgccgacctggtctccttcaccctcatcgtgggcatcttcgtgctccagaactatcacttgatcaggtggcgcctgggtggcatacgaagctacaaccctgagcagatcatgctgagcgctgcagtgcgccggaccagccgggacgtcagcatcatgaaggagaagctcattttctcagaaatcagcgatggtgtagaggtctccgatgtgctctccgtatgttcagacaacagttatgacacatatgccaacagcaccgccacccctgtgggcccccgagggggtggcagccgcgccaagaccctcacagagcggagtgggcgttagctgaagacatgtctcatccacctgtacctgacacagaagccaggggagcctaggagagctgatggaagcgtgtctgaactcggagtgctctggaagctggctccacagcctctttgtgggctccagccccttgtcagccacagcctctcttgagggggactcccgtgtctccctgaggcccagctggaccaggactccagcctctcagatgcccctgcaggcctggggctccttctgggtggtacggggcctagggcttgggcccctcttctgaggccctctcctatatcctgacttggaagctttgatgggtcatgggccatgccatgccccctgtggcaatggagggtgcggatgctcacctgtgccgtctgtcctcctatctgtgccccgaggcacttgaattctctgtttttatcctgccccaagggcctgggccgggcctctacccgaagcaactctgctcttcctgtcggtctcaaagcacaaggaggttcggcccaggaggaagccagctgcagtgtggagacacgtcctcctccccagtccacctcatgccaccaccaaccccctgtcccaggagcagacctgagccacattccccaggagcagctggagatggccagaagagtgagctcagggctactgggtcctatgctgaagtgtccagcagacctcagggcagaagagtcccctaacccaggagtccacagactgatttaacctcaggttcccacatcagtggccacagggcagggcccacctggtaaaagtgttctggacatggtcagggtgggtgtgtggctaagtaggcctgcacagagggaacccaaggggctcggccaatgtgattaaagctgccatcttgaaaaaaaaaaaaaaaaaggaaaaaaaaaaaaaa

SEQ ID NO: 2108 - DNA, 826 bp, Macaca Fascicularis
  misc_feature (1)...(826): n = A,T,C or G
ataactaaaaacattccagtaaatatatttttgactgtgtaagagaatgtgtagtaatttttttggcgtttggattatggaaatggaannnnnnnnnnnnnnnnnnnnnncagtatggcaccataaaactggacataataaagttattgaagagtgtcattggagtatttgaaaatgaccaatatatagctgccagtcatggtccagtctgttttcagttaaactccaataaagagagacaaggcagtcctaatgtgagtaaatnnnnnnnnnnnnnnnnnnnnnnnttaattttattttagttaatagcctctaacttccaactatctcatttaccaaaagtatgaaaagtagcaaaaccatctattaatactttgaattttatatctttgcatttcccgttcatccttgaggagatgtatgttgcacaatcaagttttgcatcagccaacaataatgagtagtagaaagtcaggaacctaggtgtatatatatatatatacaggataatcagtcagtcagtaaccagatgctagagagtgaccattaacctaagcctgtttttataataaaaaaatgtgttaactttaaaatatgccaacctccttgtgtcttttaaacaagtcagagtgaaaatatattgtcccctaaggtgtggggagaggaagctttataataaaattagtgattctgcagaaacttgtgcactggatatcttgagaatatgaatataaaactccctaaattaaaaatagggttaatagaaattaccagtatttaaatagggaaaaatgattttatgtttattttatttaagttttatttc

SEQ ID NO: 2109 - DNA, 1787 bp, Macaca Fascicularis
gaagaaccggggagacgagcggggaagcgatggggagaactggagagaagcccgtgacccggagcggcaggggtacctgcggggcggcgtgagccggcaaggcagccccggggtccttgccgggtggggcggaggaggaagggacacggcggtaggaacctccgtccggaagagagtgaggtttccaccccctccggtttatgttttaaattgagcctggcagagggggtcgcctggagcgcccttgggggacgttctccctcagagctgtaggacagggccgggcttcccctccgaagcgtgagtacagcgcgatcacttgctaagtggccccccgccccctaactccgccccacgtcaccccccagcatgtcgcttttccgttggaagagtttaacaaagggtttcctaaaaggattaaaaaaaaaaaaaaaaaaaaaaaaaaaagggtttcctgcactagttgcttttcggctagtgacgataccgaaaactaaaatgggtcccaggccctccccgccagcctctgcggaccggaaggaccaggaagcggagactcggggacgtcagcggagccggggcgcgggctctgggcttccccttccctgcaatgtagaagcggctctccaggaggggcccgagtctgggcccacgacgcgggcgcgccgggaggacatttaacattgacgagccggaggtggtggagactgtgcgcctcaggccccgggtgcacgtgggggcgccagtgccccgacggtggagcgccccgatccttgcagccgctggatggtagatccgcgcttcccaggcgaacgctacctgggagccttagcgatcgcgcgggctggagacgcgacgcgcccggagctgggtttcgatttttattttcccggttcctcctgcagcagatgcgtggaaaggcccggatggcggatttcctcccgtttcgggaccgcgcactgaacaaggatggagccgggatgggcccccagcccacggccccggtgaccttcccttcgcccttgagcgcgcggggcgggcgcgggtgctgcaggttggggcgctctgggtcccgccccgcccgccgcgagcgcctacgtgatgccgggcccgtagtctccttgcgcccaggccgggacatccgtctgccacgcactccccgagcccgcagcgtagcctccccaggcccagcaccccccgcgggagaccccagtggcagcgccagactccgccctgcagcccgacccccagcgcccctgggaagtgctctggcgttagcgttctagtaaaaggaccccccagcctcagcattcctcctgtagggttggattctcagagaaagaaaaggtgatgcagcagacgctgggattggagaaattaccagagtgaagtggaaatagtctggccagcgtgacttaaaccggcccggagatgtgcaagtaccagtggaaccgcctggggtcgggataggacccagagtggcttctcagtcaaaggccttcagaagcagagggaacatcttgagtgactttacccgggccgcgaaagacaagaaacctttggcacgggaagaggaaccgatctctggaagtcaccagggcgggtggaaggtcaggggttcaaggttattttggaatttaggtgctgtggttcctgcacggtggctcatgcttgtcattccagtgcattgggaggccaaggcaggaggatcgcttgagcccaggagttccagagcagcctggacaacatagtgagactctgtgtctacaaaaaaaaaaaaaaaaaaa

SEQ ID NO: 2110 - DNA, 2118 bp, Macaca Fascicularis
aaaaaaagttcgggatcgtcatttaccgggtggtgactgtcagcactttcgctgcctttaagtgggcgttaatcaggaataactctcaggttgcaaccacagggactgctgtgtgcatcaacttttgtatcattatgttgctgaacgtgctctatgaaaaagttgccctgcttctgacaaatttagaacagcctcgcacagagtctgagtgggagaacagcttcaccctgaaaatgtttctttttcagttcgtcaatctgaacagctccacattttacatcgcattcttcctcggaagatttacaggacacccaggtgcctacttgaggctgataaacaggtggagactagaagagtgccaccctagtggatgccttattgatctgtgtatgcaaatgggtattataatggtgctaaagcagacctggaataatttcatggaacttggctacccgttaattcagaattggtggactagaagaaaagtacgacaagaacatggacctgaaaggaaaataagtttcccacaatgggaaaaggactataaccttcagccgatgaatgcctacggactcttcgatgaatacttagaaatgattcttcagtttggattcacaactatctttgtggcagcttttcccctagcaccacttctggccttactgaataacataattgaaattcgacttgatgcttacaaatttgtcacacagtggaggagacctttagcttcaagggccaaagacataggaatttggtatggaattcttgaaggcattggaattctctctgttattacaaatgcatttgtcatagcgataacatctgactttatccctcgcttggtgtatgcctataagtatggaccttgtgcaggccaaggagaagctgggcaaaagtgcatggttggctatgtgaatgccagcttgtctgtatttcgaatttctgacttcgagaaccgatctgagcctgaatcagatggcagtgagttctcggggactcctcttaagtactgcagataccgggactaccgtgacccgcctcattcactggtgccctatggctacacactgcagttttggcatgtcctagctgctcgattagcttttatcattgtctttgagcacctcgtgttttgtataaagcacctcatttcatatctgatcccagacctcccaaaagacctaagggatcgaatgagaagagagaagtacttgattcaggagatgatgtatgaagcagaactggaacgtctccagaaggaacgaaaggagaggaagaagaatggaaaagcacaccacaacgagtggccgtgaccataaaatagtccctttccaggccaaggacctgaattctgtttacttctcctggctgtgcaaaagcacactcaagtgaatgactgaaaatgcaaccgcagtgcatgttacagatatcggcggccgcaggagggtcagcatccagtagaggactggcgttggagtcacactgctgtgaaatcacgttgcagtccagcacacaattgctatctatccatagaccattcttgaccaagcaagcatgcacatgtgggcagttacattctcaagtttttaaaatcaaggggaacttgtatactgggcctgtttttcagcctgtttgctaccttttttgcattctatcctatgtgaattttacagacacagctaaaaagggtatttagacacatggacacacattcctagaatgtcatcatatggtcctaattccatgtcaccaacaacacagacaagaccctgtttacaactttttctttccttttttttttaattttagacctttctgagaagattattctatatgacatatctatagctatgtgtatggccatagatgtatttctgtgtgtacatatgtatagtcatgtattcctgcatatgtacatacaaatacagagatatataaagtacatagaaactccttacttgtaaatagccaaaaagtactgacatgaatgacgaattttcacatttaaatagtcatcaacatgaagccatgattaatgcttgtataatgtgatgcaataaaatttaaaataaatttatgcacatggaaaaaaaaaaaaaaaaaaaaaaaaaaaaa

SEQ ID NO: 2111 - DNA, 772 bp, Macaca Fascicularis
  misc_feature (1)...(772): n = A,T,C or G
ctcctgccagttnnnnntcaagctccttcccctagctggcatggtggcacgtgcctgtgtcccagcgactcgggaggctgaggagggaggatcgccagagcccaggagtttgaggctgcagtgagctctaatggtgcctctgcacttcatcctaggcaacagagcaagacgctgtttaaaaaagaaaaaaatccttccctagagctagaatcctaaagctgcagagctagccaaggcctcactggtttccttgtccttggggtgcctttcctgaatctttgggggtgaagggagtattgctcccagtccagaggcctgattctgttcagaccaggttctcaagacaggagtccctttgttcctccccattaaacggggtttgtcagaagcaagaacagcccctctccccagtcacagcctgaagggaggccccgagggcttcctccttcccccacctgctccttaccttctctgccctgctttttagaactgcagctcactgttttaagggattgggggagggagcctggggacacaaaccttttatacaatacaaagctttgcttttttttttttcttttttcctttattttcctttttggttgtcttctctgaatggttgaagacccctctgctgagggaggctggggattgtgggacaaggtcccttggtgctgatggcctgaaggggcttgagctgtgggcagatgcagttnnnnnngggcttggggaacctctcatgttgctgtgtcctggtgagcacgcccgacca

SEQ ID NO: 2112 - DNA, 738 bp, Macaca Fascicularis
  misc_feature (1)...(738): n = A,T,C or G
ggcccagcaaccccccttcaccccaacttctggccagattccaggccagcactcntatcnnnnngggaggcgtctacaggggcagcccctggcactgccccaggagtgccttggatctgggtaggcccatccctcagctggctgcagactgttctgagtggtattcacacgtacccactctcaggttgtcctgtggctattagcttctctcctagacagaggatctcaggcttcccaggaacccctgggccccttccagtcccctggcctcttccttgagccatctgaatccaggactgttccccagaagtgcctcttgccttctcagggtgaagaggtcagctgtcctcctgtcatcttccccaccctgtccccagcccctaaacaagatgcttcttggttaaggccctctggaagggaaaggctacggggcatgtgcctcatcacaccatcctggaggcacaaggcctggctgactgcgagcgcacggggccgcctgaggactgcacaccgggcccacacctctcctgcccctccctcctgagtcctgggggtgggaggatttgagggagctcactgcctacctggcctggggctgtcttgcccacacggtatgagtgctctccctgagtgcctgtgtagctggggacggggattgcaaggggcagatgaaggacaagccccactggagtggggttctgtgggtggggaggcagggacaagggaaggaaagcaact

SEQ ID NO: 2113 - DNA, 777 bp, Macaca Fascicularis
cgagcatgagatgagcgctggcgcggagaagatgccacgcaacagcggctggcagagctcaagcacgagctgagccagtggatggacgtgctggagattgaccgcgtgctgcggcagacgggccagcccgaggatgaccaggcctccacctccaccgcctctgccaagtgaagtaaataagcaagacttagccccattttggcagataaggaaacaggattgaggtggcccagtgacttgtcgaggccacacggctagctggagacttcgttggagctgcagtcagacctctccactgggtacagagttctcacccagcatctgccaccctttgtggcacccggggccagtgctagactcggatccagtaaaaaagcaaaaggaaagggtgtccccagagctgtcctcaaggagctggcgtcgcctggtggagtttcagcctcttggtgccctggcttgcccttggggagacggtccttgaagtgaagtgaccaggactgggaaatggcaaagatcgaagaggggaggcagagactggagaagctaaaccaagcaacagcctgagatcaagcaccgagtgtggagacacattctggccaaagatgtgtctccttgtcaggtacatctgggagcggggccatcccatgctgtgtgccctctgagcctgggggagctgtctgtgctgcggctgagcgtgcggtctgggcagtctggtccctactacagagacaacttgttgacaaccttgggcacaagttaggaaatgtagggagcggg

SEQ ID NO: 2114 - DNA, 719 bp, Macaca Fascicularis
  misc_feature (1)...(719): n = A,T,C or G
tagcagatacatnnngtcatatgactaagttctggcatnnncatggaataagaagtgctgagtgatggaaaaaaagaagaagaagaagaagaaaaaaaaccaagtgctgagtggtgcttctgggacgtttccttaaacttaaaggcttaaaaggaagcaggtgggctcatcttctgttcctgctggaacatggatgtggtagctagagctccatccagcaggattcttggacttcaaagtaactttggaaatagaagccaagaatggcagagcagcaatatagaagactgggtcttgatactgtgagattaccctggactgctatgagtaaagggttaataaaaccctttcatttttcccgtctaaatgacctcgaatttcgctttcagtactgtttctctggaaacctactaggcaaggnnnnnnnnnnnnnnnnnntgtaatattaggcaatattgtttatgattaaaaatgagcccttagctgggcgcggtggttcacagttgtaatcccagcacttggggaggccnnnnnnnnnnnngcctgtagtcccagcgcttcgggaggccaaagcaggaggactgcttaaactaggagttcaagaccacgcctgggcaagagagcaagacctcatctctattaaaaaaagtataaagaaataaaatattcccgagatttgtaatnnnnnnnnnagaaagtgatcnannnnnatagtgtag

SEQ ID NO: 2115 - DNA, 735 bp, Macaca Fascicularis
  misc_feature (1)...(735): n = A,T,C or G
ttgtgactnnttnnnacattagaatataactccaagnnntcagcagtttttgtctttttggctcattgctacacccccactgccnnnnnnnnnnnnnnnnnattacaggcatttgataaatatctgttgctcacccaagcattcaacccctatttattcggggcctactactatattccaggctgcatgttacaaaataatcactgccctctacgagcttatagtcttgagaaggagacaaataaatacagtataaagataagtaaacctatttcaggtggtgatgaatgccacaaagaaaataaaattataagatgttatagagggactgagtgtggaatactacgttatatagagtgcctggggaaggcatctctgtgaaagnnnnnnnnnnnnnnnnnaataagaaggagacagccatgggaagttttggaggaagagcattccaggcacagggtcaaacaagttaaaggaacctgggttatgagtgagctcacattaaaagtttatgtattgtgtcatctacttgtatccnnnnnnnnnnnnnnnnnnnnnnnnnnnnnnnnnnnnnnnnnnnnnnnnnnnnnnnnnnnnnnnnnnnnnnnnnnnnnnnnnnnnnnnnnnnnnnnnnnnnnnnnnnnnnnnnnnnnnnnnnnnnnnnnnncagctagtctacnnnnnnnnnnnnnnnnnnnnntccttatagaagccaggtagtgcatgagagatataata

SEQ ID NO: 2116 - DNA, 1140 bp, Macaca Fascicularis
aaaaagaaaagctggaggagggtggcttcgcagccagggtaaacagcacagccagatggctgccatcatttctcgccactccagtcgccctcctgcctccaagtcacaggcgggcttcacttcgcaccatgtcccaaagggagaaactaagctgaggagcagacagcagaacaaaagttcaagtccgacgttctgtgccttcaggcaacagccatgaaacaagaggtcacagctgtggaatggcttgagccctacctctcatcacagatttcgttatgctccattggtagaaacaaagggaaggttttgcgtctcctgtttttaaggttgagagagagccactagaaggggacggagcttaaacaaggccccctctggcctttctcctgtgtaggtgatgctggcacagtggccccatccaccgggtgtccctgtgccctgggctcctggaggaaccctgctgaccagaggagctccccacaaagcccacactcagcacttttcacccccttcccttcccctttcacttcctaacactatttggggctgcgtctgcctcctccaaggacacagcgttcctcgctcatctgggcgtcccggggtgccaggcacgatggcctgtgatgggggctcactctagtcgctcacctttgtatccacagggaaatggggaagctctgcaagcctgggccagggcacagcttggacaatctgtcaccagtgtgcagagtcagccgagaaacacaatcctgcccaggctttctgtggctgcggccaagagggtagggctgctgggctgaaggctgtcaagtgaccgggcaaaaaaaagccagcctcagcctgcatggctgcagcagtccatgctgcaacagaataattcctcttagtgggaacaggcctcccacgcttatcacaaagcaccggctgcctttccaacggggctggaggagctttacaaaaagaaaaggaagttgcccttacatcttggggaactttaaagacacctagaaaatgaaatcttggattttactttcctgaaaggctgaggttgagcataattctctgcctttgttccccttctttgtcttggttaaatgttcctggccatactgtaaaaaaaaaaaaaaaaaaaaaaaaaaa

SEQ ID NO: 2117 - DNA, 734 bp, Macaca Fascicularis
ggccatcagagtctaaaccacggtggccaactcctcttacagcagttcagatgcctgtaactttacaacctcaaatgcaggttagacaagtacaaactccaagagaatatcaaatagagaaagatagagtctctgtcatggcaatgccaatccaaatacagtatccacaataacagtcggtagaaaataagacccaactgccagtagcctatcaatactggccgccagctgaacttcagtatcggctgcccccagaaaatcagtatggacagccaggaatgtttccagcaccacagggcagggctctacagcctcagcgcccactatgagacttaatcctgtatcaccgccttagtggacagggtagtgcattatataagattattgatgaggcaggaaaacaaggagatattgaggtgtggcagttatcattagtattagtattaggtacaatctggagcaggggcccaagagggagagcctctcgtagctgaagccagatatgagtccttttctataaaaatgctaaaaggaatgaaagagggagtaaaacagtatggacccaactctccttacgtgagaacattattagattccattgctcatggacatagactcattccttatgattgggagattctggcaaaatcatcactctcaccctctcattttttacaatttaagagttggtggattgatggggcacaagaacaggtccgaagaaatagggctgc

SEQ ID NO: 2118 - DNA, 752 bp, Macaca Fascicularis
  misc_feature (1)...(752): n = A,T,C or G
gagaacagaaatgtatgtctcacagttctggagactagaaatccaagatgtcagcaggggtgtttnnnnctgagggcattnacggaaagatctattccagggctctttccttggctttgcagatggccgtcttctctctgtgtctttcccatgaacgtatctgtgtccatatttctccttcttataacaacaccagtgatattagattagggcccacctgaatgaccccattttaatttgattatcttttaaagaacctatctccaaataaggtcataatttaaggtactgagggttaggacttcaacatatagattctgggggacaaaattcaacacatagcagatgggaacatatttaataactaaggttctaggcaaaggtctgaaaagaaactctttgtagtaaacatgctagcatagacaagttccttgtgttttccaacaggtctgcttcagaatcaatccttacagcttcaagaacaggagaaactcttaacaaagaaaggtcagcaaatttattaaccacaaattctaagatactgctcttcccttacctgcctagaggcagcgggatggactacatgacctcctggagtcccacccagttctgagagtctgttaagtccaggatgtgtgggagctttttaaggactgatcattggctctgaggacacttcaactagttagccttctatcctgaggtatataaactgtgaaaaaggatttctattctctctgaaagcacatgtt

SEQ ID NO: 2119 - DNA, 1956 bp, Macaca Fascicularis
aaaaaagtaagcaggacctcccagggatggataacaaaatttcgccggaggcccaagtggcggagctggaacttgacgccgtgatcggcttcaatggacatgtgcccactggtctcaaatgccatcctgaccaggagcatctgatttttcctcttggttgcacaatcctcattcaggcaataaatactcaagagcagaacttcctacagggtcacggcaacaacgtctcctgcttggccatctccaggtccggacggtacatcgcctctggacaagtcacattcatggggttcaaggcagatatcattttgtgggattataagaaaagagagctgcttgctcggctgtcccttcacaagggcaaaattgaagctctggccttttctccaaatgatttgtacttggtatcactaggaggcccagatgacggaagtgtggtggtgtggagcatagccaagagagatgccatctgcggcagccctgcagccggcctcaatgttgggaatgccaccaatgtaatcttctccaggtgccgcgatgagatgtttgtgactgctggaaatgggacaattcgagtatgggaactggatcttccaaatagaaaaatctggccaactgagtgccaaacaggacagatgaagagaatagtcatgagtattggaatggccgacgatgatagctttttctaccttggcaccacgactggagatattctaaaaatgaaccccaggactaaactgctgacagatgcagggcctgcgaaggacaaattcagtttgggagtgtcagctatcaggtgcctgaagatggggggtttgttggtgggctctggagccggactcctggtcttctgtaaaagccctagctacaaacccatcaagaagattcagtcgcaaggcggcatcacttctatcacactgcgaggagaaggacaccagtttttcgtaggaacagaagaatcgcacatttatcgtgtcagcttcacggatttcaaagagacactcatagcaacttgtcactttgaagctgtggaggatattgtctttccatttggcactgctgagctatttgcaacctgtgccaagaaggacatcagggtgtggcacacatcatccaacagtgctcacaggatcggcgtcaccgccatcgccaccaccagtgactgtaaaagggtcatcagtggcggtggggaaggggaggtgagggtatggcagataggctgtcagacccagaagctggaggaggccctgaaggaacacaagtcctcagtctcctgcattagggtgaagaagaacaacgaggagtgtgtcaccgccagcaccgatgggacttgtatcatttgggaccttgtgcgtctcaggaggaatcagatgatactagccaacaccttattccagtgtgtgtgctatcaccccgaggagttccagatcatcaccagcggaacagacagaaagattgcttactgggaagtatttgatgggacagtaatcagagaattggaaggttccctgtctgggtcgataaatggcatggatatcacacaggaaggggtgcactttgtcacaggtggaaatgaccatctggtcaaagtttgggattataatgagggtgaagtgactcacgttggggtgggacacagtggcaacatcacacgcatccgcataagtccaggaaatcaatatatcgttagcgtaagtgccgacggggccattttgcgatggaagtacccatacacctcttgaaactgacggcgttgcacacagtcctgttgaagaccgattttagataactccaacactcgtcttcatttctcacagctctgtttttgttcttgagtccaaacttttttttctttatagaatgcattttgtattcctacattgtatattaaaattgaaatatgttcaaaaaaaaaaaaaaaaaaaaaaaaaaaaaaaaaaaaaaaaaaaaaaaaaa

SEQ ID NO: 2120 - DNA, 1732 bp, Macaca Fascicularis
cacttcgtgcccacctggtgaggggaggctctgccccaggccgcggccttgagctcagagggggtaccctggcgggcagggaccgtccaggcccacgggctgcagcagcagtcgcgggggtccacggcggcctgagcacgcgcccgccgcaggtacttcctgtggcggctcctggcgctggcgggcggccccggcttccgcgcggagccgtaccactggccgctgctggtcttcctgctgcccgcctgcctctaccccttcgcgtcgtgctgcgcgcacaccttcagctccatgtcgccccgcgcgcgccacatctgctacttcctggactacggcgcgctcagcctctacagcctgggctgcgccttcccctatgccgcctactccatgccggcctcctggctgcacggccgcctgcaccagttctttgtgcctgccgccgcactcaactccttcttgtgcaccggcctctcctgctactcccgtttcctggagctggaaagccctgcgctcagtaaggttctccgcacagcagccttcgcctatcccttcctgttcgacaacctcccactcttttatcggctcgggctgtgctggggcaggggccacagctgtgggcaggaggtcctgagcaccagccatggctaccacctcttctgtgcgctgctcactggcttcctcttcgcctcccacctgcctgaaaggctggcaccaggacgctttgactacatcggccacagccaccagctattccacatctgtgcagtgctgggcacccacttccagctggaggcagtgctggctgatatgggatcgcgcagagcctggctggccacacaggaacctgccctgggcctggcaggcacagtggccacactggtcttggctgtagccgggaacctactcatcattgctgctttcacggcctccctgcttcgggcccccggtacatgccctctgctgcagggtggcccactggaggggggtactcaggccaaacaacagtgaagccccatccctgaccctgccctggagggggcagaggccaggcccccgtgctgaggaggagcccagagttgggcctaatcaggtggggacacatctcagcttggaaccaacaggggctgaggagagagggcacaggagagggcagaggagaggaggggtgtctagggggaatggcagagtgtgagcgggactgtgagggggctcttgatgggaatagaggaagtgctgagggtcttgagaggggagatgcatgcgtgtccaggctgaagatgcccccacactctgtcaaaggttggggccaggaggtgttggggtcctttcatctggctccatttctggtgctcctgaagtctctgctcagcacagggaagaactaacacgactaacctaggcctaccccaaatgcttcttgctaaccaggccgagaggccacacacttgccccccatccccacaaaccaggtaatgccagtttgccagcagctatttgcctagagagatgagtctgtcctggtcataactgtgtactcaaggtgtccaggcttttgggggtgggcctatctgggtgcattatggatggttcagtggattgaggtgtggggaggagggtcctaggctcgaggggggatccctagttaagactttaggaagccaccttcaatgttttctggaacaaggcaggtacaaataaaaaaataaaactttaaaaaaaaaaaaaaaaaaaa

SEQ ID NO: 2121 - DNA, 2457 bp, Macaca Fascicularis
aagtgaacatttagcacctttgatcaccaccccccaaagccagccctagggatggaggtccttgcctgaaaagaatgtggtacatctactttgagcatgtgcttctaactgttcaccaggagtggagctgtctgttcggagaggaaaggacatcagtttactattcattaagcttttaacttttaagagaaagaaatagacactgccagaagattccactaggcagtatggcccagtatcatatctccaaaaagcagctaaaggcagaggcaatttcagaacctcatgaagtctcagttactgaaaattattttcagacccaatggcttatttggtctttttctgcaagtttcaggaaaatatacatgcaagaaggcaaaccaaacttactggacatgggctctttgatgatcaaaccaattcaacgtgtgatgaaataccccctattactatgcgaacttcggaattccacccctccctctcacccagattacagagcactggatgatgcttttgctgctgtgaaggacattaatgttaacatcaatgaacttaaaagaaggaaagatttagttctaaaatacaagaagaatgacgaggatgaatcacttaaagacaaattgtctagactaaatattcattcaattagcaagaaatcaaaaagagtgacaaatcatttgaagattctgaccagaggagaatcacaggttaaagacaatacctttaacagagaagaaaagctgtttagagctttagaaaagactgtgaggctttgtgtgaagaacatttcactctgtcttcaacacatacaggatgccatgcccctggctctgcagagtgtaatggaccttcaggagatttcatacaacaaagacgatgagatgggctattctgagaccctaagtaatgccttaaattcgtgtcatgactttgcatctcacttacagagactcatcctgacgcccttgtcagccctgctgtccttattcccagggcctcacaagctcatccagaaacgctatgacaaactgctggattgcaacagctacctgcagcgatcagcaggagaggagtcagacttggccaaaaaggagtatgaggccctcaatgcccagcttgtggaggagctccaggcgttcaaccaggctgctcggaagattctgttgaactgtctgtgcagctttatcaccctccttagggacctgatgctcgtggcacagcaggcttactccacacttgtgccggtgccactgttggtttcaagcatttctgagattcagaatcaagtactagaagaggtccaaaatttgaattgtgtgaaagaaaacagtgccacctttattgagaggaaactcagttttgaaaagaagaagcctgtgcagattctgccagaaatgccacatcaaactgacattcatcgctccgaacttctatccacatatagtgcagaggaactctatcaagctaagcgcaagtgcaatgctacacaagaatatgacatcaatcttctggaaggagagttggtggctgtgatagaacagaaagatccactggggagtacaagcaggtggcttgtggacacaggaaatgtgaaaggatatgtttattcctccttcctaaaaccctacaatccagcaaaaatgcagaaagtggatactgagaacaggttctgtgatgatgctgacagttttcaagaagtagatgaacagattttctatgcagttcacgcttttcaagcacggagtgaccatgaactcagccttcaggaatatcagagagttcatatacttaggttttgtgacctaagtggcaataaagagtggtggttagctgaagctcaagggcagaaaggatatgtgcccgctaactaccttggaaagatgacttatgcttaagaaaataagagtttgacttttattttccagcaagttattgatcgactacctcataaaactgacattacaaaactttggaccagaaagcaagaaacctccaaactacagaaactgatactctactgggttttcaggaatactgtacttcctaacagggttattgcaagaatgtattataaaggatacatgttgaaagaaatactaagccaacagaaatagcaaagcaaatgacccaagcttcaactatcaactacttaaaagtgaagatcttttgaaagagtacttatatccttctatcatcaagaaaggttggatccaaaggtttttcaatttactttttttttttactgtatgatgtattttgcctcaaatgtttttgtttttcatattgctctcttgcaaatgcatacatgttcatatacatacatataaaccatatatattatgtagctttatacacatatgtggataatatgaattacacacctatatgtgtaaaccagagtatacatcaaatatacataataggaatatatcaccaacaaaaaaaaaaaaaaaaaaa

SEQ ID NO: 2122 - DNA, 763 bp, Macaca Fascicularis
  misc_feature (1)...(763): n = A,T,C or G
aaaacaaaaaccccnaganaaaatgannnnnnnntcagcccttggcttctgcttcaaaccctcaagaggggaagcaactccatgtgcctggggttcccaagggannnnnnnnnnnnnnnnggcccgcagagcctggcgttggtccccagcattgcagtatggcgtggtgtttgtaggctgtggggtccggctgtgtggccaaggtgaatagcacaggtcagggtgtgtgtcacaccccatgcacctcagggccaagcgggggcatggctggcctttcaggtccaggccagtgggcctggtagcacatgtctgtcctcaagagcaggggccagatgattttcctccctggtttgcagctgttttcaaagcccccgagtatcgctcttttccactccaagatgccctcataaaccaatgnnnnnnnnnnnnnggacttctatcaatggtcctccaatcagtccttattatcctagcttgctgaggggcagggagaggccctcttcctctgggcagcgctatctagataggtaagtgggggcggggaagggtgcatagctgttttagctgagggacgtggtgccgacgtccccaaacctagctaggctaagtcaagatnnnnnnnnnnnnnnnnnnnnnnnnnnnnnnnnnnnnnnnnnnnnttaccttgtggatgctagtgctgtagagttcactgttgtacacagtctgttttctatttgttaagaaaaactacagcatcattgcataattcttgatggtaata

SEQ ID NO: 2123 - DNA, 752 bp, Macaca Fascicularis
  misc_feature (1)...(752): n = A,T,C or G
gagcgtgnnaantgctatgtcattaatcatagttttagtgcctcagtgacaaacntnnnagatcatttttcttcttctgacatgaatgcagatttgagattggccctataatatcacccttgcatttctcgatgcgttcttaaatgggagcaaatgggatgggccccaactcactcactggaaatccatactccgggtgcctcatttcctctgcccaggagcttgtagcctgggcacagctatatgaggagggcccatttgcatgccgctatcacggatgtcttagtggaaggaagtttgaggacaaccacaactctagaagtccaggttctggattcactttgcagactctagcagtacctgcctccattccctgcccactcaagctnnnnnnnnnnnnnnnnnnnnnnnnnnnaatatccccaaacattgtcatccccactgggatcctccacatgagtgtgggctggaaatgttccagggtcacactgaggcaggacattgaggtatttgccaatgcctgttgccccatggaaggctgaagtatggatgcacctgatctgggaatgcaacccaggtcagactccacatttctgcaacaaagcatcacctgcaatgactcttttcatgtcaatgggtcaaaggacagaaccagcttccatgttttcagctcactannnnnnnnnnnnntcccnnnnnnnnnnnnnnnnnggagagtttgatctaacctgaagcctaaaggaatcaatgta

SEQ ID NO: 2124 - DNA, 764 bp, Macaca Fascicularis
  misc_feature (1)...(764): n = A,T,C or G
tgggtatgagtggagggaaggnntgggaaaggggagagccttgacttccatctaggtttcttttatctggagaaaaagaacattttttaactnnnnnnnnnnnnnnnnnnnnnnncaagctaacttcccannnnnnnnnnnnnnnnacaagtaaggnnnnnnnnnnnnnnnnnnacacttgcttcccttgggacaagtcccagaagaactatctgaagcaccaaagctccccagcccagcctggtggcagaggacggaggcggcaccaacttgccaaagggaattgggagctaccttctcactctggaagtaatttagtgaagannnnnnnnnnnnnnnnnnnnnnnnnnnnnnnnnnnnagttacagatgccttaaagactttctttggaagatcattgcctgtacaattccttttttgtgtggcataaataatatattaacctgttacaactgacaacattggtttcctgcagctagggagtcttgagttgagactgctggccttgatgacttgccctttttggcagacgtgcggaggtgnnnnnnnnnnnnnnnnnnnnnnnnnnnnnnnnnnnnnnnnnnnnnnnnnnnnnnnnnnnnnnnacatgtgggttggtcccctggcttccaacccattcggggcggtgctcagtgtggggtgatgggatcatagaggaccatnnnnnnnnnnnnnnnnnnnnnnnnngagtctgtgtaatggaatgtatttttcaaatactgatannnttgcattttctgtaa

SEQ ID NO: 2125 - DNA, 794 bp, Macaca Fascicularis
  misc_feature (1)...(794): n = A,T,C or G
gctgcaggacctgggcgagaaacttcannnctgctgagccctcgttcccccatgtgtaaaatgggacaacacaacctacctcacagggttgtcgtggggatgctgcctgacacataccctgtccataccctgtcatgatttgctctctgcttcttccctgggacagggcctagaattggaggcagagaaccttcctatagaaagtcttcatgtgtcctaggacttggctgtcatagagtggtaccttagacagtgggtgtgactcactttgaggagtcaccctccagcatttggggttgggttggccccactccaggctggagctccctgagggagcctgcactccctgctcccagtccccgctgttggtgcagggatgcagcctgcagctggtgtccttgttctgggactgctgctgccaccccaggaggccccaggcctgtcctcaaatgacatcagtgcttcaaactgcctcccccactcctggcattatnnnnnnnnnnnnnnnttttctagaagctaagcagctgctgggactcagggactgatgcaggtgggctgagtggcagctcagtcctagaaggtctgaagatctggactgaggatcctgctgctccccaagctagagcccatcagccaggcctgctgtgagccacctgcctgcggagtgctgagctgaaccaaaggctggcaagctctgggccttatttaagggattgtgatgggccctggaggcagcccattaaagtatttggcttgtttttggaaaaaaaaaaaaaaaaaaaaaaaaaagg

SEQ ID NO: 2126 - DNA, 709 bp, Macaca Fascicularis
  misc_feature (1)...(709): n = A,T,C or G
caatgtgannnangtgttgctttcatatgctgctttctgtgggctgcttggcatactnnnttgatgcaccagagatggaccatctcccaacaactacagctactctgaaccaaacagttgctgcagccaagtccagctaatgaggaaagactctcttcagataccctctgcttgctgaagtttttcttgacttctccagttctcttttgttttttggagcatggttctttgggaagtggcatccactgcaggaaagcagaatgagcagagccagcagaactgatggagtggcacaaactcccagtgtctggatggggccatactggtgcctaatcacccgtttaacaagcagaaattaaatgttgctcagcacatgtgtctttcagctcttctttttcacacatggatggtcattgcgagcatgtgatgattggactgaaatgccggggaatggattaggcatgctcagtgccatccctttgccacccacgtcaaatgacatgcttcactgtggtaccttaatacccgaaacagacccatgctaaattctgatgtcctctctctgaattatgtacagactacctgggggnnnnnnnnnnnnnnnnnnnnnnnnnnnnnnnnnnnnnnnnnnnnnnnnnnnnnnnngtggagattaactgggagcttgaaaatttgtctttggtaacctgatactggacagctgaactaa

SEQ ID NO: 2127 - DNA, 679 bp, Macaca Fascicularis
  misc_feature (1)...(679): n = A,T,C or G
ataaaaagaaatgccaaactgatgtatcagtggttcttgnnnagaacaagttttcaaagcataaaaagagggtgagagaaataacatatttattgattcacataagtatgtttttcttcattcttaatcatctggagaaactcacttgtcattaatttgttttgggctagattttcaaacttaccaaattgctttagaaaagcaatttgataggctttccaacttaactaaattttttattgtaattcttggatagtacttttgtctttttcaattcatttgtctttttcaatatagtttttgttaaggcaaatgtcttccgttaatatccaaatattgctaataaacggtagaagtgctttggaaattaaaattatctcgctgttggttagacttaagactgttaatcttcagccaaatacccacatatggatcaaattattttattttttgttgtttactctatccccaacaacatttttagtttaagttattgtagagattttttttgttggtggtaattttttattttgctccaaaataataaggtgcaaagctattttatgcttaacttgctctgtcaaaacagctatgcattggagttggaattaatgcaaattttgttccagagttggattacatgcagagtcatatatagccaaaacttctcttatcaaac

SEQ ID NO: 2128 - DNA, 2011 bp, Macaca Fascicularis
  misc_feature (1)...(2011): n = A,T,C or G
tagccaggcatggtgtactcctgtagtcccagccacttgggaggctgagacaggaggatccctagggcccaagaattcacagtggcagtgagctctgatcgtgctactacattccagcctgggtgacaaagctagaccctgtctctaaaaaagaaacaagaacacaagacagtaataaaagccatttataatgttccaactcctatattgggattacacatatcaccataaaaccaaagattcagcattaacataagcaagaaaaagaaaataaactacttcatttgaaaacacaagagggaactaagaactgtgtgaagaggacaaattatgacctctgaggcagtctaaaaaagctatttatagtattaaaatgaagtttaagagcaggagcatattttcacttccatttggtccaggaacacccatgatattatttatagccttcacaagtgataaatttctgaaaaggtgagtgcaacgcacttgatgtaaatcagtcttttgctaaaaacattatgtggttaaccatgaagttatatttaggtctcttaccattgatagatctctgttgttattcttcagtttctcttcttgtctctctgcaatgaattaatgagatggttaatacatacaatgctgagcacaaagcagctgttaaataaactgtcactggttggtgattacaaaagtactctatctcaatatcatttaataagatgatgaaaacaccggggatagtatacattttgtactcagaagattcaaattcagcagagcaccaaaatatttcaatttaaataaatacaatctttagagtttttttgaaattacctctggcattaaatgtcttaactctgtacattaatatatatgcttatgttacaccaatgggaattgctagttaatttgtaaatacaatgattgtacttagatgtctcaaattagttatccttctcttaaattttctcccttttttcaatttctctaaaatggcatatagtctaaaattataagccagttgataggatgaacttaaaattcaggttctagctgggcaatgccagcactctgggaggctgagatgaacaccacttgagaccaggtgttcaagaccatcctgggtaacatagcaagaccctgtctctacaaaaaatttacaaattagccaaccatgatggtatgcccctgtagtcccagctactgggaggctacagtgggaggattacttgagcccaggagtttgaggctgcactgggccatgaacgcatcactgtgctccaccctgggcgacagggtaagactctgtcttaaaataaaaaaaacaaaaaactatgcattctctaagtagtgaacttttagaatacaacatctatgaaatttgagaaaatttcatggaaagaataatctggaaatatgcagaagatacatttatatttagaatgatttattttccaaggtgactagcaaaagggaaaattaaaagtcagaaaaggaatactccaaaaatggagctacatttcttgtggctattggaataaactagcagcaatgatgacatccatctgaccacagagtcagtagaccttcagccaatccaaataacacagaaaacggcctagaatgaatgtataaattcagggccccaaatatattaaatttcaaaaatttcctctcatatttaaatccaggtcatgaagaaaaaaggccaggtgtggtagcccacatctgcnnnnnnnnnnnnnnnnnnnnnnnnnnnnnnnnnnnnnnnnnnnnnnnnnnnnnnnnnnnnnnnnnnnnnnnnnnnnnnnnnnnnnnnnnnnnnnnnnnnnnnnnnnnnnnnnnnnnnnnnnnnnnnnnnntgagttattcaaggaagctgaggcaagaggagttaagggttgcagtgagccatgaacatggcactgtacttcagcctgggctgacagagagtaaccctgcctcaaaaacaaacacaaaacaaaacaaaactaaaaaaaaaaaaaaaaaa

SEQ ID NO: 2129 - DNA, 681 bp, Macaca Fascicularis
  misc_feature (1)...(681): n = A,T,C or G
attggctcttccactnnnnnnnnnnnnnngtggctgagctcatgcagtttggagaccgggagttctaccgggactggtggaactccgagtctgtcacctacttnnnnnnnnnnnnnnncatccctgtgcacaagtnnnnnnnnnnnnnnnnnnnnaagcccatgcttcgacggnnnnnnnnnnnnnnnnnnnncaggacaggggtgttcnnnnnnnnnnnnnnnnnnnnnnnnnnnnnnnnnnnnnnnnnnnnnnnnnnnnnnnnnnnnnnnnnnnnnnnnnnnnnnnnnnnnnnnnnnnnnnnnnnnnnnnnnnnnnnnnnnnnnnnnnnnnnnnnnnnnnnnnnnnnnnnnnnnnnnnnnnnnnnnnnnnnnnnacagccaatagccgtcctcatgtacgtccatgactnnnnnnnnnncaactatgaggccccggtggcaggggcctgagctgcacccaagggcctggcttctcactgccacctcacccccgctgccagagtccgcctctcctcctgggcctcgagtgctggggatgggcctggctgcacagcaccctcctcctgtcccagggaggcctctctgcccctatggggctctgtcctgcacccctcagggatggcgacagnnnnnnnnnnnnnnnnnnnnnnnnnntgggagtnnnnnnnaccctgccccg

SEQ ID NO: 2130 - DNA, 701 bp, Macaca Fascicularis
  misc_feature (1)...(701): n = A,T,C or G
tgtttagagaaagaaatgtctgagaaatagttccattgatttcttnnnnnnnnnnnnnnnnnaattatttaacagatagtcctctgagatacaaataaggaatatttagacacaaatccttgtcatatagaaacagatatacccaaaatgacaaattgtttnnnnnnnnnnnnnnnncattgttaacactgataccactacatagtacatgtgaaaacagaagttggagagaagaatgtttttttcacaattgaatcgctgcatttctcaaactttgggatctatgaaagcggggagagggaacctgaatatgaattatgagcacaaatttgaagaaaagaaaacaaagaaccattatctaatcacgctttgaaagtcctgcatgtttgccttttattttagtgttnnnnnnnnnnnnnnnnnnnnnnnnnaatttcttccccaaacacttgaatcttggtcattggtatgtaatccactctctagagtccagtgtactttannnnnnntctgagtccggtacgtgtagcacactactgttttattaatgtaaaaaccttgtaaatgaatttcagatgggtgatttaagtgagttacaagtcacaaaactttgctattcatagttaaccaaatagaattgggttttttttcagggtgtggtgtaaataaagaaannnnnnnnnnnnnnnnnnataactgct

SEQ ID NO: 2131 - DNA, 915 bp, Macaca Fascicularis
atggccgactaccataacaactataaaaagaatgatgagttggagtttgtccgaactggctatgggaaggatatggtaaaagttctccatattcagcgagatggaaaatatcacagcattaaagaggtggcaacttcagtgcaacttactctgagttccaaaaaagattacctgcatggagataattcagatatcatccctacagacaccatcaagaacacagttcatgtcttggcaaagtttaagggaatcaaaagcatagaagcctttggtgtgaatatttgtgagtattttctttcttcttttaaccatgtaatccgagctcaagtctacgtggaagaaatcccttggaagcgtcttgaaaagaatggagttaagcatgtccatgcatttattcacactcccactggaacacacttctgtgaagttgaacaactgagaagtggaccccccgtcattcattctggaatcaaagacctcaaggtcttgaaaacaacacagtctggatttgaaggtttcatcaaggaccagttcaccaccctccctgaggtgaaggaccgatgcttcgccacccaagtgtactgcaagtggcgctaccaccagtgcagggatgtggacttcgaggctacctggggcaccattcgggaccttgtcctggagaaatttgctgggccctatgacaaaggcgagtactcgccctctgtgcagaagaccctctatgatatacaggtgctctccctgagccgagttcctgagatagaagatatggaaatcagcctgccaaacattcactacttcaatatagacatgtccaaaatgggtctgatcaacaaggaagaggtcttgctgccattagacaatccatatggaaaaattactggtacagtcaagaggaagttgtcttcaagactgtga

SEQ ID NO: 2132 - DNA, 765 bp, Macaca Fascicularis
  misc_feature (1)...(765): n = A,T,C or G
ttacacagagccagatggatnnnnnnnttggctcacataaaagacagactcagggaggattttatgacaaaatccctcctttgagggcaggattcccccaggaatcctgtacactttagtgagacatggatcagcccgtggtacaaagtcctgcctgccctgccccccactcccaccccacaaggaattctaggtgaaaatgtgaagctcagggcacagcaagcgcatgacatgggtgtattacattaggtccgagtgtgtccttagtttccctgtgtgtaaaatgaggctagtgccaggctcttcccacctcactgggacaattgcaagggtcataggagagttgggtatgataggtggtcatatgaggtggtgggtataagaagtgggtgcctcacaaactcggggtgtggtcctgacccgcatcgcagatgaggagagcacttgggaacgagcataggaagtgccgtcttcccgggcatctctgctccgtgttaaggtctagccacagacgctatgggacctgcctcttcctatggaatgggggcctgcatggattgtgtcctggggcaggagtgagggatggctgggaagaatctgcagctctgtggcccttgtgttgagtgattattttgtgacactctcattcctggaccacctcccaggtttatctgttatacctgtcgcattcttatctcagacaaattattatagtttattccaactctaacaaatgaacaaaagaataataaatagaagccataa

SEQ ID NO: 2133 - DNA, 743 bp, Macaca Fascicularis
  misc_feature (1)...(743): n = A,T,C or G
ctgtgcggggatcgtccaatttctnnnngacctgtgggcacggtggccacaccagccacatgatggagtgnnnnnngacccaggaggnnnnnnnnnnngggtgtgggtgccactgcctgcttgaaagcactttctgaacctgcagaccacgggtgttgtctgaaatcccagatgacccataaatgcccctgacaagctgtctgtcaggggagaggctccagaacctcaattcgtccccagtgagatgnnnnnnnnnnnnnnnnnggactgtgcagcgtcagctcttggtgggcctctgccttctcttctgcttggcnnnnnnnnnnnnnnnnnnnnnnnnnnnnnnnnggggagaagtgcagagctgcgcttgtgtgttgtctatgtcggctgagctgccaagggggaggttttcatggagaacagcacctggctcnnnnnnnnnnnnnnnnngtaannnnnnnnnnntaaaccgccgagcggtgttctcctgaagccaatggagagaccagagtcagatggaaaagacagtctcctgagcccgaggacagtgggtcggaattgaatcaacaaatgggcctatggcattgtggctttagannnnnnnnnnnnnnnnnnnnnnnnnnnnnnnnnncttctaaaatatgacacttaaattgtaaatatgnnnnnnncttaaggattcttaagatgtatttttttgtttgttatttctcctccagctgctatcccttggctaataa

SEQ ID NO: 2134 - DNA, 341 bp, Macaca Fascicularis
  misc_feature (1)...(341): n = A,T,C or G
gagatttcttaaatacctcatgaccccacattcatagcctcccccagtatatcaacatcccgcaccagagtggtacatctgtaaggacctgtaatttaagttttgagcagacnnnnnnnnnnnnnnncaactaaataggatgatttttaaagaaagattggtttcaactgaggtattattttggagagatctgtttgacaactaatggtgtgtttgcttgatttgccccacttttcagtttaagttaaaccattgtatggacatggcctaacttaatgtgtttttcaaattttttaaactttgtgtttaaacctttgagaaaattctaatgactttatcat

SEQ ID NO: 2135 - DNA, 570 bp, Macaca Fascicularis
atggtgatgctgctgctgctgctttccgcactggctggccttttcggtgcagcagagggacaagaatttcgtcttgggaagtgcacctcgcctccggtgcaggagaattttgacccgaataagtatttcggaagatggtacgaaattgagaagatcccaacaacctttgagaagggacgctgcatccaggccaactactcactaaaggaaaatggaaagatcaaagtgttaaaccaggagttgagagctgatggaactgtgaatcaaattgaaggtgaagcctccccagttaacatcacagagcctgccaagctggaagttaagttcttctggtttatgccatcggcaccgtactgggtcctggccaccgactatgagaactatgccctcgtgtattcctgtgtcagcatcatcaatctttttcgtgtggattatgcttggatcttggcaagaaaccgtcatctcccttcagaaacagtggactttctaaaaaatatcctgacttctaataacattgatgtcaagaaaatgacggtcacagatcaggagaactgccctgagttctcgtaa

SEQ ID NO: 2136 - DNA, 708 bp, Macaca Fascicularis
  misc_feature (1)...(708): n = A,T,C or G
acacttaaagggcaaactgaagagatgagcgagcaaagaaagnnnnnnnnnnnnnnnnnnnnnnnnttaagagtacaaagaacactgttnnnnnnnnnngaagaagaaaaatttaattaccctttttgcctgtgttgtggcaacttcatttaatatggtttaaagannnnnnnnnnnnnnnnnnnnnnnnnnnnnnnnnnnnnnnnnnnnnnnnnnnnnnnnnncaaaatatatatatttctttgtacaatttgtgaaaccttataagccatttttcccaggtacaatgtagttcctgctgatagaaaggaaatattttgtcaagagctttcatttaaaagccactacctccataatcacccccaaacccagaaaatccccactggctcttgccagtctggttttcgtattgtagtttttccaattgtatttgatctccctgataatgtattttaatgtgtttgggtagaagatgccannnnnnnnnnnnnnnnnagtagtcattcactgttcgtgaaattgagccttttggtgcnnnnnnnnnnnnnnnnnnnnnncttctatccttctgnnnnnnnnnnnnnnnnnnnnnngagaccaaatacaagccatttcatggacatagcnnnnnnnnnnnnnnnnnnnnnccttggagctatattgtaaactcttgcagttgggagaggagttcacctcctcagctgttgc

SEQ ID NO: 2137 - DNA, 716 bp, Macaca Fascicularis
  misc_feature (1)...(716): n = A,T,C or G
taaagagaactagacacattntagcacggacagtccctgattaggcctatacggtgagctgatggttactgtcattacctcatcgaggatggtgaagggaccatttgttacctcagccccatactcctgtctctggtggaatcataaaatggttcggcagctttgaaaacattttggcaatttcttaaaatgctaaacaaagccagccttccattcctagctatttacccaagagggaaaaaagcatacgttcttacaaagacttgtacacaaatgctcatagcagctctatttgtaatagccgtaaactggaaacaatccaaatgtctatcaacaagagaatggataaaccagttgtgattgatccatacggaggaatagtactgagcaataaaaaagagtaaactgtttataaatgcaacagcatggatgaatctcaaaataattctgccgaccgaaagaagccagaatcgtgtgattccatttatataacattctggaaaatgcaaactaatacgtagtgacagaaagtacattggcggttgctagcggataggagtggggtcggaaaggagcagaaaagaggggttacaaagagacacgaagtttagggggatgatggataatatcttgattgtgatgatggtttcgcagantgtatacaatatcaaaacttaacaggttggacactaangtatgtgcaatttattttatgt

SEQ ID NO: 2138 - DNA, 603 bp, Macaca Fascicularis
gctgcagaaacagctgcagcttcacggccaactcaggttcctgggaaggacaagtgcccggggcccctgtccctggagagggtcttgaccaggcaggtctctgtcccacccttaggcaagggtctgaagtcctgggtgcctggcccaggacatgtgttgaggactggaaggacttggtcgatgagatcccctcctccaaggaaagagttggcaaatagacaaacaggcaacacaaagactaaaaaaatgcaagaccctgcatgtgggctggaagggctagggcatgatgcctgactggagttctttgtttttcattcctgcacccattcattcaaccaatcaacatgttttacgataaaatttatacaccgttaaaatcaccattctaggatatacatataaaaaaaaaaagaagcggtatatcttagtggttccttcccattcctcctcttactcccagtcgtatttgtcaataagtactttcctttatcgctgtatggattttcttattctggccattttatacaaatagaaccatataatatgtggcctttatatttggcttcttgtgtttacgcagcaaagttgcaattcgctaaagtt

SEQ ID NO: 2139 - DNA, 746 bp, Macaca Fascicularis
  misc_feature (1)...(746): n = A,T,C or G
ttccgggtggttcatnnnntcttcacaatgtggacnnnnnnctgnnnnttggagggtggtcatccgagttgctggcccagaaagtccttttcttccaccttctttgtctaannnnnnnnnnnnnnnnnnnnnnnnnnnnnnnnnnnnnnnnnnngaggctcagaagatgtgctcaaaagagaggaagttgagaagggaggtgaagtggaagtgagggnnnnnnnnnnnnnnnnnnnnntgcctctgctgcaggaaacccggaggtggccactagaactggttaggccaagggagctcacagtaaaaacaannnnnnnnnnnnnnnnnnnnnnnnnnnnnnccaagagccactctggaaacccctctctgcaaccccccacctctgccctggacacggtgctcagccagagaccggacagcagggggtgaggacttcccaatatatcacacaaaaaaaatttaaaatgacctatgtaatttggttgactcttaagtgtgttcttttgcaaatatatttgacatacagggtactggggtggagatgggggcaggagggtgtggatccgtgtgaatgatcaagtttaggataagaagggtgaaaggggcaaaataagggcccttcagcttctcagggcatcgttagagctaaatgttcctattaagaattatgaatctcccagcagtgagtgagaacttgcatgcgctccacccaaatcctttttcagaatgcaaacccctaggtcaaa

SEQ ID NO: 2140 - DNA, 685 bp, Macaca Fascicularis
  misc_feature (1)...(685): n = A,T,C or G
gacatcccagacagnnnnnnnnnnnnnngacaaacgtgcaataatgccaaatgttaaaatgtgagtttaccagcctnnnnnnnggactgctggctcctagtccaggaatcttggggggatgactgcctctccaaccctctgggctgcaagcaagctcaggctagtctccccagtgggggctgtgtccctccctggnnnnnnnnnnnnnnnnnnnnnnnnnnnnnnnnnnnnnnnnnnnnnnnnnnnnnnnnnnnnnnnnnnnnnnnnnnnnnnnnnnnnnnnnnnnnnnnnnnnnnnnnnnnnnnnnnnnnnnggcaggcggggggctgcgtggggacaatccatctctgagtgttctctnnnnnnnnnnnnnnacaggagacttggcggggnnnnnnnnnngatgtgggtgattctgtacctggggaggctatctctgacctcccgacagggggcaggcactcccaggccagcccaggggtcaggggccgaggtgcannnnnnnnnnnnagcnaagactggggtcggggagcaggtnnnnnnnnnnnnnnnnnnnnnggtgggggtggggccggggcctttctgcctcatttgctttcaatgaaagccgcaaagcagccaaaaccaggctctcccccttcctggagtttgaatatccagaaatcttttgtacttcttgttcatt

SEQ ID NO: 2141 - DNA, 743 bp, Macaca Fascicularis
  misc_feature (1)...(743): n = A,T,C or G
gcaggaccnnnngctgccgnnncagctgctgtgtgtccagctgctgcagaccccagtgctgccagaccacctgctgcaggaccacctgctgccgccccagctgctgtgtgtccagctgctgcagaccccagtgctgccagaccacctgctgcaggaccacctgctgccgccccagctgctgtgtgtccagctgctgcagaccccagtgctgccagtctgtgtgctgccagcccacctgctgccgccccagctgctgtcagaccacctgctgcaggaccacctgctgccgccccagctgctgtgtgtccagctgctgcaggccccagtgctgccagtctgtgtgctgccaacccacctgctgccgccccagctgctgtcagaccacctgctgcaggaccacctgctgccgccccannnnnnnnnnnnnnngctgctgccgccccacctgctctagtggctcttgctgctgatgccctcacctacactcacctgcctttattcaccagcattcttgatagagtccacctgtgaactgaatcatgcaagnnnnnnnnnnnnnnnnnngttccaaccaattcttggattgcgtttggcctccaaatatgctcacccaacactatgttgctaccctctaccaaatgaatacaagtttgnnnnnnnnnnnnnnnnnnnnnnntcccatgttccctgaattgaaatatttgctctctaccataatttatcacacggagctattcctctat

SEQ ID NO: 2142 - DNA, 761 bp, Macaca Fascicularis
  misc_feature (1)...(761): n = A,T,C or G
actgcttgactgaggtgntttgcagagatggtannnnatatgatccagtattcgaaaagaattagtcaaaaggaattcacatagtttaaatactgagaaattaatatccaaatatgtacttgtctgatttctaaataagctgggggaggagggaggggtgggaattgaaatgtgcaaatgagtagtgaatgctacattcattttcaactctttaacatacaactgttcaatcttaacatattgttactttaatatatgtataaagaagtattactgtttgtaaannnnnnnnnnnnnnnnnnnnnnnnncttgtcatgtattttctgtatgttgggccaacaggttagaacattaacccatttaaaaatgtttatctttttttgatttaaaaaaattctgtgaaataatttatttacagacatcttcctcctccctcatcccttccaacctttacatacatcacagaatcaaccaaactgtttgcctaatctgaaatctgaatcctaatgagaaaaatttnnnnnnnnnnnnnnnnnnnnaccttgaaagtatttgtattattttataatttaatttctaaatataccacataagtttataatttaatgtcttaattgtaatgctctaataaaaaactagcaaaattagtgtgagttataacatgaagggattttcatcttttgctctatgaaggataattgttatatcacatttggggggtaataacagcttttttgcactatgtaaatactagtgggga

SEQ ID NO: 2143 - DNA, 723 bp, Macaca Fascicularis
  misc_feature (1)...(723): n = A,T,C or G
gaatgaacaagtgtcagtcgagtgttacagatccggccaggaccccgnnnnnnnnnnnnnnnnnnncgcgaagannnnnnnnnnnnnnnntccctgtcccgggtcgcggcgccgtcgtcttggacgccggggcaggtgtgccctctgctgcctcccgcacccggcctgcggagggaggggacagctggatccgcaggggaggtccctttcttcctgaccccagattgagacgtctccaggaccttaggggcagatccgttttctccctgttggactctacctcactggtctggaagtcctccgaagacattatttttccaaaggaatttggtttcgtgcttgtgtaataaagccagaatttactttgctctttatctccccctttttctgtttcactgccacccctctttccggacagaagttnnnnnnnnnnnnnnnnnnctagtttgtgctcagggtattctgaagcccactcgtttcctaatttttactggattccaaagctttgatcgaggatattttttaagaggttcaagcttgtgactgttagtagtgcgaggatttgtatgggctcagtgattacaaacaaagacatgcaaaatacgactgtttaaacattttcaaggtgtttttaaaggttttatattgaaacttaatgtttatatttactgagctcctaaaaatggtagaatacacatgaaaacttttgtttaggaaannntt

SEQ ID NO: 2144 - DNA, 1147 bp, Macaca Fascicularis
agtttcagctttgccaaggtcaatggttgtcactgtccctgagtttctacctttcagataatttttactggtcaaggaatagaaacaaaggtattggaaaggagcaagtgtgacacagtttatgtcctgaacttgaagatcaagtcagtatcagctgccaccttcctcttggaatcgactgaaacaaaaaccaagaaatgcctcattccacaaacaaagagctgatatttggcatcatggtgggcactgctggaatcagcttgctgctcttgtggtaccacaaggtccgtaaaccagagaaaacaatgaagttacctaaatttctttctctggataatacatttaattcaataactttgcaagatgaagtacataatgaccaaggaacaacagtgatctttcaagaaaggcaacttcagatactggagaagttaaacgaattactgacaaatatggaagaactcaaagaggaaatcagatttcttaaagaaactgttccaaagctggaggaatatatacaagatgaacttggagggaaaataactgttcataaggtaagccctcagcacagagcaagaaaaagaagactccctacaattcaaagttcagcaacaagtaatagttcagaggaagcagaaagtgaaggagggtatattacagctaatactgacacagaaaaacagagtttcccagtccctaaggcatttaacacacatgtacaggagctggggaaaggaacacctcaaacgaaatcaagctgtgacaccaagaagaagagggcgtggccgttagttaggcaccaaataagctctcccagttattgctttgtgaccttatcctacattttaatcatcccgtcaagactgagaacttaacagaagcagaaagaaaacaaccccctctttgaagagtctaaaatatcagatatatcccttgtttctaacagtttttctgctgatttcttatttgttacgagtttctgtttttattgttgaagtaacaaatacttgggagagttgagtttactaatttgtatatgtataatttaaaacaaaataaaaataatgttgtaaacaaaaaaaaaaaaaaaaaaaaaaaaaaaaaaaaaaaaaaaaaaaaaaaaaaaaaaaaaaaaaaaaaaaaaaaa

SEQ ID NO: 2145 - DNA, 3081 bp, Macaca Fascicularis
atagaacaaccttggcttatctgttgaagtcccataggtagtattattagagaataacccagactttgggaactgtataactctgagatcatttgaaattttcgttttgtttttcttttggctccaacgaggcccctgttgttagtctagtggggtttccccctgcaaagattggtcagatctgctgtctatcatcctggaaggtgttaaatacacaggaagtccagtctcagtgggcaggacctagcctgaaagggcgggcattgctaatgtgttttcgaaaggtcttcccaatcctctgctttagacagattggaccttagaacacaacggatcctcaagtgactgacgacccaaaggacagatgatgtcacagtcatctggatcaggagatgggagtgatgatgaggctactacctctaaaaatggtggtttttcttcccccagtccctcagctgctgctgctgctcaggaggtcagatctgccactgatggtaataccagcaccactccgcccacctctgccaagaagagaaagttaaacagcagcagcagtagcagcagtaacagtagtaacgagagagaagactttgattccacctcttcctcctcttccactcctcctttacaacccagggattcggcatccccttcaacctcgtccttctgcctgggggtttcagtggctgcttccagccacgtaccgatacagaagaagctgcgttttgaagacaccctggagtttgtagggtttgatgcgaagatggctgaggaatcctcctcctcctcctcctcatcttcaccaactgctgcaacatctcagcagcagcaacttaaaaataagagtatattaatctcttctgtggcttcggtgcatcatgcaaacggcctagccaaatcttctaccaccgtctctagctttgctaacagcaagcctggctctgctaagaagttagtgatcaagaactttaaagataagcctaaattaccagaaaactacacagatgaaacctggcaaaaactgaaagaagcagtggaagctattcagaatagttcttcaattaagtacaatttagaagaactgtaccaggctgtagaaaatctctgttcttacaagatttctgcaaacttgtacaaacagctgagacagatctgtgaagatcacatcaaagcacagattcatcaattcagagaggattcattggatagtgttctctttttaaagaagattgatagatgctggcaaaaccattgcagacaaatgatcatgatcaggagcatttttttgtttctggatagaacttacgttcttcagaattcaatgctaccctccatttaggacatgggactggagttatttagggctcatattataagtgatcagaaagtccagaataagacaattgatggcattcttctcttgattgagagggaaaggaatggtgaagcaattgatagaagtttacttcgaagccttttaagcatgctgtctgatttgcaaatttatcaagattcttttgaacaacgatttttggaagaaactaaccggctctatgcagctgaaggccaaaaattaatgcaagaaagagaggttcctgaatatctacatcatgttaacaaacgtcttgaagaagaagcagacagacttattacttacttagatcagaccacccagaagtcattaattgctactgtagaaaaacaactcctaggtgaacacttaacagcaattcttcagaaaggtttaaataacctccttgatgaaaaccgaattcaagatttgtctcttctgtatcagctcttcagtagagttcgaggtggagttcaggttcttttgcagcagtggatcgaatatatcaaggcatttggcagcactattgtaattaatcctgaaaaagataaaaccatggttcaagaattgctggattttaaagataaggttgaccatataattgatatctgctttctgaagaatgagaaatttatcaatgccatgaaagaagcatttgaaacgttcattaacaaaagaccaaataaaccggctgaacttatagctaagtatgtagattcaaaacttcgtgcaggcaacaaagaagctacagatgaagaacttgagaaaatgttggataaaattatgatcatatttagatttatctatggcaaggatgtttttgaggccttctataagaaagatttagccaagcgcctgttagtcgggaagagtgcgtctgtagatgctgaaaaatcaatgctgtccaaacttaaacatgaatgcggagctgctttcaccagcaaacttgaaggaatgtttaaagacatggaactttctaaagacatcatgattcagttcaaacagtatatgcagaatcagaatgttccgggaaatattgaattaactgtgaatatcctgacaatgggctattggccaacatatgtgcctatggaagttcatttaccaccagagatggtaaaacttcaggagattttcaagacattttacctaggcaaacatagtggcaggaaacttcagtggcagtcaaccctaggacactgtgtgcttaaagcagaatttaaagagggtaaaaaagaactccaggtctctctttttcaaacactggtgctgctaatgtttaatgagggagaggagttcagtttagaagagatcaagcaggcaaccggaatagaggatggagagttaaggagaacactgcagtcattagcctgtggcaaagctagagttctggcaaaaaatccaaagggcaaagataatgaagatggtgacaagttcatttgtaatgatgatttcaaacacaaacttttcaggataaagatcaatcaaatccagatgaaagaaacggttgaagaacaagcaagcactacagaaagagtatttcaagacagacaatatcaaattgatgctgcaattgttcgaattatgaagatgagaaagacacttagccacaatctccttgtttcagaagtgtacaaccagttgaaatttccagttaagcctgctgatcttaagaagagaatagaatctttaattgaccgggactacatggaaaaaaaaaaaaaaaaaaa

SEQ ID NO: 2146 - DNA, 2621 bp, Macaca Fascicularis
attatacagagatatttagcctaatagaagccgacagatcattcagggcagtaatgtactctggcttcaagcgtgtagtttcctcagcctgaactcccagattaaaggctccttgcccagcccgccccgtgctggtgcctgtgaccttgactgcaatgatgggggatcttatgaccatgacctggctaccttgagtctgcggggctacacagccttcagcctgcatctccagggctccgactctatccagctcctggaccagctcccaagtctactcctgaccacagtctgggccaaggggactcctcaagctttgggacccagcgggacacagcagcagtcaggtgcatgctgggaccgcgacggacaggctgctgcaccccaggcccccagaggccagtctgtttgcctcccgacgccatctgacccaggtgagcgagaggatgctggcggggggcgtgaggagcatgcccagccccctcctggcctgctggcagcccatcctcctgctggtgctgggctcggtgctgtcaggctcggccacaggctgccctccccgctgcgagtgctccgcccaggaccgggctgtgctctgccaccgcaagcgctttgtggcagtgcctgagggcatccccacggagacgcgcctgctggacctggggaagaaccgcatcaaaacgctcaaccaggacgagttcgccagcttcccgcacctggaggagctggagctcaacgagaacatcgtgagcgccgtggagcctggcgccttcaacaaccttttcaacctccggacgctgggtctccgcagcaaccgcctgaagctcatcccgctgggcgtcttcactggcctcagcaacttgaccaagctggacatcagcgagaacaagatcgttatcctgctggactacatgttccaggacctgtacaacctcaagtcactggaggttggcgacaatgacctcgtctacatctcccaccgcgccttcagcggcctcaacagcctggagcagctgacgctggagaaatgcaacctgacctccatccccaccgaggcgctgtcccacctgcacggcctcatcgtcctgaggctccggcacctcaacatcaatgccatccgggactactccttcaagaggttgtaccgactcaaggtcttggagatctcccactggccctacttggacaccatgacacccaactgcctctacggcctcaacctgacgtccctgtccatcacgcactgcaatctgaccgctgtgccctacctggccgtccgccacctggtctatctccgcttcctcaacctctcctacaaccccatcagcaccattgagggctccatgttgcatgagctgctccggctgcaggagatccagctggtgggcgggcagctggccatggtggagccctatgccttccgcggcctcaactacctgcgcgtgctcaatgtctctggcaaccagctgaccacgctggaagaatcagtcttccactcggtgggcaacctggagacgctcatcctggactccaacccactggcctgcgactgtcggctcctgtgggtgttccggcgccgctggcggctcaacttcaaccggcagcagcccacgtgcgccacgcccgagttcgtccagggcaaggagttcaaggacttccctgatgtgctactgcccaactacttcacctgccgccgcgcccgcatccgggatcgcaaggcccagcaggtgtttgtggatgagggccacacggtgcagtttgtgtgccgggccgatggcgacccgccgcccgccatcctctggctctcaccccgaaagcacctggtctcagccaagagcaatgggcggctcacagtcttccctgatggcacgctggaggtgcgctacgcccaggtacaggacaatggcacgtacctgtgcatcgcggccaatgcaggcggcaacgactccatgcctgcccacctgcatgtgcgcagctactcacccgactggccccatcagcccaacaagaccttcgccttcatccccaaccagccgggcgagggagaggccaacagcacccgagccactgtgcctttccccttcgacatcaagaccctcatcatcgccaccaccatgggcttcatctctttcctgggcgtcgtcctcttctgcctggtgctgctgtttctctggagccggggcaagggcaacacgaagcacaacatcgagatcgagtatgtcccccgaaagtcggacgcaggcatcagctccgccgacgcgccccgcaagttcaacatgaagatgatatgaggccagggcggggggcagggacccccaagcggccgggcaggggaaggggcctggccgccacctgctcactctctagtccttcccacctcctccctaccttctacacacgttctctttctccctcccgcctccgtcccctgctgccccccgccagccctcaccacctgccctccttctaccaggacctcagaagcccaggcctggggaccccacctgcacaggggcattgacagactggagttgaaagccgatgaaccgacacgcggcagagtcaataattcaataaaaaagttacgaactttctctgtaaaaaaaaaaaaaaaaaaggccaca

SEQ ID NO: 2147 - DNA, 684 bp, Macaca Fascicularis
  misc_feature (1)...(684): n = A,T,C or G
caacaccccagctgccatcaccacgccaactcgcctgacttccattcacttatctagcaaacatttaccaagtgtctgccatgttcattttgtcaatgaggatgatgtgggacttgttcctctaggagttcacagtctaatgagatcaatgtttatacagaaaatgtaaataggttgtgataagtactaaatgcatgctgctaatggcatcattgcctctggctcttctcagtcctgcatttcccacgttgtatcgtgcaccaaagctgtcacactgccccttcctcttcatctctggtgccacctgtgatttacttgcaccctaccttgtttctgaactattgcagcccctcccaacttatctcactgcctcattcccctgcctttcaaaaccagcccacctcctgctgcccaataacctgatgttgtcattctcatatttaaaacccataaatgcggccannnnnnnnnnnnnnnnnnnnnnnnnnnnnnnnnnnnnnnnnnnnnnnnnnnnnnnnnnnnnnnnnnnnnnnnnnnnnnnnnnnnnnnnnnnnnnnnnnnnnnnnnnnnnnnnnnnnnnnnnnnnnnnnnnnnnnnnnnnnnnnnnnnnnnnnnnnnnnnnnnnnnnnnnnnnnnnnnnnnnnnnnnnnnnnnnnnnacccagaggcagaggttgcagtgagc

SEQ ID NO: 2148 - DNA, 645 bp, Macaca Fascicularis
  misc_feature (1)...(645): n = A,T,C or G
tgtaaaaacaaggagttggaatagnnnnnnttatccaagtagtattaaaatacctaagtatttgctgaaagcactnnnggccaaacttggaactcagtggctccaccaaagagaagtnnnnnnnnnnnnnnnnnnnnnnnnnnnnnnnnnnnnnnnnnnnnnnncctgtgaaaacaggcattctgtaggtcttccggatgaggaannnnnnnnnnnnnnnnngtgctgccatcctnnnnnnnnnnnnnnnnatgggcttctttgtgagtgttagtaaaagctgtggtttgcctctcagagtgagtgcccccaagaggtcagggtaannnnnnnnnnnnnnnnnnnnnnnnggacagcaggagtggattgggacgactnnnnnnnnnnnnnnnnnnnnnnnnnnnnnnnnnnnnnnnnnnnnnnnnnnnnnnnnnnnnnnnnnnnnnnnnnnnnnnnnnnnnnngtgggtgtctctctcaaaggccaggattgtagaatatgagaaacagatggannnnnnnnnnnnnnnnnnnnnnnnnnnnnnnnnnnnnnttgaggacttgaacgaagcnnnnnnnnnnnccaaattagacaagaaaaagtatccctattggcctcaccaaccaatcgagaatttataaaatt

SEQ ID NO: 2149 - DNA, 671 bp, Macaca Fascicularis
gtagcccactgggggccaaccagaccctaccacgcccctgccacaatctctagtccatcacaaaatccaccactgggagagtactttcgtccctcagtaggtaagcatttttacaacctaggaagactcagcgttaagtctagaaatgattaatataaatataaaatataaatacgattaatataaatataaaatagccatagaaatgtctgtttgtttgtttgtctgtttttgagacagagttttactctgtcacgcaggctggagtgcagtggcatgatctcagcctcccaagtagctgggatcacaggtgcacaccaccatgcccagcaaattttttgtatttttagtagagatggggtttcaccatgttggtcaggctggtcttgaactcctgacctcaagtgatccacccgcctctgcatcctaaagtgctgagattacaggcgtgagacactgtgcctggccaaaatatgccttttgtattaaggaatctggacaggtttgatttttcacagtcttaaaatgtttacataatttggcctattatgaagaacctcgcaaatccaatataaaatgtggaactagctaatcaaaatcatcttgtaattttacatggaaatcttagtgcatttatacacagtattggaatacttaagagactttgggtg

SEQ ID NO: 2150 - DNA, 770 bp, Macaca Fascicularis
  misc_feature (1)...(770): n = A,T,C or G
agcagctgannnnnnnnnnnnnnnnnnnnnnnnnnnnnnctggctnnccgtgcgagcagaggccccttcccaggtgcgactcatnnnnnnnnnnnnnnngaagcacnnnnnnnnnnnnnnnttcttcctcaccactgtgtggacgaggcctgggccnnnnnnnnnnnnnnnnnnnnnnnnnnnnnnnntctctggctggcaggccttctttccagttcatttccaggagttcaatcccgccctgtcaccacagagatcacccccaggggccccgggggctggccctgaccccccttcccctcctggtgctgacccctcccggggggctcctatagggnnnnnnnnnnnnnnnnnnnnnnnnnnngagggctgtttctacaatgctgactacctggcggcccgagcccnnnnnnnnnnnnnnnnngcaggccaggaagaggaggaagccctggaggggctggaggtgatggatgttttcctccggttctcagggctccacnnnnnnnnnnnnnnnnnnnnnnnnnnnnnnnnnnnnnnnnnnnnnnnngactgcagcccacggctcagtgaggaactctaccaccgctgccgcctcagcaacctggaggggctggggggccgtgcccagctggccatggctctctttgagcaggagcaggccaacagcacttagcctgcctcggggccctaacctccttacctttcctttgtctgcctcagccccaggaagggcaaggcaagatggtggacagatagagaattgtcactgt

SEQ ID NO: 2151 - DNA, 765 bp, Macaca Fascicularis
  misc_feature (1)...(765): n = A,T,C or G
tgcaagcaaaagtacacactcaaaaaaggggagttcatgcatacccgagagagaacaatgggttctggggtttcatcttgatgggttactttaacaatggagtggaatattaatgaaaattcctgggtaaaggtggagatgtctcggaactgtggtgccatccannnnnnnnnnnnnnnnnnnnnnnnnnactgtcatggcactggtgggtgtgtgatttagtatgttaatgagcnnnnnnnnnnnnnnnaggtaaaacctacattaaatccagcaccacattgggtccagtcagtcttacnnnnnnnnnnnnnnnnnnnnnnnnnnnnnnnnnnnnagcccataaccttaagtcaggtaaatctgctgcctagaatttgttatcctgtgaccactcggtattatttctgtctcaaatctacttggaaatattcaaatggtctttgacttgggcattccaactttgcttacttcacagtgtttcttgcgccgtaatccaatataagaaaagatgatccagacatttgttaaacatctcaaataagannnnnnnnnnnnnnnnntgtcaaatttggattattttagtttttgtctttgcagaatataaaatactaacatgaagtaagcactaaggtctggagnnnnnnnnnnnnnnnnnnnnnnngtccaacaccacgtttgagagtatccaataatctcttctggggcagcttgtttttctacaatacgtggnannnngnnnnnnnnnnnnnnnnnnnnnnntga

SEQ ID NO: 2152 - DNA, 714 bp, Macaca Fascicularis
  misc_feature (1)...(714): n = A,T,C or G
tctnnnnnnnnnnnnnnnnnnnnnnnnnnnnnnnnnncggctcactgcaacnnntgcntnnngagtgcaagcnnnnnnnntgcgtcagcctcccaagtanntgggattccaggcatacaccatcacgctcagctgatttgggtagagacagggtttcaccattttggccaggctggtctcgaattcctgacctcaagtgatccaggcaccttggcctcccaaagtgctggggttataggtttgagccaccatgcccagccgggtcttcccagttttaacaaagagtcactgagccatagggagagttaagaactaaattgtctcctcctccaaattcatatgtttgaagtcctaaaccaaaatgtggctgtatttagagatggaccctttgggaggtaattagggttgaatgaggccatagggtaaggttcttgcccaatggaattgacctccttataagaggaggaggaaatacaagaggacctccccacccctgctgcacacctgcactgaaggaaggctatttgtagacacagcaagaaggcagccacctgcaaggcagaagaagagagccctcaccaggaactgaatgaatcagcagctcagtctgggacttctagcctctggaactgtgaaacaataaatttctgtggtgtaagcaactcaatctatagtagtttgttactattttgttatagtaactgaagatgacta

SEQ ID NO: 2153 - DNA, 752 bp, Macaca Fascicularis
  misc_feature (1)...(752): n = A,T,C or G
atagagtgagagctagaatggacgaggatatttagggatgcatttttagggtgggagcttttncnnnctgtcttgtattagaccttttaaactgaggaggatacaattattggtttttgtactattccgtatgggtttggggggcaattctatatatgttaatgaaatcacttgttttttatatacctttaggaagtggttgatagcctttgagagaaagtaaatcaaagaaggcaggaaaaggggggcagaagccaatcagagcccagacctttactattgtgactcagctcttaactttctgccagaaaatggccattgctacatagcannnnnnnnnnnnnnnnnnnnnnnnnnnnnnnnnnnnnnnnnnnnnnnnnnnnnnnnnnnnnnnnnnnnnnnnnnnnnnnnnnatgtttgtcttgatttttaatgacgtggtgagctaattttcaaaattgtgaagaaaaatacattttaaaaagaaaacgttttcatgattttactgggttcttttgtaccagatgtgttttttcttctgttttaaaatttgcaccattagccatcaaatgcatattaagaagagatctggaaaagagcctcccatcattttcttgggagccatgttgttattgttgtaacctaaatagtgtggaataggagctctgccctaaaaaataaagcctggaattctggttgctagcaatacagcacttaaatggagaaaaaaaatgatattcaccatgtctaaa

SEQ ID NO: 2154 - DNA, 706 bp, Macaca Fascicularis
  misc_feature (1)...(706): n = A,T,C or G
agtatcactgnnnngacccaggagccactcccactccagctgcctgtttccagcaggttcccagtgnnnccgacaagccccggctggtgtctccatctcctgccaagcatcctccaatgcctcctcctgtgggcctggcctcagggctatggacagatgcctctcccttcccagagacccctcgtgatcgtgccctggcacgtgggccgtggcctggctgggtcagcngnnnnnnnnnnnnnggacgccgcggaagaggccccgaatggggcccaccaccctggacccaagtcttcttcctggcgggcctctcgtctccttcgtggtttgggccgaagccatcacctggattcctccgtgggaacggacctcggacgtgggaccccagcccccctccagctcgaaatccctccacagccacggggacgccctgcacctattcccacgggacaggctggacccagagactctggacccggggcctccccttgagtagagacccgnnnnnnnnnnnnnnnnnnnnnnnnnnnnnnngggtcagacccgcgggctggacccttgcccaccccacaggaaccccgaggcctaggggagctgttgagccttcggtgtctgcatgtgggaagtgggcttgttcacctacctcacagggctgttgtgaggggcgctgtgatacggttctaaagcacgggcttggcgcacccca

SEQ ID NO: 2155 - DNA, 602 bp, Macaca Fascicularis
ccaacaaaccgttttaattttgatttttttttttttttttcaagagaattaaatcgtttattgattacacatgataatggatgatacacaagcttcattcccatctataattttatctggtaccattattcaatttagatatattgcataggatgtgccaacaatcacttttataaccaataattccatgatttcggttgggtaatccattttaacggtgaacttcaggtcacaacagtaactatcagttcaaatacaccaaggtttcggaagacaatggcttctccacccaagcaggttgtatataaattccaaatagaacctggcatcacccagaaggaattctaacttcacactgttggggaagtttaccaagatggcttcagagtagactaactttacacagcacattaaaaaaaagacatttactcagcgtcacgatcaaactattacatttagcaatcaacagcatgggtgcaaaaaaaaaaaaaaaaatctacattaaaaccctttgttggaatgctttacactttccacaaaacaaaaactaaaataacctgttatacaattagtcacaaatacagtcctcgagttttttgccc

SEQ ID NO: 2156 - DNA, 695 bp, Macaca Fascicularis
  misc_feature (1)...(695): n = A,T,C or G
gcggctnnnnnnnnnnnnnnnnnnnnnnnnnnnnnnnnnnaaagtcnnnaagaataagnnnnnnnnnnnnnnnnnnnnnnnnnnnnnnnnnnnnnnnnnnnnnnnnnnnnnnnnnnnnnnnnnnnnnnnnnnnnnnnnnnnnaannnnnnnnnnnnnngggccgggctgggctactaggctggtgtccatgctgttgatatggtgcctgtccccctaggtttcaacccatggtgggacacggagtttgcgtttgaggtagtnnnnnnnnnnnnnnnnnncgtccgcttcttggtggaagattatgatgcctcctccaagaacgacttcattggccnnnnnnnnnnnnnnnnnnnnagcctcaagcaaggataccgccatgtccacctcttatctaagaatggggaccagcatccatcagccaccctctttnnnnnnnnnnnnnnnnnnnnnnnnnnnnnnnnnnnnnnnnnnnnnnnnnnctgagtgggctgggccctctgtccacacgtggggacagggctggtgtggctgctcccagcctcttgctcagagctaggcccccaaactgcctttagctctaacatagtgtctgctgctgcctccctggggaccaggagctagcccagtccctggagctgtccttcattccgttaggaacaacactgcagccctctccaccctctggctggccggt

SEQ ID NO: 2157 - DNA, 834 bp, Macaca Fascicularis
  misc_feature (1)...(834): n = A,T,C or G
aacccccaaatataaacttctgtcnnnntgctatgtgtggtactatgcagctgcttttgcagaaatcacaattttcctgtggaataaagatggtccaaaaatagtcaaaaattaaatatatatatatatattagtaatttatnnnnnnnnnnnnnnntaggcagatcaaggtttagttggacttccactgttaaaataaagcttacatagtttttttcctttgaaagactgtgctgtcctttaacgtaggtttataaagactaggatattgaatgtgaaacatccgttttcattgttcacttctaaaccaaaaattatgtattgccaaaaccaagcccaggttcatgaatatggtgtctattatagtgaaacatgtactttgagcttattgtttttattctgtattaaatattttcagggttttaaacactaatcacaaactgaatgacttgacttcaaaagcagcaaccttaaaggccgtcatttcattnnnnnnnnnnnnnnnnnnnnnnnnnnnnnnnnnnnnnnnnnnnnnnnnnnnnnnnnnnnnnnntcacacgtaagcacattggggccatttccgtggtttgtcacgagctgtgttcacagacctcagcagggcatcgcatggaccgcaggagggcagattcggaccactaggnnnnnnnnnnnnnnnnactaaaagtctccaaaacatttttaagannnnnnnnnnnnnnnatgtaatttctttaaatgtgtatttcttaagaattcaaatttgtaataaaactatttgtataaaaattaagcttttattaatttgttgctagtattgccacagacgcattaaaa

SEQ ID NO: 2158 - DNA, 1192 bp, Macaca Fascicularis
  misc_feature (1)...(1192): n = A,T,C or G
gaggctgnnnnnttcaccatnntcaccctgccccagctgaggaaatcaaacgggccaaagaaccaaagaagaaagtccacccttagttccttactggaatcagctcaggactgccgctggactatggagtgcaccaaagagaatgccctacttcttattgcaaccctgtctggatcctatcctcctacctccaaagcttcccacggtctttctagcctggctatgtcctaataatatcccactgggagaaaggagttttgcaaagtgcaaggacctaaaacatctcatcagtatccagcggtaaaagggcctccgggctgcctgaggctaggtgggttgaaaaccaaggagtcaccgagacgaaggctttctctactgattccacagctcagaccttttcttcacctctgaagagaaacacgtctcccacctggcatgtccttctgagcctggtaaaagcaaaagaatgacagaaaaaagtttaggtcctgaaggccagggagattctcataacttgagacctaatgtctgtaaagccaaaataaagaaagaaatacaacaaggctgaggaaactgacagaacactgtcatcagggactgtaaacacagacagggtcaaagtgttcttctctgaacacacggagttggaatcactgtttagaacacacacacttactttttctggtctctaccactgctgatactttctctaggaaatatacttttataagtaacaaaaataaaaacataaatttctatttttatctgagttacagaaatgattactgagggaaattactcagtaatttgtttaaaacgtaatagaattnnnnnnnnnnnnnnnnnntagctactatatgtcnnnnnnnnnnnnnnnnnnnnnnnnnnnnnnnnnnnnnnnnnnnnnnaaaaaattgcatatagtagaatgctatctgggaagctattttttttttcagttttgatatccctagcttaatacttccaaactaatttttactttcgctgggcctcctttcngtaattttctctaatatggcaaccattataaccttaatttattattaanncatccaagaagtgcngttttacctctatatnnnnnnnnnnnnnnnnnnnnnnnnnnnnnnnnnnntgtcactagccctcctttttccagcaaggagggcctgagagaagcagaaatagttga

SEQ ID NO: 2159 - DNA, 686 bp, Macaca Fascicularis
  misc_feature (1)...(686): n = A,T,C or G
ggtacctgtgcgaggctgtggaatgcaggccagagcagggcatgcttagcccccagcacccaggtgcttttgtcagaccctgtcacctgcgagctgctactgctgttaggagggaaaaaaaatggatgaatctggctcgttttaaaatcaagttttttgattaatcctttgcccccacacattcaccctgcccgcacccccaggtcctttcagccttcgtgtcatcggatttgtctacccaggcccttgtgcggccatgccctgggggcagcgtcctgtccctgagctggggggcggctttggatggtccgggtgtcaagagcagaggtgggctggggaggggtcctttgcagtgagctatgtttacatgacacagtgtgccaaagtgacttactgtggttgcgttattttttagtcatcggaactatcccaccctcccactcctgtttttaaaactcagaattctttcctaagggcccttcgagcaaagcgtgccgaagttagttgtcttctctgtggtggtcctttcttatgtcttcataaaagctcagatgatggtatctgtgagtatgttttgcaaattcaaaatatagtttggtaatttttttttccagttgatttttaaaaagaactgctgtacagagcttgtactttgtccattttatagatggaaaccatccnnnaaa

SEQ ID NO: 2160 - DNA, 684 bp, Macaca Fascicularis
atcagaatctatctgaaataacattttgaatgtttattacagccaggtactcttgtaagctcttgtcttaacctgtcaaccttggctggaaatagatgcagaggttaagtaacttgctcaagctcagatcataagtagtggaggatttaaaaccaggctggctggctctagggtctatctcttaatttgccatattgtattaatttaccatattgaattatacttatgttcaccaagttaggcattttggcagccattgtttacgtttttattttggaataatttagaaaagttgccagagtaatatgaaagttcttgtgtgatctttaccctcatttttattattttgccacgtttttttcattttctctgtacatgcatttatacatactttctgagctatttgagagtttgttgcacaccttgtgcttccttaccccttccttagtactttggcgtatgttccaagtataagaatatttcatataactagagtaaaattaccaaactcagggaatgtgatactctttatcatccatatttgttttgttgtcccagtatccttggtagcttttcttagatccccctagaatacaggatcattgaatttagttgttctcagttgtctttaatgtggaacagttccttagcctttatgtgtttcatgacctgtatgtttttgga

SEQ ID NO: 2161 - DNA, 691 bp, Macaca Fascicularis
  misc_feature (1)...(691): n = A,T,C or G
ttagagggctgttnnnnnnnnnntttctggaatgtctgggtgtgccctcagagcctgcaacaagtgtatttggatatactctaaagttttggcctccaagaaggcgaaaaggaagcaactaaaaatctgatgattaagggagtcaatcaagctaatgccatttttagtttaaaaaannnnnnnnnnnnnnnnnntcatagactggttttcttactgggaagnnnnnnnnnnnnnnnnnnnnnnnnnnnnnnnnnnnnnnnnnnnnnnnnnnnnnnnnnnnnnnnnnnnnnnnnnnnnnnnnnnnnnnnnnnnnnnnnnnnnnnnntaggaatccaagtggaaagaagacagagtccatgtctgtccatggctccagctacagaaannnnnnnnnnnnnnnnnnacaggggggacacattactgtggaaagttctgctagagttactctgagagtatctacaaatagatgagaannnnnnnnnnnnnnnnnnnnnnnnnnnnnnnnnnnnnnnnnnnnnnnnnnnnnnnnnnnccgacaccatgaatatcatgtgtggccttaaccaaggaacagaagccctttagaacttagcttcctcacttgggacctgggactgactgcatttgccctttctataaacccacccacctcatagggttcattgggagcataaagcaagatgtggtgaaa

SEQ ID NO: 2162 - DNA, 756 bp, Macaca Fascicularis
  misc_feature (1)...(756): n = A,T,C or G
ctgtaaaagcaacactacctgattgcatttaaaataaatgtttcccaatttcagaatacttacaacttgtagttttaagattagattcactttgggaggttttagaagcaaatacattcatagctgtataatccccaggaagaatctaaatctgacatcaggtcattcannnnnnnnnnnnnnnacaacagcatcaaatggnnnnnnnnnnnnnnnnnnnnnnnnnnnnnnnnnnnnnnnnnnnagcagtggggtatagcttattaccaaagatgagaccagcaaaaacaacaatgtatataaagctgtaacatgaccatatagagctctcatgatacagaaaaagcacatatgatactaaagccaaaacaaaaagatctttggagtttactgacggcagcagttaatagcacagtcaacagcatttaaatcaaatatattattaccagccaacagcaaacagcccgagcaggaatcggcacatagtcataaataacatcaggggtaaataagggcacatttaattaaacaacaaagattttacagaatggttttgatctgaaaaaagatgaaaactctctttgttcccaaataatggttagaacctctttttattatagaaaagcctcaaaatcattggtaatcttcaagtcacacaattgaactgtcttaatgtttcattttagtcacacaaagcacgctgctgtttgagcaaagttatctcaattgatttcaattaaaacgtgtctaccctgt

SEQ ID NO: 2163 - DNA, 727 bp, Macaca Fascicularis
agcacagaggtgtcaagggtagcaggggtcccccctgggggccggcccaaccccatccagctttgctaggacactggctgaagggcaggccacccagacggggaacttcacattcactggagggaaacggggggtctccctgaggctaatcaggactgatgagtatcccgaaaccagtggcaggaatgcacattccagggcttgttctagaagcttatctgtgattaaacagcaggccttgagtcacattgcttcattttttttttctttctgttgcacactgcaaatggaaaattctggattccacctagggcaccatcgggaggccaatggggtcatatggggacacacgcagatcctgcagcagagcttctaggttgttcctcagcacggcgtagggcggcttctcctcgtacttgagggccatcaccaccttcaggtaattctgcagggtctctgagggtctgatccaatgaccgcagggtcccacaaagggccccggcttatcagtaaacttctgtttttgcttcatgatgtcctcagtgttaggaaggcagtttgtccacggcagaaacccgtagagccacttcagcatgcagtagcccaggctctggaggtcgctgcggcgggagggcccgcatcccttgtgcaggtccatgctaatgaactcaaggtccccctcgtgagggctcctgctgccttccacgtaggccacatgtttgccact

SEQ ID NO: 2164 - DNA, 1877 bp, Macaca Fascicularis
tttcctttgcgtttgccattcccttcatcattttttcctagtgtgaatgccaagagagagaagagcacttggaaatggatcccattttccaggcttccatttcctatgagcctcagaggagaccctttcctgaccaggagcagaagtgttctcagcataggaagagctacctgggaatgggcgtcctgtccatgtgactctcaaccaaatgctgcttgtaaattagtgcaaccactgtgccctgccctgactctagtcctaactatcttgtttccatttccagtctctaaacaaaattgtgcataaatatttgtatgtttgaggtaaaggggcatgggatcatcttgttcaatacctgtattttgtaaatgagaaaatggaagaccagagaaattaagtaatttacttatggtaacgcaagtggccatttagggtactcccaggccttttgatgtccagtatattgtttctccaacctcacctggggaagtagctgactcagtggtagggctggggtatgggtacatctggcatctgccttcctgtttaaatgttgaggcttatggcccttgctagggttactggggcagggggtggatttggtgggttttcatttgtagttgtcccatgttctctgtgcttttgggcaaatttcttaaacttctgtaaaccccagctaaatggcagtggcaactgcctcataagattaaatgtagacaaaaagcacctgtacaggacttagaagaagatattcaataaccacattttttttttctccttcactacctggcttttgctcattcacttgttgttgttgtttttgtttattttgatgaatgtttaagctctcaaagaaatgatgtatgtgatggtaaggagcgccgactttagaatcagacaccttgggtttaaatttcagccccaccacttactggctaaggaaccttaggcaagttccttaatctctctgtatgtcaccctcgtctggaatgtggaggtggcagcacttgcttcatacagtgtagtaaggacatgagttagtgcaggtaaaaaacattttctaacacacagtcaacactcaaggattagctgctgttgataccggataaaaactattttttcttgtgttctttctggctcttactgttgggacatgacactagcattccatatgtgctgctttgatgtgaagaatacttactgcctttgcttgatatattataccaagtataactgaaagatgagtcccattcttaaaaatgaaaaattagattattattttctgataataatcatgattctcattggttaaaggaagctacagatgaaacatttgagtcctgtcccacagattatatggcttcagcaaattactgagcatctgggcaaaatgagggagtcttcatacaatctaaaattttgtcagtcccaatttaatcccgtccccaaataggaaaaccatttagaaacttcctgaggattgagctcttttatccatgtggatgtctttggggcttatttaaacattgggacttatttgggtggccttttctaaggtcattggcggggagatttggtgggttttcatttgtaattgtccatattctctgcgctttggggcaaatttcttaaacccctctaaaccccaactaaatggcagtggcagtggcctcataaaattcaatgtagaccaaaagcacctttataggacttagcagtagatattcatgaatgacttgaatgacttctcatacctctggctacagaataggttgactctcagcaacccaccaagtttttgcttttctatgaactcatgaaactaatatgaccttccctcccttccttcctcagttaaataaaaaaaaaaaaaaaaa

SEQ ID NO: 2165 - DNA, 742 bp, Macaca Fascicularis
  misc_feature (1)...(742): n = A,T,C or G
ctacagaggagaagtggactacannnnnnngannnnnnnncagcatgtgaagcgtnntcgagaaatgagccctctctgggagatggnnnnnnnnnnnnnnnnnnnnnnnnnnnnnnnnnnnnnnnnnnnnnnnnnnnnnnnnnccctgactttgtgctggtctggtccctcctgcctcaccaacccatacacaacnnnnnnnnnnnnnnngcctagtggatgctccagattggtatannnnnnnnnnnntcagcatcagtccacctctatgacagaaacacaaggaaactgtctttccctagcttcagcttcttgggtgtggagcactccccatttcttctcaggtcttacagtnnnnnnnnnnnnnnnnnnnnnnnnnnnnnngacatttgttatcatannnnnnnntgacacatctgtgctcttggtgaggagagcaagaggaaccagaagtctctggtcagggannnnnnnnnnnnnnnnnnnnnnnnnnnnnnnnnnnnnnnnnnnnnnctcggctggaccagcttctttaacagcaagcataatccacttcaatttaatattttctgtagctccaaagggtatnnnnnnnnnnnnnntgcagtcagacggaacggacagtttcttagagggcttgtctcctttctacccttgtcctctttcctttcctttgacctaatggagctggaaatatgtctatgagtccaccagttattctaatagtttgtttccttgaaaa

SEQ ID NO: 2166 - DNA, 727 bp, Macaca Fascicularis
  misc_feature (1)...(727): n = A,T,C or G
aagctgtttttaactccaagattataacttagaggaaccaaggaaataaagcaaataagatttaacaatccaagattgagaggccaggaggaggttagaagcaatgtgaaactgtcttcctaggataagatggtaagagtaaggtttaaagtgactttttggggcctgnnnnnnnnnnnnnnngcccataatcccagcattttgggaggcnnnnnnnnnnnnnnnnnnnnaggccaggagttcgagaccagcctggccaacgtggcaaaaccnnnnnnnnnnnnnnnnnnnnnnnnnnnnnnnnnnnnnnnnnnnnnnnnnnnnnnnnnnnnnnnnnnnnnnnnnnnnnnnnnnnnnnnnnnnnnnnnnnnnnnnnnnnnnnnnnnnnnnnnnnnnnnnnnnnnnnnnnnnnnnnnnnnnnnnnnnnnnnnnnnnnnntcatctcaaaataaataaataaagtggcccttggggaaaagcaatttaatataccacgatgagtagctaaccattcccaagtgtttgctatgtgctacacaccgtgtgagcagtgttacctgccttaccacattaggctgagaagtaaaataatttgcccaaagacatacagctagtgagggatggactgatggtttgaacttaacgtctatttgacttaaggtcccgcaccctgccacttgcaattttcagcatcactgataatctgaaataatgtagcctaaaatgt

SEQ ID NO: 2167 - DNA, 1971 bp, Macaca Fascicularis
  misc_feature (1)...(1971): n = A,T,C or G
tttttatagctcgagagatatgaattaacaccgaattaataaatgtaaatcatttgcgctctatttctgtattccagctgcttacaatgtacctggatctcaagttcatcaggtctagaactaaacttacctttttctcagtctgcttctttttccccagcattactatcctggttaaagagatgactctcatctattaacttaagtcagaaatcaaggagtcattttagatacttacttccactccttaccatctggtcagttcctaatgaaatgatggtcattttcctgatttttctagttttctctaaacttactgcatataattgcatcccttgtgtactgcttagagtgaatagtcacctcatagaactcttcagtggtggcctggcatggtggcttatgcctgtaacccctaaattttgggaggctgaggcaggtggatcacttgagctcaggagttcaaggccatcccgggcaacctggcaaaacctcgtctctacaaagaatacaaagattagccggtcccagtctcttgtggggctgaggcaggaagagtgcttgagcctgggaggttgaggctgcagtgagccatattctcactcctgcactccagcctgggcaacaaagtgagaccctgtctcaaaaaaagtgggaactcttcagtggcaaaattcacattcttttgaatggctctcaagacttctgggatcctggctcctacctacttcttgtattttgctactaccccatgaaatgcataacttgtgctctagccagcctgagttaattagagttcctcatccacaccgtgccacatctgtgcctttccactttgtgttctgctgcctacctggttttcaaagcctccttactcctccttatcctttaagacccatctcagccatttcctgaagcctttttctcactggttcaagcagagcagatcatcttttccattttgtcgccaccttacctagctcatatttgttcttgagcttaatagttattattatcgctgctagactgtgagctccataaaggcaaggtctgtatcttatttagttttatatacaaagtgctttcagatattaggctctcaaataatatcctgtctctccagggccactggtaatcaggaattaaagcttattgtattggtttggtaattttgttcatcttactatcattcagttaattaggtttaaagccaactatgacttagtcctttttttttacttagtccttttcttgtacaaatgaaatatttgcttagtaatcctttttgattcatatgctgttttgtaataactatagtgctgcttctacttaagtaatttttgacatctctaatcaatccctgttgacttaaatgcattagaggtcctcaaaatccaaacattaaataatttttatttaaagaagataaactggatataagcaagaaatacttctcaacaggctaatctttgatatccacccctggggtggactgaattatagggacttggtttatctgacataaaccagaacaagtaaaacattcatttagaagtaaagtgttttttttttttttttttttaagagtatgtatgaaaaatgcattattaaaactaagagacaggccnnnnnnnnnnnnnnnnnnnnnnnnnnnnnnnnnnnnnnnnnnnnnnnnnnnnnnnnnnnnnnnnnnnnnnnnnnnnnnnnnnnnnnnnnnnnnnnnnnnnnnnnnnnnnnnnnnnnnnnnnnnnnnnnnnnnnnnnnnnnnnnnnnnnnnnnnnnnnnnnnnnnnnnnnnnnnnnnnnnnnnnnnnnnnnnnnnnnnnnnnnnnnnnnnnnnnnnnnnnnnnnnnnnnnnnnnnnnnnnnnnnnnnnnnnnnnnnnnnnnnnnnnnnnnnnnnnnnnncaaaaaaacaaacaaaaacaaaaaacaaaacaaaaaaaaaaaaaaaaaaaaaaaaaaaaaaaaaaa

SEQ ID NO: 2168 - DNA, 2049 bp, Macaca Fascicularis
gtggctccctctgttccggcatcgctgtgcctcgggttcgcgccccgagtgaggagtcctggctcgaagcgtcggtcctggcaatccgtaggaaaagcactgcggcacgggcgatcggtgatgttcagtgatgtatccatagacttctctccggaagagtgggaatacctggacttggaacagaaggacttgtacagagatgtgatgttggagaactacagcaacttggtctctctgggatgcttcatttctaaaccagatgtgatttccttattggaacaaggaaaagagccttggaaagttgtgaggaaaggaagaagacaatatccagatttggagaccaagtatgaaaccaagaagttatctttagaaaatgacatttatgaaataaatttatccccgtggaagataatggaaagaattaaaaaccatggccttaagggtctcattttaaaacatgattgggaatccacaggaaaaatggaaggacaggagagacctcaagaaggatacttcagtagtgtgaaaatgccatctgaaaaggtgtcctcttaccagaaacgcacatctgttacttcacatcagagacttcattttgtcgataaaccctatgaatgtaaggaatgtgggaaggcgttcagagtgcgccaacagcttacttttcatcacagaattcatactggtgaaaaaccttatgaatgtaaggaatgctggaaagcctttagtcgctactcacaacttatttcacatcagagtattcatattggtgttaagccctatgactgtaaggaatgcgggaaggcctttagactactttcacagctcacacagcatcagagtattcatattggtgagaaaccctataaatgtaaggaatgtggcaaggcctttagattgcgccaaaaacttactctacatcagagcattcatactggtgaaaaaccctttgagtgtaaggagtgtaggaaggcctttaggcttaattcatcccttattcaacatctgagaattcattctggtgagaaaccctatgaatgcaaggaatgtaagaaggcctttaggcaacattcacaccttactcatcatctgaaaattcataatgtaaaaatctaagaaagtcttttcaacttctgtgtaatagaacattctatgaatgtagtaattaatctcttttgctccatacatgcaactgacttggcattagagattttataccattaaaagagtgtgatcatgtattgtattccgtcatcactcaaacctgaaacttcagcacatttgttctaaaaacgaatcctgttataagaatgagaaagataccgtcatccctatcccatcactttgtgtcatactggacaagaagcttaactgctgtgtgctttaattttttaatttatgaaatggtcatataagagtgcagcaatttgacactctttcaatcaagaggtggaatttacatccctctgttgtatataggcagactctgtgactgcttcgccccgtagaatatggtagatgtactgctgtgctggtttcttgactcagactttactggtagagttacttcatctcatgaaatgagagaactgtcatgttacagagtctggctactgtgctgaagagaccacatgaagaggccctgaaactacatagagagggagaggcacctgctgaaccctgtcttcttgacatctgccaagataccagacatttgagtgaaattttggatccaccagaccagccaccagctaaatgccactgagtgacttggtaacatcaactgatgccatgtagaatggaagaattgaccagctgagcccctgcccaaatttctgacccacaaaaacatgagatataataaaatggttgtcattttaagccactaaactttcttttattatcatatttaatatttctttgtagataaatcatactaaaggctatgggcataatgaatatagaaatgccttctaccaacatttatccttcattgaacttgagatatcttactctcattaaaatattgaaagtaaaaaaaaaaaaaaaaaa

SEQ ID NO: 2169 - DNA, 736 bp, Macaca Fascicularis
  misc_feature (1)...(736): n = A,T,C or G
cgttaatgtagnnnntgtttataatgtgccaatatcanctgaagatatttgtgttgccattgcctaccataatgtactgcttaaaatctccttttactcctcaagaacaannnnnnnnnnnnnnnacattaatttttgcacagactactttaaaagtttgatgcatgccattctgttttgcattatttatttacaaggagaaaccacatatatgttaaagtttgggagtatattttaggaaattattccttttctcatttttggctttagatattcttttttctttaaataagggtggaatacaatgctagcaacatcaggcccttgtaatgcctcctctattcctctgcacagactgtgtccccacattggcttcctgcctgccagcctctgtgcctttacttgtgctgtccccagcctgggggctgggaatgtccttatccatctcttttgtgcctgttgaaggtctgcttgtcccaccaggctcagatcagatacctcgaaggagccttttataatttcctcttcttcctcctcccctctcctccagttagaatggatttcccttccgcttgtttccaaggcactttacccctggtacttgtatttcatcctcttgtgtagaggtacttgcttgtgtgcctctctgtccnnnnnnnnnnnnnnnctgaagggcagcgcttaggaattctctctgccttgccttgtctagtatgatgttttctgttacaggtac

SEQ ID NO: 2170 - DNA, 766 bp, Macaca Fascicularis
  misc_feature (1)...(766): n = A,T,C or G
ccaggcgcgcaaggccatgattgagaagttggagaaggagggcgcgccggcagcccctgcggnnnnnnnnnnnnnnnnnnnnnnnnnnnnnnnnnngggtccccaacgccnnnnnnnnnnnnnnnnnnnnnnnnnnctggtgccgagccaagactcgcggctacgnnnnnnnnnnnnnnnnnnacttctccnnnnnnnnnnnnnnnnggatggccttctgtgccctggtgcacaacttcttccctgaggccttcgactatgggcagcttagccctcagaaccgacgccagaacttcgaggtggccttctcatctgcggagacccatgcggactgcccgcagctcctggatacagaggacatggtgcggcttcgagagcctgactggaagtgcgtgtacacgtacatccaggnnnnnnnnnnnnnnnnnnnnnnnnnnnnnnnnnnnnnnaacaaaaagtcctaacccctgctcggggcccnnnnnnnnnnnnnnnactgtgtgcctctggtggaggtggaggacatgatgnnnnnnnnnnnnnnnnnnnnnnnnnnnnnnnnnnnnnnnnnnnnnnnnnnnnnnnnnnnnnnnnnnnnnnnnnnnnnnnnnnnnnnnnnnnnnnnnnnnnnnnnnnnnnnnnnnnnnnnnnnnnnnnnnnnnnnnnnnnnncgcccccaccctccgggcaccgtcccctccctgtgcgcccgcccaccgctgccctgtctgtcgcgacaccctccccccacatacacgcannnnng

SEQ ID NO: 2171 - DNA, 675 bp, Macaca Fascicularis
  misc_feature (1)...(675): n = A,T,C or G
gctgggcctccctgactgtaaaatctctgtactgttaggtttttggtgggaggctgtgataagttccaatgagctgccacttccttggatatgtcnnnnnnnnnnnnnnnnctgggccaattctggcagacaccaggcccccagctcagccccagtcaccctcttttcacacatgggtcaagcaccgtgtgctcagagggtcagtcccttcctctgctgtgtttttcttgagtccttgcactcactttcccggccccattcacgatgacccctaaagcttcctttgccttgctttctagggcatccctagtgaaggggcaaacgtgagatttccccatgggcctgacagccaaggcggtgcactgtcttccgaggtcaatgccagcccgtgcatagttcacagaaaaggatcctgggctcagaattttgagaaccgcctacccctaacatttcagcaagtcagggccttcctctctgtgagtccccagatccttacttattttcaaaagactagaccctctctaaagactgttccattttaacacgccctgattctgcatccgtgggttttgtgaaagagagctagctggcggttagagcctggaagaaggagggaagtggcacctcactagcatttatcacttttttccttctcttttaaaaataaaaccagac

SEQ ID NO: 2172 - DNA, 588 bp, Macaca Fascicularis
  misc_feature (1)...(588): n = A,T,C or G
tggttatcccaatttctttgattcgatcattgcaaattgtgtgtatgtgtcaaaatatcacatgtgctccataaatagtacaacttttatgaaaggaaaagaaaaggttgaccnnnnnnnnnnnnnnnnnnnnnnnnnnnnnnnnnnnnnnnnnnnnnnnnnnnnnnnnnnnnnnnnnnnnnnnnnnnnnnnnnnnnnnnnnnnnnnnnnnnnnnnnnnnnnnnnnnnnnnnnnnnnnnnnnnnnnnnnnnnnnnnnnnnnnnnnnnnnnnnnnnnnnnnnnnnnnnnnnnnnnnnnnnnnnnnnnnnnnnnnnnnnnnnnnnnnnnnnnnnnnnnnnnnnnnnnnnnnnnnnnnnnnnnnnnnnnnaaatgaccgaacgagactctgtctttaaaaaaataaaaagaaagagagagagaggtaaggaaggaaggaaggaaggagggagggaagcgaaaggaatggaagggaagggaagaaggagggagggaggaagcaaggaagaaagggaaggaaggaaaaaattcttcaacatgatacagcaatgtttagtgggttttactgtgtaggtcttacactaaatggaa

SEQ ID NO: 2173 - DNA, 103 bp, Macaca Fascicularis
aataaaccacgttagagagcatgagtcaatgtgcagtgtagccacacttgaggatgaatgtatgtgcactgtcactttgttctgggtggaagtacattattgg

SEQ ID NO: 2174 - DNA, 585 bp, Macaca Fascicularis
gcatcacaacgcagtttctcagaacgcttctttcatgttttcatatgaagatatatcctttttcgccacaagcgtcaatgcgcccccaaatatcaccctgcagattccacgaacacagtgttagcaaactgtttcacgaagagaaaggtgtaactctgtgagatgaattcacctatcacaaactagtttctcagaaaggttctctctgatttttatctgagggtatttcccttgtccgtatagacgtcatagtgatcccaaatatcccttcccagattcaacaaaaagagtgggaacagaatgctccacgaaaggaaagtgtatctctgagagatgaattcacacatcagatagcagtttctcagaaaccctctttctggttttcatctgaggatatttccttttttttaccacaggcctcaatgcgctcccaaatatcactttgcagattccacgaaaacggtgttaagaaactgcttcatggagagaaacgtgtaaatccgtgagacgaattcacacatcacaaaaaagtttctcagaaagcttctctgatgtttttaattgaggatatttcctttctcagtg

SEQ ID NO: 2175 - DNA, 684 bp, Macaca Fascicularis
  misc_feature (1)...(684): n = A,T,C or G
tggaaacagctacactctcaatcaggtgcttttttttccctcaaaatctccaaactcaaagcacttataaagggcccttcctaggggcaggcacccccagccaccaaatcacagatttccaagagtgggaggagctttcctctctccaaccattccttggtttcctggggaagagggttattcctgcagggcccctgggcatcnnnnnnnnnnnnnnnnnnnnnnnnnnnnnnnnnnnnnnnnnnnnnnnnnnnnnnnnnnnnnnnnnnnnnnnntgaccccaaagccacgcctgctccacagccctannnnnnnnnnnnnnnnnnnnnnnnnnnnnnnnnnnatccctttggcctttgacttgccagttaaaaatggagtgacaccccagactcaattaggaagagaacctgcagcctgcctcagctcaggctaccacgccaggctccactcgctggtattttcaggcttgctaagtactaaccaactcatccccagtaacannnnnnnnnnnnnnnctgaattaaaaagcaaaatgagcaaacaagtgcataagcaaacgagaaaaaagaaggcacannnnnnnnnnnnnnnnnnnnccagtgaaggtaccccgggagtgttgcaagttaaacggatggaaagatgaaatagtatttaattgctcctcatgtaacattactc

SEQ ID NO: 2176 - DNA, 2462 bp, Macaca Fascicularis
ttgttttattttagttacaaatcatcatgtagtcctttttggaaagaacttagcaaattttcattatttatttaatatttattatttatttgtgtgtagtttttaatccgcaaaaggatttaaagcatccagcattagtcatattttattaaattataggaattaatgatttggggacttattttctttaaaagtataaattataaattatcatatgcttagtgcagaaagtttggaaactcaaaattcataaaagaaaaagagttacctgaagtccccccaagcaaatgaattgttatttttttaattttcttaaaatgaagatgttatttttctcatcttacatcatttttaaagcacaaaagttttgcatatgtaagggagaataatatttcttcattatttttcctgcccaaatagtctacccaaagataaagagcatgtactttcccaccttcccaaacaactcctaaaactcttgcatacactaccgagctggcatagtgaacccaaaaaagaaggaagttattccttttgctactgccatttgctgtgcttgtggacattttgtttgtttgcaatgcgatgatttgttttccttaaatagccttccccgcatagcaaactgcccgcaagaaaagttgactgtccttacagaacagcagagtgcctgcagccaacgttgtttttgctgtcctttctttagacctgtagcttcctcctccttacagattacactgaggtttttccccttcttacactcgtggcctacattccaggagatcaagcctggcacatgttaatgaatgtaggttttatttagaaacatgaccacttgtcactgcccagtgtcatattatcgggcagagactaccaacatttgtctagagtgaacattttcatacttctatacacagacaaggggaaactttcatccccacgcaggatatagccttttgctctgcagagtctaacttttgcaagtggaagcttcatggtggtggcagacgacctgcgtgctctgaggatggcagaggacggctgtgtggacgcagatctcccagattgtaactgcgatgtcacaaggcaggcatcttcttgagtttcttccattgtacatagctttcatgttacgtggggtttgtaggatagatgctggaagctttaatccagagctgtttttgccaatgttacatgaagaggattggtgttgggagatagctggccatgtggactcccaagagttatttgttggtttgttttctagtacctctactgggcatgcagagctggatgaaaaggttaatggactttattatgactcggtattccagttgtctctggagcgtatgcgtcatacaaggagtatggctagagtagagaagctgagacacaggaaagcgatccagaaaaagactcagttagtctatcatctgctatttaaaggatgggcttctgatgaaactgaaatttagccttagctggttcacagctttgtagttgaaagctttcctttcattaaataaaaatatttcagggctctagaaaatgttgtgtgtttgagaaagttgcttttgtttgtgcttgtcagtaagttttagtcgctaatataaagcttataaaatatatgtgcaaagtatacagattaatgtctaaaatagtaatttagcacattatgcaaatgtttagttcatattttttttagttagaataaaaatgtgacaggaatttttatttttaactttttaaaaatattttcctttttctgtatcatccctcagatacatttctacaaataaataggatttacccaatggtaatttttgttctattatatttagaatttgaactttttgttttgttttgggttacggatatactaaattactgtgaaggaaagttgtgaaatatagatacaatatatatagatttataagtatatgtgtgtaggtacatatatacgtatatatatgtgtgtttgtatatacatgtttccgtgttaagaagctggatatttgcatttcatagtagaatccttctcaagaaaggtgaagtgcctggactgtgaaagaaccataagctgcggggacttacagatttatcaagctgctaaacttacccagacatgtgacgtctgcaagtgtctaatttgaatgataatcctggatgtttaccaaaaggaacgttgctcagactcctcacgatgatagataaataaaaatactgtgacactttacccaaaaattatctttaaagaaataatggaaagaaacatggaacatttctcctaaaaaaaaaagggtgatccctgtcctgcaaataaatatcaagtttaataagccaaggcttatgaatcctactatccatgccctccaggctcacatctgctcccccagcacagatgcacactgcattttgctatttgtagtaaaatacactgttttaaaaaaaaaaaaaaaaaa

SEQ ID NO: 2177 - DNA, 712 bp, Macaca Fascicularis
  misc_feature (1)...(712): n = A,T,C or G
catcactcactanctgggctgctaggaannnnnnnnnannncatcctagtacctttctagcccttcctcatgacattaccgtcctcccggtgaaggcttatgaagcaagaatggagagtcnnnnnnnnnnnnnnnnaaacccatcttgtaaatcaggaaacacattaaccttccatcagtcagagaaatgcnnnnnnnnnnnnnnnnnnnnnnnnnnnnnnnnnnnnnnnnnnngaannnnnnnnnnnnnnnnnnnnnnnaccctgcagtgacccctgaatgccacgccatgggaggactcattcattggcttcgtagtggcaaatattcctctagttctataactcaactagacattttgtagtaaagaattcttgaaattctctaataaaaagcaattcttactgtaatatttttagtttggggacacaatttcctaaggggggattaatgaacatttttatgcattagcccaatttatgaatttcatgtttattatatggtagcactgatnnnnnnnnnnnnnnnnnnnnnnnctttgcagtttcttcgttactcatacgtaagcttcatggtgagcagtgctcnnnnnnnnnnnnnnnnnnacaaatctcatcgttctacttacctgtcaaagcacattctacatgtactgtaaacaaatacactttagtaagatttagtcttaaggatttttccacttttgtcagta

SEQ ID NO: 2178 - DNA, 695 bp, Macaca Fascicularis
  misc_feature (1)...(695): n = A,T,C or G
cagcacccccacctcccaccccctgagagctggggcaggctcctgggatgtccagactggtgcgttgtggtctccggtggggccagatccccagaacagggagagactgcatgcaagtctgagtggcagaagcttcaagtgggtgaggatcggtgtgtgagacccccgagtgggcacggctctgaatgtgaggccccgggcggcacgttaggtagaacaaatgtgagcatctccactctggctgaccccgtggccggggcgtctcttgcatgctgttggtggtccttccccagttcctatctcccacccgcctggttccagccccatgccctctcccactgagtcacaggtttgagattcccagagaggccannnnnnnnnnnnnnnnnnnccctgggggctcagctgagagagagagagagtcacagaaaggccagagggtcnnnnnnnnnnntggaggtcacagctgggctcacagaagctcttgggccctggcatcctgggtgacagctgttcttaggtattggggacaggacagagagctcattctataaccacagttgtcttttaaaggccaccctctccagccccttgtcaccccgtgctgtgagccccacaagtcccctgtgaccactcagtgccccatccccacccctccagccgcagtttnnngctaaactgtcacagcatacatg

SEQ ID NO: 2179 - DNA, 737 bp, Macaca Fascicularis
  misc_feature (1)...(737): n = A,T,C or G
aagagnnnnnnnngccccaagcggcgcgactgacacagccctggccatggggctcccttgggtggtgcttggggtgtgcgccacgggggctgcagtgggttcgctgtgtcagggatgagcctggctcaggggttggcggaactctgaagcgcatttggggttctttgtaacttctgatgggaggtttgagtccggtgcacccacagcagcatgctcttctcacccctcacggtgttgcaggctcaggtccctgggctcctttagcaagcaggctggtcaacgaggcacaaggatgcggcacagggcatccccnnnnnnnnnnnnnnnnnnnctctcagtgcttagggtttgccctgtgccctctgggtggggcggcctctcagcactcggcagcatggtcgggctggccagggcatgggcagactcctgtggccacctccaccctcctgcccagccagctgtgtcacactnnnnnnnnnnnnnnnnggttggttcctggcaaaaatgtccctccgggggcctccaagcataggatttggaagacaggaacggcacaggcagccaggaaagcagctgcactcagatgatgccttctccattacttgaagctgctttttgttcggccatcaaagaaacttgacaaaataggaacaggagatacttctcgattgtaaaactttgttcagggacagttggcttccaaaagctttcagatttcaattattgagaaagaagtt

SEQ ID NO: 2180 - DNA, 647 bp, Macaca Fascicularis
aagcattaactctgcactaattttgacttatgaaaagattcagcagtaagaataaaaactgggccaaagcccaaagtaataatccttcacaaataggatggtgttttaaaaatatgggcatcctgtgtgtagctttgaaaataaccaaagtacttggaattaaaaagttaggtgaacataaaaattgtcataaccaaatccttgacagcttgatggatgaagagcagatgagtttacactgtatggcaggaggcatggattttaggagggacagcaacagagagggatgtttagaaagtgaataagacacatagctctttggaaaacaaggaaagtccctttattagaacaaggcatgaaattctgccactaggtggcgatgccccataactttacaacttagggtacatcacaccagcactatggaagatttctccattctgcaccccaccaactccctcccctccttcatttttcaggatgacaacaccttagaggtttatggccatcaggagaatttactactaagctatatactgatgtaatgaaatctaatatatgttgtgcaatgaattatgagatgttatttagtttcaggattttattacttcaatcagttatgaccatatttcctttaatatgattgc

SEQ ID NO: 2181 - DNA, 698 bp, Macaca Fascicularis
gcacggaaggtggaggttgtagtgagccaagagtgcacggctgtactccaggctgggcaacagagggagactccatctcaaaaaaaaaatatactatgtattaatactgcttcatatcatgtagagtgtcatcagtgtattggtgccatgctttaaaaaaccctaatgtatgatttaaagactacatatctatattgcagcagacctgtgggtaaactaaaataccccctcatgccacccaccccaggcagcccttctggcacagggacgggctagggtcgtgaagagtggtgctaagagcatcggagaggaggctgggtttgactccagggaaggcactcttacggtggaggccacgccctgtatctttcaggacctgttttagttgctctaatgaggcaatgatgccaagaaaaagaatgttgcttagctctcctggagggggttgaaggattccaggcactggggcaagaatctgtgctctgtgtgcttttgctgaaaggatattgctgggatattgagggttatggaagaaataaccttccaggggcagaattgtgcagtaaggtccctcagcctaggataaaaaaggtctctaacgaaaagcccacttattcatatttccattttaactcagtgttcctctctaaattccataccctctggggcataagctgaaggaaaatttcgagtctgat

SEQ ID NO: 2182 - DNA, 1928 bp, Macaca Fascicularis
gtcataagccgcccgccgccgggtggaaggccccggccgggagccgaggaaaggggagggctccccagacaactgggtccggcgagcagttggggacaggttgagtctgcgtgccggcagaatgtccctggctgcttattgtgtcatctgttgcagaagagtaggaacctctacttccccgccgaaaagtggcacacgctggagagacatcagaaatataataaagtttactggatcacttattttaggaggttctctatttcttacatatgaagttctggccctgaagaaagctgtgacattagatactcaagtggtagaaagagaaaaaatgaagtcatatatatatgtgcacacagtttctttagataaaggagaaaatcatggtattgcctggcaggcaagaaaagaacttcacaaagcagtaagaaaagtgttggcaacatccgccaagatactacggaatccatttgctgacccttttagtacagttgatatagaagatcatgagtgtgctgtgtggctgctcctacggaagagcaagtcagatgacaaaaccacgcgactcgaggctgtgcaggagatgtcggaggcccatcattggcatgattaccagtataggctaattgctcaagcctgtgatccgaaaactcttattggtttggcacgaagcaaagagagtgatcttcgcttttttctcctaccacctcctttgccatctttaaaagaagattcttccactgaagaagagctcaggcagttgctggcttccttacctcaaacagagctggatgagtgtatccagtattttacatctttggctcttagtgaaagcagtcagagtctagctgctcagaagggtggtttatggtgttttggaggaaatggacttccttatgctgaaagttttggagaagttccttcagcaacagtggaaatgttctgtttagaagctatagtaaaacattctgagatatccacacattgtgataaaatcgaagcaaatggaggcctgcagctacttcagaggctgtaccaacttcacaaggactgccctaaagtacagagaaatataatgcgtatcattggaaatatggctttgaatgaacatcttcattcttctatagttcgctcaggctgggtgtccatcatggcagaagcaatgaaatctgaccgcattatggaggcctcacacgctgccagaatcctggcaaatctagatcgagaaactgtgcaagaaaaatatcaggatggcgtgtatgtgctgcatccccagtatcgaacaagtcggcccattaaagcagatgtcctttttattcatggccttatgggagcagcattcaaaacatggcgccagcaggacagtgagcaggctgtaattgaaaagcctatggaggaggaagacagatacacaacgtgttggcccaagacatggttagcaaaagactgtcctgctctccgaattatatctgtggagtatgacaccaccctcagcgactggagagcaaggtgccctatggaaagaaggagtttgctctcaataagcagtggaataggagaagtcttagaaagtccattgcattcagaagcaacgaacttcttaggaagctcagagctgctggtgttggggataggccggtggtttggatatcacatagcatgggaggtcttctcgtcaaaaagatgctgttggaagcctctaagaagccagaaatgagtgctgttatcaacaataccagaggaataattttttatagtgtccctcatcatggatcacatttggctgaatactctgttaatattcgctatcttctctttccctctttggaagtcaaagaactcagcaagggtaatactttctgtcataaaggaaattggggttatattaacatcacttatacaaagaaaaaaaaagaaaaaaaaaaaaa

SEQ ID NO: 2183 - DNA, 155 bp, Macaca Fascicularis
agagcaatgcacagagatgagagttagtccacccaaatccacacaaggggggttcaaatatctctaaagagataaaagggtctcgtgtatatgtgtcgagaccccgcgggggtaaagagagcacaatcccccaaaaatagcccctctcttcgggg

SEQ ID NO: 2184 - DNA, 376 bp, Macaca Fascicularis
gtgaggagcctttggtagctggctctctccataggcttttctggaggaggaactatggctttgctgaggttagttctcagtatatgagtggccctggataaagcctttctttccccaaatgagcctcctaatgtcctgctaatccagaaatcatcagtgcatggttactatgtcaaagcataatagcttgtggcctgcagagacaagaggaaggttaacaagtaggggtcctttggtttgagatcctggagcaaattaaggaagagccactaaggctaatgcaattacactggatcctgtgacagacacttcacgcttcatgggtcacatggtctgtttctgctcctctctgccctggttggtgtgggttgtggtg

SEQ ID NO: 2185 - DNA, 220 bp, Macaca Fascicularis
gcatcaattcctcaacaaaaagtttatcgatttgttcattagtcatatgaatgtgaaaattatgctcactagcggcaagtgccactaaccctattccagaagctaggtgtcatgtttgcaacaacatatcgtatcccctctacaagtcatcttttatttcaggcatttgtaagtgtccattaataaagtatggttcataaaatgggccttgtaagtgcct

SEQ ID NO: 2186 - DNA, 125 bp, Macaca Fascicularis
ggtggtttcagaggaagtccagcatcatcaggacccgcaaagaggtgcaggcacagcccacagtaccacagcgtgcccacaccatcgtttggctgctagatgaggaggccagagaggggggagta

SEQ ID NO: 2187 - DNA, 708 bp, Macaca Fascicularis
  misc_feature (1)...(708): n = A,T,C or G
ccatgtnggccatcagtggtcacctagacagcgatgatgataggttttcttctggaggcagaaaattaaaccaaccatctcagaacaccctggctccaagaaacactcattgaagaagatggagaagactctccaggtggctgagactttgaggttggtcgagtccccaaaagaggctaaacccaagttggctgagtcccccaagctggcagatccctgcgtgttggccaagactacagaggggaccaaggtggagctgggccgacagggccgatccctgctgcagctgccgaggacggccgtcaagtctgtctctacgctcatggtctctgccctgcagagcggctggcagatgtgcagctggaagtcatcagtgagttctgcctcagtcagctcccaagtgaggactcagtcacctttgaagacgccagaggctgagatgctgtgggaggtgtacctggtgctgtgggctgttcggaaacagcttcgccagctgtcccgcaggcaggagaggcacagacggcaccacgtccgatgccacgctgcccctcgacccaacccggctcagtccctgaaactggatgcccaaagtcccctctagggggggaaccccagaccctcagagagtcccaacctcattcttacctggggtcccatataagccccttcattccatgtattccatttgtaaaaaaaattatcaaaata

SEQ ID NO: 2188 - DNA, 712 bp, Macaca Fascicularis
  misc_feature (1)...(712): n = A,T,C or G
tcagaaatttcttgttttgctttaaataactcttancaaataagggctgggcatgnnnnnnnnnnnnnnnnnnnnnnnnnnnnnnnnnnnnnnnnnnnnnnnnnnnnnnnnnnnnnnnnnnnnnnnnnnnnnnnnnnnnnnnnnnnnnnnnnnnnnnnnnnnnnnnnnnnnnnnnnnnnnnnnnnnnnnnnnnnnnnnnnnnnnnnnnnnnnnnnnnnnnnnnnnnnnnnnnnnnnnnnnnnnnnnnnnnnnnnnnnnnnnnnnnnnnnnnnnnnnnnnnnnnnnnnnnnnnnnnnnnnnnnnnnnnnnnnnnnnnnnnnnnnnnnnnnncaaaaaaaattaaaaataaataactctttgcaaataggaaagtgaagcccaagggtacccagtgaggctgtgaaatggccagtgaattaagagcagggctggagtcgacagtccagacccctgtgcgtatgaacaggggcccctttctggttgaaatcaagattaggatgcaactgagaaaataaaagactgcactttggagtggcaagcacgctatctgggttgttgttttcttttgcttatgtcttggtgcttaggtgaggacttagctgggtttattcaaagtgggtgagtctgggctattcttgagaacctccattccatttctgagaacaagtcagccccttctacctgccttcaccccaagagactgatgcacaag

SEQ ID NO: 2189 - DNA, 663 bp, Macaca Fascicularis
ttatatcaagtatgatttcaaaatgtcaactagttccacttttgtgattgcaggaggcttcttatattaaagttctcgtaaataataaatcagcttatgccaaaaatatatgaagttccttggttttaaattttgaactaaaatggactgagcacattaattactgtttgaaagtgggtaccaaacactgggttacatgagtgagcaagcagtcagatcacctgtcgagcatgtcgagtacagggtgtggtactctctttgtctttggaaggcccctaaacaaatgtgggcacaacaggtgtcatttgaggatgctctgaggatgctcttgacactttattcttcatgaacatagaatgataagcagcactaaccaattttatattaaaaagctgtttattttgctgagttattccaagagttgtatacagctttactgtttggaactgcaatgttaaagttgcactttggatttaagacttactctcattattttagtaatacctacagaggtgagctaatggatggtacatggagtagggactgcagagaccccggttttgtccccactccatcttcaaataattttggtctcttaggtctgtgatacaaaggcataaaacaattcctatcttgaagccttgagaaaagctgttacatata

SEQ ID NO: 2190 - DNA, 764 bp, Macaca Fascicularis
  misc_feature (1)...(764): n = A,T,C or G
gttactatatttgcttgacatggtgatggggnactaagtcacaaaagaatccattccaggtatgcatgtctgggggttgggctgtgtctagattagaaactcggtttcaagctttgcgtgatgggagagcatcgtctcctatcagctgcgtgtgttctggataggacagtagcctggagatggaaaccaccttcagtaccactagcccaccataccaagtaacaagttaggcaggaatcgtgggaatttattnnnnnnnnnnngagtgtttgggagaatgtaaacaagatattggctcgaactgtaaacatttgtacttttggtaagttcatggttccttaggtcaccttataccagctgtctttggtagaagctacagcattcagtttctctggaaannnnnnnnnnnnnnnnngttttaaaaattttacagtatcaaaaaacnnnnnnnnnnnnnnaaaacaaaacatgaagcagaacatatttggattctatttatttaaaattaaattctttgcaaaattgaacttctcaactaannnnnnnnnnnnnnnaaattttaactgttagcaggtagtttgtggcaaagatggctaaataatgaagcaaattagaatctgtgtgtatactaatgagctgctttttttctgttgagactatcattatttgtcttattacccaagaggcaattacctgaatttggatgtctgaattataacttatgcaggaatagttctgtaaatacatttaaataaactgtaaag

SEQ ID NO: 2191 - DNA, 764 bp, Macaca Fascicularis
  misc_feature (1)...(764): n = A,T,C or G
tgccccttgaatnnncacagccacctaggaacatatggagtnnntacaaatgctgcatttgacccgagttcttaagagacctgtccttttcctggtcacctcattcagctccatatgatcctgttgtgaacatcaagtttcctgctagacttgacttaactataatgcatttgctgcagttttccataaacacctgtgaatcaaagacatggaattatcttagattagctctggaccagcctgttggaccagctctggaccaaccctgtttcctgagtttgggattgtggtacaatctcaaattctcaacctaccaccccttcctgccccaccccttctcttcctgtaatacaagccacagaagccaggagcaaatgtttctgcagtagtctccgtgctttgactcacctgtcacttgaactgccagtgaaccaaagagactggagcatctgactcacaagaagaccagactgtggagaaacaaaaatacctctttattttttgattgaaggaaggctttctctnnnnnnnnnnnnnnnnnnnnncatctctaacgggaagcaattcctgtagcatcttctggagtctccagtggttgctgttgatgaggcctcttggacctctgctctgaggcttccagagagccctctggatggnnnnnnnnnnnnnngaaggccaagaatcaagccaggaggatacatgtcactgtggaccttcctgccaccagccactgtccctcaaaggacccaaagaccaatatcaaa

SEQ ID NO: 2192 - DNA, 750 bp, Macaca Fascicularis
  misc_feature (1)...(750): n = A,T,C or G
ttaagtgctgatgctnnnacagtacagctagttataattccagaaccaaaggcaccaacatgatttggtgaccttaactactactttgatagaacagactgggtaatttactaataatgagtcattatctttttaatatgtgattacctagttcagcattctgaatgtgtagtttaaggtctctctgatttagtaaaattttaaagctaaatactctgatgactcttgaaagtttaattggtagtatgacatttataagtgttttttcccccagactcacagccaatacaaagttttgagactctagtaaatgttaatatttttgctgcttttctgagctgtttttttaatttacttaccatctaatctagggaccaaaacgggaattcttcccttagaaatttgtagtgttatgtttggccagcacagtatttttcagatttgaatttcagtacctttatgtgtagcctcagtactctcaacaccagtcactctttattgtcttaaaatactccatactttttgttgacccaaaattgttgaatattttgctcagttttcacaatgaactaattgaaaagtgtagttactgtgttgtaaacatttgtgtagttctgttaatatactgatttgaattttatttatctcaacttcctttagcgtctgcctccagattttgtctttgctgtatacccactgagatcaatttcctagacccctctggctcttagtgtactatggtttgggctt

SEQ ID NO: 2193 - DNA, 650 bp, Macaca Fascicularis
  misc_feature (1)...(650): n = A,T,C or G
taatcccgatttgaaagannnnnnnnnnnnnnnnnnnnnnnnnnnnnnnnnnnnnnnngnnnnnnnnnnnnnnttacagactttgctggagtttcaagctgatgttaacatcgaggataatgaagggaacctgcccttgcacttggctgccaaagaaggccacctccgggtggtggagttcctggtgaagcacacggccagcaatgtgggnnnnnnnnnnnnnnngggggacaccgcctnnnnnnnnnnnnnnnnnnnnnnnnnnnncgagnnnnnnnnnnnnnnnnnnnnnnntggggctgggggagccacaaannnnnnnnnnnnnnnnggagggctcccccacgttgcctctactttatcnnnnnnnnnnnnnnnnnnnnnnncttttaattaagtcatttgttaaaatacagttctgtcatattttaagcagctaaatnnnnnnnnnnnncataagtgaaaatcttataacaggtttatgaatatatttaagcaacatttttttcacctgnnnnnnnnnnnnnnnnntgtaattgcaaatagctttgactttcttctgaatattttatctttacttggcttttcccttgcttccccttttaccaatctcaacatccaacttgaagactttgtttttaaaatggttg

SEQ ID NO: 2194 - DNA, 2525 bp, Macaca Fascicularis
gtttcaaggcaatttcctcgggagactgaggcgggaaggtcgcttgaggccaggagttcaagtactgcctgggcatcccagtgagaccccacctcttaagaaagaagatggctttttaaatcatttcatttcatataaggtaattttcagaggttggtgcgtggcattggagttgcccagcaattggaaaaagacacaagcgtttgatactgggcattctctctaaggctcttaaagtgaaggcaatcacgtaaggctatcttgcttcatgggtaattaaggcatttccttctgcaattcccaaatctaatgaagaagaaggaatttctcttctgctgaaatatttcatgtaagggtttcatttcttctcattgctccgattttggaaaatgttctttttacctctgattttctcctgtaatgtcttcttgaattgtgagtcaggggaaaacagtaaaagattctccacagattcagacttgcagaaaaatgcttagaatcttgctgtccatgaaaatgaaacatccagcctcacagatgtccacacttctctctcatctgtgagggcccagatgacaggggtggtgaggagtgcacagacgagccagtctccctgggtttgaattgcagctccacttcttcctggcagggtggcctgggcgagtgccgcacgctctcctgtagtgctctctgctgtaaaatgggaagagtcaggttgtctacctcccaagactgttgtcaggattcagtcagtggactcctgtgcttcaagtgtctggcatgtagcggcaggcgaccttccatgtggggacagaggctgccacccattcctttctgaggattcagttcttatagactgcagtattacacatgggagccaaattatgtacagtgtattttcagattttattgactcacctgagaaaggctcggggacattgtcgtgttctaagagatcacttgttatattacgctttttaaatgttgaaggcaataatcgtcagaaattacacattaaatagcactgaaccacatttttaaggtgactcttcaactcaccaagaatatcctggccactaaggtcatgcccacctggggatgcgtcagcgccgtggacgccgaggagagcatagcctcccggtaacgtagcctcctgctgctctttggggtagaccagctgtttccacgcacaggctgcgcattgcttcgtggcagttgagcttgtgttggcctctttccattgtgaaccatggatgtctctctttggcctcctccatacctgggagagcctggctggccacatagtggaactggaaatgcctccgtgctgtcatgtctgcctttcatgtaagatagtagcaaaagttattgttatacattacaaaaaaatgagttgaagacatggattgatttttttcgtatgtacaatccgaaaatgactttagcagagattctggctagtatatggagttgtataagtattgtttaagtatgtaagtattgatagcagcgcatatataggattcccacaattgacagttgtacagttcaaacaccaaactggttttacggggaggaaggtgatttgcagtgatcttttcctcagctcaggccagtctatacaatactattgatatttactgccttggagcagccttggcagccttgtgttctgacctgctgtcagtgttttaaacatttcacttgggttagccttgtcccttcgactagactggaagcccaagaaggcaggagactagtctcagatatttcctggtgtccctgaaagtccagcacaggatgtgcatgtggtattggcctgatggaaactgcttctcaaagtggaagatagggaacacctccgcaggcctatagggaggtactaattggatttgcaatttatttcttttctgcaagtgtggttttatgtgatataaaccaatgcttcccaaagttcacattgtggaaactgaagccagcaagataccgtgaaggaaaatgcatggagagtgttgcagcctgtctccctgttggagtttttgatgcacaatacccagttaagggctctgagaaaccctctgtttgaaaatacccttgtttaacttaaactctttcttaccaaaccggctttgccacgcccttctgctttggctgtgtagatgctgttccagtcctggggagcacaggtgtgtccccaggtactttgagaaggtagagttttaattacttaaccagcaacatttgggacgtcctgagacctcctcacttctaatatgggaaaagtctgtgagcaattgggattttactaatatgaaacccagaacattccaagaagtcataggagcacaggtcctaggtgttttattttttccagctttggaaagttaggacagctcataagcctactccacaggacagctgtagcacagacaccttccccagggacccccattggctgtgtgtcccccagcttctaattcctctagcaaatcaggcccaagttattgcactctttctgatccccc

SEQ ID NO: 2195 - DNA, 585 bp, Macaca Fascicularis
aaaaaaaaaaagaaaaaaaaggaaaagaagttaatatatacaaagagtcctccaaggcctggctgggtggaggggcgctgctgagagcgtccactgggcacccgcctctgccggccccctgccgggcgcccgaaccccaatttctggagctgcagccgtcccgcgccccacccaaggtgggcaccttcccctcctgtgcccagggcggtgggcgtggtgtccacctgcccctcccggtgcccacggtggatactgcatgatgtgaaccttggttttgaactctgttcctgcccctccccgaccgccctggcctgtgcccgccccgtgcctgccgtggctggtgggtggcggtggtggggccgggtgggcccccgcccagcgcctgctggaatgagaagcacagactccgccacggactccttttccctccctcctccgccctcctcccgccccaccaggcctggcggcccccgcccccctcactggccattttggggggagtgagccggcttcgttgtttccaggggtaatgtgtgtctgttgttcgggttttcaaaacagggaacactcgtacgcctcgcatgc

SEQ ID NO: 2196 - DNA, 751 bp, Macaca Fascicularis
  misc_feature (1)...(751): n = A,T,C or G
tgcaagggaccgcannntgaattttacatggagtctcctgattttcaaatgtttatgcatatttaaaaaaacagtnnnnnnnnnnnnnnnnnnnnnnnnnnnnnnnnnntgctgcttcagctctacctactgctcactttgaccaggactgattcnnnnnnnnnnnnnnngatgcatcttgagaaatagcattcataataaatgnnnnnnnnnnnnnnnnnnnnnnnnnatnnnnnnnnnnnnnnnnnnnnnnnntcttccaaataagacagtaagattttaagttaaaaattcagttataataaactaaacatggcaaacatacttcagtgctacattagtttaaaggttacctggagctaattctgtgcgtgtgctttttttcccattcactctggggaagaagatgatgtaataaatatttctatgtttatttggagnnnnnnnnnnnnnnnnnaaatgctgagtgcattttcaaaaatcaaaatcagcaattcaattatttttctttattagaacagccaggagtgagcttgttannnnnnnnnnnnnnngttgtagcttgctnnnnnnnnnnnnnnnnnncgaattaaatgagtcacgagtcnnnnnnnnnnnnnnnnnnnnnnnnnnnnnnnntcagaaagaatagctaactgagtcaaacatcagtaattttttttcttggctcatcttagagggcttgtgttcttagctacatatgtgtggacttgcattttaatctgaaata

SEQ ID NO: 2197 - DNA, 574 bp, Macaca Fascicularis
  misc_feature (1)...(574): n = A,T,C or G
cannnnnnnnnnnnnnnnnnnggtcggnngctgcccccgcccaaggccagaacgatnnnnnnnnccaccaggatgagtatgagcacgaggtggactggtggagcaagctgnnnnnnnnnnnnnnnnnnnnnnnnnnnnnnnagtacaagtataaagactaccacaccctcaaggtttgaaggagggaagaaaggggatggaatcaaatcgcccactgcaggaggccagcagagctatagcctcgattcctccgggaagcctccagtcgggggggttccnnnnnnnnnnnnnnnnnnnnnnnnnnnnnnnnnnnnnnnnnnnnnnnnnnnnnnnnnnnnnnnnnnnnnnnnnnnnnnnnnnnnnnnnnnnnnnnnnnnnnnnnnnnnnnnnnnnnnnnnnnnnnnnnnnnnnnnnnnnnnnnnnnnnnnnngttccacacacccctgcaggtgtacgactgtgagctggaggccgtgccagccttccagggcctgcagnnnnnnnnnnnnnnnnnnnngctctaccaggagcagcccaagctggacagccccgtggtaggggagttcaaggtgtg

SEQ ID NO: 2198 - DNA, 725 bp, Macaca Fascicularis
  misc_feature (1)...(725): n = A,T,C or G
taaatctttctgttcaataatacataataagcttgagtggtggtttcagtaaagttannngagataggcacgtcaatgttcacaaacatctatttaaaattctcagtggcaataaagtttacgttttaaatgataactattataacatgagtcattttaaacctaaatagtttcacataactctatgcattcaaactttaattcaatgataattactgggaggggctgacacaaacattaattacatattaaatacacctaaattatatgtttgactattgaaatgagtgtgtgtgaatagttaggctgaaaaatccaactatctaccaggttgatatgtaaaatacataacatatgaaaagatggaaggaaaaaagtcttttagtggttgagaaaaagtctggcttaaatagctaaaatgaggttctgaatttgtttctagtttgtaaacacttatctagagaaataccattgcttctgtatcttctttgacaatcctctctaattgaacagtgctaaatgactgttttaaaagcaagcttttaagatatttttttctcagggagaaatattgcttttattgtaagattccttctggaagtaccataggttgcaagaaatgcacattggtttacctcactgaatgctnnnnnnnnnnnnnnnnntggagctcaaaaccataattatgaaatagctgaaggagacatctctggtanctcttaatt

SEQ ID NO: 2199 - DNA, 1920 bp, Macaca Fascicularis
catcatagcaagcattcaatgcgaacaactttttaattaactcaattaccattcatacatcctaaaaataaaaagctcattattcattaaaatcaactgatcccatttttcttaaaatttccctgaaggcaaatgtctggagcacctttcccttgtgggggtaaaaatcctaaattgctttgtttttcattccctgctattcaacatgggagcaacatagagaccgtcaacaagttcagtgaaccaaaatagcccatttgcttcagtaaaattatagctagatgtgcaattttttcctgcaacttctgcaacatctagcctgtcaaataaccttcctaccattctgtgttaacccaaagaacataaagaccctaggtaaatatttgctatatattactccaatccatagaagaaataaatgttttgggtaatacataggcttccttttcttttttttttttttaagtgataaggcttataacaattagagaaggcttcttattggtcttacacagaaagatacatcaaaagcagcacgaatgaaaatgatttggaaaaggttaaagttagtgctctgctgaagtgcctttgatatagacttgcattagtagaaggatataacatcttttttaagtgtgcattttctttcagttaaccaaattaaacagatgtgcagttttattaaaaatatagacctagtgtttcatgttggaacaataaattttgcatgtgagtagttcttgttttttgaatacagtatatattgatgataaattatgttggaatgaagtcagaaactatatagcaaaactttatattttaagtgtttatttttcccacctttaaataaaaatgtttcatctcagcttggtaatgaaatacacatattggtgtaagggtataccattcaggtatgccacttattttattcatttttgtgtaagggaaatgagatgatgtatcccaagggcttttctggaactacttgtttgatttcagaataaaacattattatttttacactgcacatgctgttcgcaattggtaattataggcaatttatcttttctaatgatcaaaagagtgtgacttctcatttgtgagtagttcacaaatttcctgttaaaaagctgaagccatctaccttttcttaacccaagtgataataaacaatattcacaactttcttaaatttttaaattgaaaactaaggttttttcaaatataaacctagatgattttggtcacaaattgttaacgtttgtcgatccattgtatatactttggatatatattaaaggcaaaactatctctcgactaactgatggattcatttactaaagcacagctatatgtatttttgaatacatattatgatcttgagactttataaatcaatttttatgactttatgcagttgtatagggattatgcccttttataatacatagtataccacaaagatcacaaatgttgaggaatgaaagcacttctttgctttggcaatcattttcaggccactatgtgtttgaatcctctggtattgatatgtattatagggttttagagatctgtgggtcaaatgatgtccctcaaaacttcccagaaaggtgaaactcaaagtcacacattcatttatagggcgcatgagtttctcattttcccatgtaccagcattgtaaaggaattcagctgtattaatttctatttcagatctagaattgacattttgccttcttatttccaggtgtttctattttttgtattctttcagagaaatctcatatttcggtgtatttattgctgttactactatatttactgctgaaaattgtaacaacctgaagatttgtaaaatgttaaacatagttcattaaaaataataaaataaatctaaaatgtgaaaaaaaaaaaaaaaaa

SEQ ID NO: 2200 - DNA, 728 bp, Macaca Fascicularis
  misc_feature (1)...(728): n = A,T,C or G
gtgcacccgtgtgtgtgttaaggaaaggaaaggattngggctggggagcaaaaggtaatgtgaaaactgttggactgtctggtgagggnnnnnnnnnnnnnnnnnnnnnnnnnnnnnnnnnnnnnnnnnnnnnttccccctggggctggcccactgtgtcctgaatgtttttgttattttttgttttatgtttttaaactgctgtttttatatacctggaatctgttgttggctacnnnnnnnnnnnnnnnnnnnnnnnnnnnnnaggattgggaggtccagtgtctgccctcctgccgtgcaactcaagttgggcctttcnnnnnnnnnnnnnnnnnnnnnnnnnnnnnnagggccatgtccccaagcagaggtggagaagggacactgaggtgagcaaaggcaggaaggggcatccactgcaggtgaccggaggccggnnnnnnnnnnnnnnnnnnnnnnnnnnnnnnnnncttcactctctgccctctgccccactacggtggggcggtgaggccagagcccacctccccaacatgtgaagaccgtgatgggcatgtgcccacactcccacttctctagccgtttgcagaggctgccgcccggcaggggcctgaaaagnnnnnnnnnnnnnnntttctgtgaaatgttttaatgaactcatgttgttgctggttgtcctggcattgcacacactgtatgtacatactggcaatattgtcaaatgt

SEQ ID NO: 2201 - DNA, 567 bp, Macaca Fascicularis
  misc_feature (1)...(567): n = A,T,C or G
gaggcgggcaagccctctntatgtgtttttattcccaccttccccggaatctggggagggcttttgttttcacattttcaagttcagcgttgtattcaggacagaagctgtgactgaagactgtgccaaggaaaggggcttcctgtgtgtccctcgggtttggggctcttctcagagagcagcactccttgtcccttactgtcaccttcactccccacacagctcatgagatgtgtgaccccttgtttgagttttggtatttggtagtggagggtggggggatgggggccagcagctgtcatcctcctgggaagccgagcagcatccctggtgggtaacacccttgagtctctttgccagtgaggcccaccacaccagtgtgagttaggtttctcatctggagctgtttctcaggcattcttcccgaccctcttccctttccccttcggtgtgcctcagtggtcccctcaaccggactaattaaagaaagacacttgtgttcccaagtggtggttttatttttttagtttttatgtttgtatgggaaattgtggataaaggaaaaga

SEQ ID NO: 2202 - DNA, 758 bp, Macaca Fascicularis
  misc_feature (1)...(758): n = A,T,C or G
tcagtcactaacaaatattatgagggnnnnactaggtgccacacattggaagacagtggagggtgaagcagagtctgccctcagggagcttacagtttagattacaggcaagacagcacttacacacgtaatnnnnnnnnnnnnnnnnnnnnnnnnggtgcagaggctttgaagcagaagcataaggtgcaatgggaacataaaacagggaagcctaatgcagactaaggggcctgaggagggttcctcgagaaagtgaggttgaagctgagaacctgaggggtggtttgcatgcagtacaattgaaggttgaaannnnnnnnnnnccaatgcacaaagaatttatnnnnnnnnnnnnnnnnnnnnnnnnngatatatttgggaatgtaggtagaaattaactgtcttgccttcatatacagtgtagtggagaccactgtggatctccaactacttgtcttttcttagtaacaagtccccagtttttgctaggtacatagctacccagagaaaaaattatgtggccaccttactatgtttnnnnnnnnnnnnnnncagcagaggtaatgtgcggggcctnnnnnnnnnnnnnnnnnnnnnnnnnnntactggctggnnnnnnnnnnnnnnnnnnnnnnnnnnnnnnnnnnngctaaggttggagagtcagcatattacatggagcctccttctctgatggccatgggctgtgatacgagccctggattgcctatttcccgacttctttgaaaannnag

SEQ ID NO: 2203 - DNA, 683 bp, Macaca Fascicularis
  misc_feature (1)...(683): n = A,T,C or G
gagataggtaccttttaatgacnnnatcacctgtnntgtctaggctttgcttgcttaaaagctcctggttgttatttcaaagtaagggcttccagtacactgactttaaaaaaaatnnnnnnnnnnnnnnncttttatatnnnnnnnntcacatttagtctttttcttttttttcttttttttgcacagttctnnnnnnnnnnnnnnnngatgtaaatttaacttattattactatcaatgttgtagctgtttgaaaagttgggcagataagacaggactgtctggtgtgtcactacaggctcttctctgggggacacagagccattagtctgcannnnnnnnnnnagctgtggatcatctaagggcccatcatctagtccaattttgccactttttcttccataaaaaccattcgagactgcaaggccttgctgttctccacatttgtaacatgccacatccaccaacatagcaactatatcaagaaagaagcnnnnnnnnnnnnnnnnnnnnnnnnnnggactcttcctaatgatcactgtcacattttctgaatgtacccccagaacctttgggaaaaacacgtagaattaatacaatgaagtaaacctaatcctcacaaaatatttatttcatagtctcttctagacttttgacaaattaatttcaggatcactgggag

SEQ ID NO: 2204 - DNA, 3360 bp, Macaca Fascicularis
cttacactctcctctgccagaatcactcagaatgcttcccgggtgtatattcttgatgattttactcattcttcaggttaaagaaaaggtcatccttggagtagagggtcaacaactggtttatcctaaaaagcttcctctgatgcagaagcgagatattggacacacccatgatgatgacatagaggaaacgtatgaagaagaattgatgtatgaaataaaactaaacagaaaaaccttagtccttcatcttctaagatccagggagttcctaggctccaattacagtgaaacattctactccatgaaaggagaagcgttcaccaggcatcttcagatcatggatcactgtttttaccaaggatccatagtacatgaatatgattcagctgccagtatcagtacgtgtaatggtctaaggggattcttcagagtaaatgaccaaagatacctcattgaaccagtgaaatactcagatgagggagaacatttggtgttcaaatataacccgagggtgccgtatgttgccaattattcctgtacagagcttaattttaccaggaaaactgttccaggcgatactgaatctgaaggagaccccaaaatgaaagctatccataatgaaaagtacattgaattgttcattgttgctgatgatactgtgtatcgcaggaatagtcatcctcacaataaactaaggaaccgaatttggggaatggtcaattttgtcaacatgatttataaaaccttaaacatccatgtgacgttggttggcattgaaatatggacacatgaagataaaatagaactacattcaaatatagaaactaccttattgcgtttttcatcttggcaagaaaggatccttaaaacaaggaaggattttgatcatgttgtattactcagtgggaagtggatctacacacatgtgcaaggaatttcttatccagcgggtatgtgcctgccctattattcgaccagtatcattaaggatcttttgcctgacacaaacataattgcaaacagaatggcacatcaactggggcataaccttgggatgcagcatgatgagttcccatgcacctgtccttcaggaaaatgtgtgatggacagtgatggaagcattcctgcactgaaattcagtaaatgcagccaaaaccagtaccaccagtacctgaaggattataagccaacatgcatgctcaacattccatttccttgcaattttgatgatttccaattttgtggaaacaagaagttggatgagggtgaagagtgtgactgtggccctcctcaggagtgtactaatccttgctgtgatgcacacacatgtgttttgaagccaggatttacttgtgcagaaggagaatgctgtgaatcttgtcagattaaaaaagcagggtccatatgcagaccagcagaagatgaatgtgattttcctgagatgtgcactggccactcgcctgcatgtcctaaggaccagttcagagtcaatggatttccttgcaagaactcagaaggctactgcttcatggggaaatgtcccactcgtagggatcagtgctctgaattatttgatgatgaggcaacagagagtcatgatatctgctacaagatgaatacaaaaggaaataaatttgggtactgcaaaaacaaggaaaacagatttcttccctgtgaggagaaagatgtcagatgtggaaagatctactgcactggaggggagctttcctatctccttggagaagacaagacctatcaccttaaggatccccagcaaaatgctactgtcaaatgcaaaaccatttttttgtaccatgattctacagacattggcctggtggcgtcaggaacaaaatgcggagatggaatggtgtgcaacaatggtgaatgtctaaacatggaaaaggtctataactcaaccaattgcccctctcagtgccatgaaaatcctatggatgaccatggactccagtgccactgtgaggaaggacaggcacctgtagcctgggaagaaaccttaaatgttaccaatgttgccatcttgattgttgtgcttgtcctggttattgtcggtatcggagttctcatactattaattcgttaccaaaaatgtatcaagttgaagcaagttcagagcccacctatagaaaccctgggagtggagaataaaggatactttggtgatgagcagcagatgaggactgagccaatcctgccagaaattcatttcctaaatcagagaactccagaatccttggaaagcctgcccaccagtttttcaagtccccactacatcacactgaaacctgcaagtaaagattcaagaggaatcgcagatcccaatcaaagtgccaagtgagcttgacgttggatatccaaaatggctgtgcaagcctgggcttgggattctggatgcaagatctttacaaccttacctagatatctgctactcaaatttttggtagtttttcaagtgtcctctatccagacagaaaatgtttaagagaagcaacttcttcctgttaatatttaccggtagaattcacaccctctatcataaacatacgctgcagaaaaacatttctcgtggtctttcaaatgctctttactgcaatataaaaattcgtactcttgccatagtattttcctacaaaatgttactctagtttattttaagagtccaaactttgaggatgataacttacagtctaggaagaaaacattgcatataaaaagttacttctttggaaatgtaaaagtactttttaaaacttgaaatcattagcactaactctggtttaaatgaaattcctgcagaaatgccaaagaaggcagggctgagtggcatggattctactaggtaattgaaagtgaaagaggcagaagaatagtggacagaactgcaggatagtccttaaaataacgttggaaggaaaggaaaacacagaatactcctggcaattctaaattcctaggtttacctctctagaattccttaagaagctgacagagaaatcagagggttacaagaatttcagaaagggtacttcaagtgaggacatactcaaaactcctatgaagcgtttctaaggtctttatcatgtgctacttgacaatgtgctatttctgtgccgtctccaccccctacctgtctgtctgttatgggatggggggttaccctgggaatgatttcagctgctgcttacacagatgcctctcaaggtgttcttttgtgtcctctattttcttcttgcgaactgttaaagctacatgcaatattttttttttccatttactgaaataaagttttcaagtgctaaataaaaatattctgactcgatgaaataaataaaggct

SEQ ID NO: 2205 - DNA, 714 bp, Macaca Fascicularis
  misc_feature (1)...(714): n = A,T,C or G
aaagtagaccaaagtacaacttccatggcaaaagatgttggtctcaagattacaactgtaaaaacagatatacgacggatttcaggtttagtaactgatgtaatatcattgacagattctgtgcaagaactagaaaataaaatagaaagtagaaaaaaatacagtaaaaaatataggtgatcttctttcaagtagtnnnnnnnnnnnnnnnnnnnnnnnnnnnnnnnnatctgaaaattcacaaagaattaactctgttaagaagacactaaatgaactaaagagtggcttcgacaaacatacagatagatttctaagcttagaaagtgacagagccaaagttctgaagacagtgacttttgcaaatgatctaaaaccaaaggtgtataatctaaagaaggacttttcccgtttggaaccattagtaaatgatttaacactacgcattgggagattggttaccgacttactacaaagagagaaagaaattgctttcttaaatgaaaaaatatctaatttaacaatagtccaagcctgagattaaggatattaaannnnnnnnnnnnnnnnnnnnagatatgaattagtctgacattggcattagagtcaaaggtaatgttttaatgggacctctcgtgagaagactggtaaatcagaaataatattttggagtaaaagtcattttatgtttaatcctattttgtacagtaaaaa

SEQ ID NO: 2206 - DNA, 736 bp, Macaca Fascicularis
  misc_feature (1)...(736): n = A,T,C or G
tgtgggcccggtgctgtgctggacccctcaaagcatcatctcacttcacnnnnnctgaaccctgtagggcaaacgttgccccattttatagatgaaaaaaccttgaggcttgaagaacccgattgcccatgacactcagttaggtgggggcagtatcaggattcaaacccgtcagtaggcctccagagccccactctggtcacaaacacccgcagtctctcccaacccagcctcaccatctgggtgtccagtaactctcctggaggcagcggcaaggccaggggcccacagtgtccacaggcatggctcacagggaaacgcagtgcagcgcacacagaggtctgggtgcaggcagaagccatttcctgcccagccgggtcccggtcagcccacccagtcacccgagccaccctggggccatgctcagatagtctctgggtccacctgtgcctgccttgctacttccaggcaccttgaccgagggctgtgccccaccccccacacacacacacgttagccatgtgtgcacacgtgtgcccacgtgcacatgcacacgcatggaatgggaaaacagaaagcaactctttgcccccacaggaagggggtcacttcttggcctggtcttgtcagctgcagcccctgggcctctggggggccgtgtcctctggccatctacctagggtcacccctcagtaaagaaccctgggcaggaatcccatnnnnnnnnnnnnnnnaa

SEQ ID NO: 2207 - DNA, 2077 bp, Macaca Fascicularis
ctataatttttgaaatttggtttctctttttttgtgaaaaatcagaaaatcataatgttttatacaacttactactgaagaaaacactttaaagattttaatatgctagctctctttttcaacatcttacatatttgaactctattttcagaagactttatgcttttcaattattgtaaatcagagcacatagtaccttgggaattttaaagtatgattatttaaattaattagtatattatctttccatccttgtttaggcagtgcaatgattggagggtttgcaggaagaataggagcttctaacatgggtccagtaggatctggaataagtaggtttaaattttactagaatttattcagtaatatttgagtgcttgcaaagactttgcaagagtagttattgtagtatagtaatactttgttcttatatgttaatgtgtcttgctataatttgagaaatcttgataattgagtgaagcctttctgtttggttattgtttgaaatttctaaattaactgtttgaattttacttctttgatatttctaaactgtgtgttaatggccagtccaagaaccttctttccaactagggaatctggggatttctctgatcatgtgtcaggaacaagttttgctttagcaccaactttgtttcctttcttattttctataatagctattagtgactagctttttttgtttgtaaacatctgtgtcttttggtaaatgcagatataacactcttaggtatctcctgaacttgagtcaggctaaggttgaaagaggtacttatttcttttcctcttgaacctttcccgtaatagcatcaagagtagttgcaacactggggaatgccgaatctcccatccgtccatttccactactaccttttaggtcttacattaagcctgaatacatggagaaattgatgtccgcttggatcgtaatgcataatttcaagccatggttggaacattcctacatctgttttgctgaatctcctagtaaaagtcatttttttttaagtaatattgtatgcttacaaaagctgtaaaaatgaacttttaaaactcccaccagctcttaacagtataatgttaaaaatatactgtaatttttgttaatctcaagtttgggtttttaaagacagcaagtctggtcattcagtttaaatgaatggttatactgtttttaatgaaataagccattttcttgttgttttcagtactacatagttggatttgtttgttctagtttctccagtttttgtcaacttattgtatggtaaaagagattttttgccccccaaaacttctgttttataatatgtaattcttcatgaaaagaaagggctcagaaaaattaggatatgattttggttggttttaaattactgtaagttttagattctaaggttcaggatttaaaaaatttgatttaaatgaagaaattgatttttctctctgcccctccctgccattcatattttctgcataacactgttaataatatcaacctccacagccccttattttattatttccaataattccaagttcatatagaactgataatgtagcaagccccaagtatgataataggcagactattcccaactttctgtctagtttccagccattgaagtgaactgctaaaaaaagaaaaataattgaaacgttgagagagatggttgtgtaagttagtcctctgctgtttacttctataggagctgatccatttataaatgcagttttaataaaccatggaataccaaggcacaacatatcaaacacattggatcccacgatgttagacatagccatatctcctttccctacaaaagaaaagcatattgttaaaatgtgcttaccaatactgtattttattaatcttcataagaaaagaaacactggatacttttttgttgttgattcattttggaaaattgttagagcaaaagtcttactgaatttgtatttttaaatttttcttgggttagtatttaaagtcttaacatttatttaattatatttattaaaccatttttcaataaggtaaaaaaaaaaaaaaaaa

SEQ ID NO: 2208 - DNA, 631 bp, Macaca Fascicularis
  misc_feature (1)...(631): n = A,T,C or G
agcaagactccatctcaaaaaaaaaataaaaaagaaaagnnnnnnnnnnnnnnnnnnnnnnnnnnnnnnnnnnnagtttnnnnntactctcacatggaccacagtatacatttctaagtgctgtgttttgtttgtttgtannnnnnnnnnnnnnnnnnnnnnnnnnnnnnnnnnnnnnnnnnnnnnnnnnnnnnnnnnnnnnnnnnnnnnnnnnnnnnnnnnnnnnnnnnnnnnnnnnnnnnnnnnnnnnnntgtgcccagcctgttctgtgtttttttaagctgcaggagaatttttttaaaaactaattctcactatttgttcagtctgtcttcatcgaagtttgtggttgcagtttaaagttaaagtgactnnnnnnnnnnnnnnnnnnnnagactagggtaatcatctttnnnnnnnnnnnnnnnnnnnatatttttccagtgagccnnnnnnnnnnnnnnnnggttgttgagcatgctttcagagcannnnnnnnnnnnnaaacttcgcttatgttttctgttcaacactacctgtaatattttaaaactgattaatgtgatgtgaatacatttatgtaaatttatgtttaaatttgtaaatagctttaaattgcnnnnnnnntgt

SEQ ID NO: 2209 - DNA, 762 bp, Macaca Fascicularis
  misc_feature (1)...(762): n = A,T,C or G
catgtgtgtttttgaaacagagatactggttttgtagagtttgcctttgggtatgttntcttttttctttttcttaaatctccaaggaagagaactggctaaaatagtaggaacatgaaagtattaaatgccaattaattgttgtagtaaagtatcctcagtagcgttacactctatcatatctggaccctgtgaaaccaaaggggaccatttaggtctaaaaagagacaggtctgagactgggtctgtcacctgggcattttcaaagaggacattttgaagaatttgcatattctgatttttaaattgcacttaaccatacttcattacagattttttgggtagggaggatgggataggccagggatgggatggnnnnnnnnnnnnnnnnnnaactaatccgactcatttacctttctttattaaccttggcctgtcctaaaaacagaatgactattttatcatgagttgctctgagttttgttaatgtttgtgttggtggattgatggttaaatgaagcatgtagctggaatatgaacttttggagttttcatgttgtcctggatttctctttgtaaacctttaaaccttagcccctgattgattgtgttaaacctattatgagaatgttatttaaagttgtattataattgcaacctccactaattattcagtactgtagcagcaaagtattatttgtaagaatttnnnnnnnnnnnnnnnnnnnnnnnnnnnnnnnnnngcgnntctagtcagcaaaa

SEQ ID NO: 2210 - DNA, 854 bp, Macaca Fascicularis
  misc_feature (1)...(854): n = A,T,C or G
caaagaacatgaaatttagttgtggttannnnnnnnnnnnnnnnnnnnnnnnnnnnnnnnnnnnnnnnnnnnnnnnnnnnnnnnnntttggggagcctctaaaaaaaactcttcactgggggtcaagtggatcattagaagccagagctctcctccaggctccttcccagtgcctagaggtgctataggaaacatagatccagccaggggcttccctaaagcagtgcagcactggcccagggcaccactagacnnnnnnnnnnnnagtttttttttaaaaaagcctatgtatttattttagaatcatgtttttctgtatattaacttgggagatatccattaatatttaggatataagatttgaggtcannnnnnnnnnnnnnnnnnnnnnnnnnnnnaaaaaattctgacttaaagtacaagtaaactatacatctttttttcataagttttaggaactgtagtaatgtggcttagaaagtataatgcctaaatgttttcaaaatgtaagttcctgtggagaagaattgtttatattgcgaaccaggggacagaggggaacctataggtttaaaatagtatgtnnnnnnnnnnnnnnnnnnnnnnnnnnnnnnnnngttttggttgtttttttaagccactctccccttcctatgaggaagaattgagaggggcacctatttctgtaaaatccccaaattggtgttgatgacttttgagcttgaatgttttcatacctgattaaaacttggtttattctaatttctgtatcatatcatctgaggtttacgtggtaactagtcttataacatgtatgtatcattttttgtgntcatctaaagcttttaatccaa

SEQ ID NO: 2211 - DNA, 755 bp, Macaca Fascicularis
  misc_feature (1)...(755): n = A,T,C or G
atgataaggattaagagtgttgacttgnnnnntnnagagataaatgacaannnnncagtttggggcatnntgctgtttgggcgaggaccctnnctgatattctaataatccccacctgtaacctcaggtccctggaaatacagaggaggctgggatcgcttgagacacaaaaatcttcagagaattttcttgaccctctgaagtccttccagcagcagtcctggtggtgctgctggaaacaggcaatgtcctggtctaacctaactctaaaaaaaaggaagatattcacaaagattgtataaatccccaaactgtacccccgtctgcccccaattcagctcccttgcctcctccacacccctatannnnnnnnnnnnnnnnnnnnnnnnnnnnnnnnnnnnnnnnnnnnnnnnnnnnnnnnnnnnnnnnnnnnnnnnnnnnnnnnnnnnnnnnnnagaatataactcnnnnnnnnnnnnnnnnnnnnnnnnnnnnnntcccagcctctatgtctgctttaagtagagaagcagagcttatgagggaggagaacaagggtgcaaaagggacctagatgtcactaagaactgcccttgttgtttagttgaggaaatggggccagacagtggacaagacnnnnnnnnggagacaaatnnnnnnnnnnnnnntgcaacaaacccaggttttctaacttctgattctgttcactctacatcgatgcatctcacctgtccctgcaggtgcacgttttggtt

SEQ ID NO: 2212 - DNA, 1600 bp, Macaca Fascicularis
aagtgcccgggcagccggtttccggtgcaggtggggaaaatggcggtgtccacagtgttctcgatttcatcgcgggtgaggagagagaacgttctagcgtccggggcgggcggcagcgcggattacactttgtcttcttctgtggtctctatcttggggagcgttcgtctgcccgatagcctagggcaagggcaggcccagggagaggccgattctgcagctcaggaaataaaggtcgcttccattctttggtgagcctactgtgtgccggtctggaaataactgcttaaacgacaagtcatcgtccaagactcaattcacctctcacctacgtcgcaggcggggttagcccaacttcctctggacgccccttctccccgttctttagtcgttaatgcctttcgtggtttcacatagtatcttgagctctttgttttgtttataacggacatataataattatgcttgctctgtcaaggcacagcctgttgtctcctttgctcagcgtgacatcattcagacgcttctacagaggtgacagcccaacagattcccaaaaggacatgattgaaatccctttgcctccatggcaggagagaactgatgaatccatagaaaccaaaagagcccgcctgctctatgagagcagaaagaggggaatgttggaaaactgcattcttcttagcctttttgctaaagaacacctgcagcacatgacagagaagcagctgaatctctatgaccgcctgattaatgagcctagtaatgactgggatatttactactgggccacagaagctaaaccagccccagaaatatttgaaaatgaagtcatggccctgctgagagactttgctaaaaacaaaaacaaagagcagagactgcgtgccccagatctcgaatacctctttgaaaagccacgttgagctgtgctggcataggggttcagtctgcggatggtaactacttatgaaggacgttagccttggcttccagcttctctttagatgcccagctgccccaccccagaccactggtcccgcctcaggtggtggacacaaccctttcccaggacatacatgtaaatgcaatgtgactcattctcatacttttttgttcaactgtgagcctcaaaagtgatttgtcagcaatgctggcatgcaggccttgcctggctgctatctctagaggaagtctgccacgagagggcgctgcaggcgaagcaattgtgcttgctcattgcctcagcccaggtgtactcaaagaaaagaggcagccagctgtgcgtgcggtacggaaagcggcccgccctccctgcagctccctgccctcagtggccgagggctttgttgaagtggaactcgccacttccaacctggtatggctccttctgcgaagggaagctgatcccagcctcctgagccaaatccttcaaaggcacagcaggcagaatgagggccacaggcaagaatggcgtaggcacgctgcttaagagtcaacatcttcatcattgggctttctttaaaacatacactttgtaagttgaaagagaattattaaagaatactgagaaaaggaaatttaaaaaaaaaaaaaaaaa

SEQ ID NO: 2213 - DNA, 706 bp, Macaca Fascicularis
  misc_feature (1)...(706): n = A,T,C or G
tgatnnnnnnnnagtccnnncatatgaatcacttacagtttagaaaacagagtnnnnnnnnnnnnnnnnnnnnnnnnnnnngttggccctatgacttttaagcannnnnnnnnnnnnnnnnnntttctaatttgatttaaacttgtgcatggannnnnnnnnnnnnnnnnnttatattcaagatnnnnnnnnnnnnnnnnttataccaaaggactcatagaagagagccgaaaacaagcaggggacgcagagacannnnnnnnnntggaggaggaaaggcccattgcgactgcaagcaaagggagaagggaggctctagaaaagtgacagnnnnnnnnnnnnnnnactccctgctggggaggcnnnnnnnnnaggcagagnnnnnnnnnnnnnnnnnnnnnaggccttggaggtgtcacttaatttactgtggtccttccaggagccctgggggcctcgcccagctgacttaggagctaccacaaagttagctacctgtaagacagatggtgcttgaannnnnnnnnnnnnnnnntgaataaaataaattaaaaagcctcctcctgaaccaagattttttggaaagaattctaaatagatgaaaacaaacaatttgatttcaaccaaattgttgtttttttgtttttatcctgattttcaccnnnaattgtcagtctcaaaaataaacactgatacatcccagaaa

SEQ ID NO: 2214 - DNA, 1098 bp, Macaca Fascicularis
atgagggtcccgcggcctcagccctgggcgctggggctcctgctctttctcctgcccgggagcctgggcgcagaaagccacctctccctcctgtaccacctcaccgcggtgtcctcgcccgccccggggacgcctgccttctgggtgtccggctggctgggcccgcagcagtacctgagctacgacagcctgaggggccaggcggagccctgtggagcttgggtctgggaaaaccaagtgtcctggtattgggagaaagagaccacagatctgaggatcaaggagaagctctttctggaagctttcaaagctttggggggaaaaggcccctacactctgcagggcctgctgggctgtgaactgagccctgacaacacctcggtgcccaccgccaagttcgccctgaacggcgaggagttcatgaatttcgacctcaagcagggcacctggggtggggactggcccgaggccctggctatcagtcagcggtggcagcagcaggacaaggcggccaacaaggagctcaccttcctgctattctcctgcccacaccggctgcgggagcacctggagaggggccgtggaaacctggagtggaaggagcccccctccatgcgcctgaaggcccgacccggcaaccctggcttttccgtgcttacctgcagcgccttctccttctaccctccggaactgcaactgcggttcctgcggaatgggatggccgctggcaccggacagggcgacttcggccccaacagtgacggctccttccacgcctcgtcgtcactaacagtcaaaagtggcgatgagcaccactactgctgcatcgtgcagcacgcggggctggcgcagcccctcagggtggagctggaaactccagccaagtcctcggtgctcgtggtgggaatcgtcatcggtgtcttgctactcacggcagcggctgtaggaggagctctgttgtggagaaggatgaggagtgggctgccagccccttggatctccctccgtggagatgacaccgggtccctcctgcccaccccgggggaggcccaggatgctgattcgaaggatataaatgtgatcccagccactgcctga

SEQ ID NO: 2215 - DNA, 743 bp, Macaca Fascicularis
  misc_feature (1)...(743): n = A,T,C or G
cacattttagnnnnnnnnnnnnnnnnnnnnnnnnnntgacacaatnnnnnnnnnnnnnnnnnnnnnnnnnnnnnnnnnngtttgaggaatcaggagaggcccaggccttctctgtgcctggctgaaggtacagagctcgccgtgtctccgatgaggtcagaagtgtctctatttcataccacaaaggaactccgagtgggagtagagaacagacgggtggcgcggagacctctgcgtctccccagagaaaggaagaaacttaagaaccgtcgtggcctggtcctccaacatcttacagatcttgttttccaagagaaaagnnnnnnnnnnnnnnnnnnnnnnnnnnnnnnnnnnnnnnnnnnnnnncataagaatcaggccactgcctgggaagannnnnnnnnnnnnnnnnnnnnnnnnnnnnnnnnnnnnnnnnnnnnnnnnnnnnnnnnnnnncgcccccagggaataagggaactctttataacccgtccagtgctgtcatctgggatttttctctgaagtacgagaatttnnnnnnnnnnnnnnnnnnnnnnnnnnnnnnnnnnnnnnnnnnnnnttttcatttaatgnnnnnnnnnnnnnnnnnnnnnnnnnnnnnnnnnnnnnnnnnnnnnnnnnnnnnnnnnnnnnnnnnnnnnnnnnnnnnnnnnnnnaaatgtgtacacttgaattaataggagcacctgtcattgctagtataaagtaatttgtgtggcagt

SEQ ID NO: 2216 - DNA, 2188 bp, Macaca Fascicularis
  misc_feature (1)...(2188): n = A,T,C or G
ttaacaacctggtccacagacttagccacagatgcacttcaaaagactgcctgcgtagccctcgtctccatgctcccatttcctcaggagaacacttcagctttttcttccagaatgggttggctccatccacctaaatgctttgtattcagttcttgcccttcatctgttttctggagtgtcacttgcttcgcaagattaccctttgcttcaggaccataatcaaagggtttttgacttccttgccaaattctgccttccagagacctcaaatgcaggtttttctagactggagggttggaaaaacacctgagttgatgctgtctcaggtcattcttttttgcatttatgtgcacacattctctcttaactttcgttgccttcttgtcaaattaccaccgcccggttaccatgagcctcagatcatttctactcacataatttttatagagcttactttgtgccagagctaagctaagtgttcttaacattgtcatttaatactaattaataaaggtgaatggtgttaaacaatatgcctaaagcaaaggaaattcaagatgtatcagtgttataagattccagaaactctaaaacagtggccagaatttcttttggaagtttaaaggtttttttatgattttttttgttttgttttattatcattatttttttannnnnnnnnnnnnnnnnnnnnnnnnnnnnnnnnnnnnnnnnnnnnnnnnnnnnnnnnnnnnnnnnnnnnnnnnnnnnnnnnnnnnnnnnnnnnnnnnnnnnnnnnnnnnnnnnnnnnnnnnnnnnnnnnnnnnnnnnnnnnnnnnnnnnnnnnnnnnnnnnnnnnnnnnnnnnnnnnnnnnnnnnnnnnnnnnnnnnnnnnnnnnnnnnnnnnnnnnnnnnnnnnnnnnnnnnnnnnnnnnnnnnnnnnnnnnnnnnnnnnnnnnnnnnnnngcgcctggctctatacataagtttaattagagaaattagattaaaaattgtttcctgaaggaccagtatttaatttccatattagtatttcattacttttgttatattttgtttgggaattgtagtgaattttctgctatttgtatccattttttattattgattaattagatatttatacactcgtttggcatctgataatttcccatgggaaaaacatgtttcagcttccaagtaaacttttggaacacagtgtgtttgtttggggtcacttgtcattttttatgaagtgtcccttttaatttctggtcagaaaaaagcaatctaaaatgctgtgctctcttttcactttacaaaaaggagctattaaacttcctttaatttagaattctctacagaacaggattagatagaaatactcaaacattaaaggaattaaaagatgtggttatttgaaacagtataaaacattgggtaaatatgtactagtttgtaatgtatgaatatgaaggcatacatatttggttgctgcataaaaagtttgatacctgctttgggaaagttttataggaacacaaaaatgaagtatattttggagtatgagtgaatgtggcttgcagattcctttttgtcatggcacattaaaaaatgtagaaactttgttttgacaaggttgactcttgtctctctacaggtcttcctttcactcactttagttgttaatggctagaaaaagtctcaggctgccatgctgcttgttgtaaggtatagcactcagctgctggttataaattgaccctcagtttgcaggagaggttttttttgttttgtttctatttttgtacattaaaaagatatatttgtatatattatacaggtacaataatgtttccacttgtgtttttaaagactttttatatagatgaaatgaaagtccaaaaacttcctcatttagagtatgtgcctcatttttggtttagaaaatgtagttagtcatataagatctgttgtaactccagaccattcatggtgtctagctgtccctatgctacaatagtgggttcttcattcttttggattagaaactttttgaatagcagtattttaaatcctagtatgcctaaataccctatacaaccatgtttttataagtgctaaactaactttagacctcaaaatgttttgaagtaggaaaataaaggttagtatctctttaacaagaaaaaaaaaaaaaaaaaaa

SEQ ID NO: 2217 - DNA, 604 bp, Macaca Fascicularis
  misc_feature (1)...(604): n = A,T,C or G
ctggctgcggcggcggcggctactccggcggcggctctnnctgcgncnnaggctcctctggcggcggcagctccggctacgtctcctcgcagcaggtcacccagacctcgtgcgcgccccagccgagttacggaggggggtcgtccggcggcagcggcggcagtggctgcttctccagcggcgggggcggcggggactccggatgcggcggcggctcctccggggttggcagcggctgcgtcatcggtggcgggggctccgtctgcggaggtggctcctctgggggcggcggcagctccagctgtggcggtggctcctccgtggggggctcagggagtggcaagggcgtcccggtctgccaccagacccagcagaagcaggcgcctacctggccatccaaataggtcccccggggtaccacggaggcgaaggagttggaggtgttttccagtggcgccgatgagcttagagctctcaagatgttacccgaggtttgcaaatccttcatgtcttaacctacctgaaagaagccattgagctctcggactgcaactagtgctgctgtttagcctctttggtttctgtacaactacctcccaacccc

SEQ ID NO: 2218 - DNA, 648 bp, Macaca Fascicularis
aagaaaccaactccatcaacctctggctcttaaataacaaacatcatcatccagaaatgtaaggactcagccttggtccaggtggtaaagggtctgtttttctctcttcattagacaggggtctggtgttgctacctaatggtaaaaaggtgactgggaaggcgttgtagggacatggtgggggtggagactccagactcacttctccaggctcatgctgacaggggcctgcttttatttatttttatcccatgactttttcccgtaacttcttcctcataacttttttaaaaaacttttcaggcaactttttttttttactttttttggactttttgccacaatttttccaccatattttttatcccataacttttccatcccacaacttttaattcctgtaccttttttagtttatgttcttttaataaacacacttacatagttacaattttgtgagaataaaaaccgattatctcatgacaagcgtgcccaacatttgcacagtctcaatacctttaatactatagttttcaagacacacaaaattttaaggcaaaaacagcaccttgcaacaatttcataatttattacattatagtagcatcacagaagtcaataatgccactttagacaaaagtcagtatt

SEQ ID NO: 2219 - DNA, 752 bp, Macaca Fascicularis
  misc_feature (1)...(752): n = A,T,C or G
tgacactgagcttcttggacaagcaccagactcacagtgtagaggacctgaaaaaggtgttcccacccaaggtcgctgtgttgagccatcagaagcagagatctcccacacccaaaaggccacgctggtgtgcctggccacaggcttctaccccgaccacgtggagctgagctggtgggtgaacgggaaagaggtgcacagtggggtcagcacggacccacagcccctcaaggagcagcccgccctcgaggactccagatactgcctgagcagccgcctgagggtctcggccaccttttggcacaacccccgcaaccacttccgctgccaagtccagttnnatgggctctcggaggatgacgagtggactgaggacagggacaagcccatcacccaaaagatcagcgccgaggtctggggtagagcagactgtggcttcacctcggtgtcctaccagcaaggggtcctgtctgccaccatcctcnnnnnnnnnnnnnnngggaaggccaccctgtatgcnnccatggtcaagaggaaggatttctgaaggcagccctggaagtggaattaggagcttctaacccgttgtgatttcaatatacattcttcttttgccagtnnnnnnnnnnnnnnnctctcacctctctacatcccaatagatacccgctgtgtgcatgcacgcctgcacactcacggctgaaatctccctaacccaggggcaccttagcattcctaagtgactaaccaaaaaa

SEQ ID NO: 2220 - DNA, 777 bp, Macaca Fascicularis
  misc_feature (1)...(777): n = A,T,C or G
gcatgcacaaagagaactgnnntnnnnnnnnnnnnnnnnaacaaagnnnnntgaagcccagccannnnnnnnnngagcatggaccccagcccannnnnnnnnnnnnnnnnnnnnnnnnnnnnnnnnnnnnnnnnnnnnnnnnnntgctgcttctcttcacctgtggatgctacgttgccctaactaccctgtgagttccgggagagcagnnnnnnnnnnnnnnnnnnnnnnnggacctnnnnnnnnnnnnnnnnnctgacacattgcttctgggtgatgggctgccccagacgccaggctctgttctnnnnnnnnnnnnnnnnnnnnnnnnncccctctgactnnnnnnnnnntctgcctcccagcagctttatctagggctagtgggaactcctcnnnnnnnnnnnnnnnnnnnnnnnnnnnnnncctcggggcaggcgtttctttttcttcttttgttttgtaattctgatctattggtactgcttnnnnnnnnnnnnnnngagggattctgaatgatcaatatagcttggtgagaaagnnnnnnnnnnnnnnnnnntgtccgcctggggcacaggagagggaagtggcagcatgcatgctgtctcttggccttttctgttataatcnnnnnnnnnnnnnnnnnnnnnnnnnnnnnnnntattacttgtttgatccaccccccttnnnnnnnnnnnnnnngagattttattgctgccatttaacacatagggtaatagaggttatgacatctcaacacatnnnnngaagcagacc

SEQ ID NO: 2221 - DNA, 783 bp, Macaca Fascicularis
  misc_feature (1)...(783): n = A,T,C or G
cagctgcagctcgcaggcanncgctcactgatcccgggatgtgattgctcatgccaaagcctggacccctcccnnnnnnnnnnntcacctgatcactccatggtgattgcacatgacaaagccttggacccctacctggatgtgatctgtgtgaacaactccaactcatgacatcatgacaacagggcacctggaattgattcagctgcagctggccacccagtttgagaagtggtgtaagatgtttcagaaacccattattcagagcaagtacagagcggaaatgattgcagggtttcattagggggcaagtcgtatatcctcatccagatatgtgggaagttccgtgaacacatctgcaaatatcttatgatgagatgctcttctccccgccgggcgcctgactgtagtgaaaggaagcttgaaagttaacaccaaccgggcttacgctgacctcctctcctacccatggtttcgtgcccctgtgtctgtcccactgccaaagtaacctgaaatgactagaggaggtgagcgctgaagtcaatgtcctcagagccaaggatattgtcctctagagccaagtccacccctttacttggcagggcctccaagagatgagctgctgtccaccccatcagccctcaccaccagaccaccaggaaggacagacgctcaggtgccagagctgctgccaccgtcccccaagacaccacaaacagtcccttcactgcttccagttgtgtccgcctctgcgcgctgcccccaaactcctgcagattgaaa

SEQ ID NO: 2222 - DNA, 742 bp, Macaca Fascicularis
  misc_feature (1)...(742): n = A,T,C or G
acgatacatgaaatgtgtgaacgtttgaaaagctacagcttccagcagccaaaagcaactgttgnnnngcaagacgnnnnnnnnnnnnngacagnnnnnnnnnnnnnnnnnnnnnnnnnnnnnnnncttgatacctaattcagaaacccaaggaatggctgtccccgtcgtcatggctnnnnnnnnnnnnnnnnnnnnnnntggcagtttatgaaactggccaccaaatcaacactcagctggcctcctgcattgtgtggttataaatagcacccagtgaatgctgtcacccagtctctcctggttgtggtttgaatgatctcgggacgcacgactaaaatggaattacgatggcagatgggaaacgcgcttatgaacaagtgatgggttcacgtgagtcgactgtcaagaccaggaggtggtgcatggtgggacgttgccttccctttcatcacttctttttgattttgagacaaggtcttgcnnnnnnnnnnnnnnnnnnnnncnnnnnnnnnnnnnnnnnnnnnnnnnnncacctcctagctcagcgattcnnnnnnnnnnnnnnnnnnnnnnnnnnnnnnnnnnnnnnnnnnnnnnnnnnnnnnnnnnnnnnnnnnnnnnnnnnnnnnnnnnnnnnnnnnnnnnnnnnnnnnnnnnnnnnnnnnnnnnnnnnnnnnnnnnnnnnnnnnnnnnnnnnnnnnnnnnnnnnnnnnnnnnnnnnnnnnnnnnnnntgcgcct

SEQ ID NO: 2223 - DNA, 996 bp, Macaca Fascicularis
agtcacttccggcagctagagcagatactgactctgtttcagccatcttcgataaaggcaaaaaggaacgactgaagctggtgactgttctgggtgctggccttctctgtggaactgctctggcggtcattgtgcctgaaggagtacatgccctttatgaagatattcttgagggaaaacaccaccaagcgagtgaaacacatgatgtgattgcatcagacaaagcagcagaaaaatcagttgtccatgaacatgagcacagccacgaccacacacagctgcgtgcctatattggtgtttccctcgtactgggcttcgttttcatgttgctggtggaccagattggtaactcccatgtgcatcctactgacgcctactcagtgtgaagatgatgaggatgaaaacctttatgatgatccacttctacttaataatccagaagcagcaagatctagcaattccaaaaccaccaccacgctgggtctggtcgtccatgctgcagctgatggtgttgctttgggagcagcagcgtctacttcacagactagtgtccagttaattgtgtttgtggcaatcatgctacataaggcaccagctgcttttggtctggtttccttcttgatgcatgctggcttagagcggaatcgaatcagaaagcacttgctggtcttttcactggccgcaccagttatgtccatggtgacatacttaggactgagtaagagcagtaaagaagccctttccgaggtgaacgccacgggaatggccatgcttttctctgccgggacatttctttacgttgccacagtacatgtgctccctgaggtgggcggaatagggcacagccacaagcctgatgccacgggagggagaggcctcagccgcctggaggtggcagccctggttctgggttgcctcatccccctcatcctgtcagtaggacaccagcattaaatgtttaaggtccaaaaaaaaaaaaaaaaaaaaaaaaaaaaa

SEQ ID NO: 2224 - DNA, 889 bp, Macaca Fascicularis
  misc_feature (1)...(889): n = A,T,C or G
acagattaacatatatgtannngtgtaacttttgacatgagcctgtaaacatactcatatatgtacctgcacatgtacccacgtggtgtgggtgttattcctttagtatggacttaaagtacttattcgtatagcttgtaacnnnnnnnnnnnnnnnnnnnnnnnnnnnnnnnnnnnnannnnnnnnnnnnnnnnnnnnnnnnnnnnaaaaaagttacttttaaaaatataagttagggctaggcannnnnnnnnnnnnnnnnnnnnnnnnnnnnnnnnnnnnnnnnnnnnnnnnnnnnnnnnnnnnnnnnnnnnnnnnngaacaaccaacctgggtaacatggccagaccccatctctaaaatatatatatatatacacacacacacacacacacacacacacacatatatatgagttatatctagagagagatatatatgatatattgtatatatcatatatatatattgtatgtatctcatatatatatataacttagagtttgtatcttcacccaaaagaggctgtaatatttacagcagcctcaaattgctcttaaggggtttgggtgtgcagaagctttcctttccctacccagggccctgtgactacctaacatgttgtgtactgatctgtttgctggctgtctcccctgccccactgctacaacagaggctccaaaagagcagggactttattattcattactgcatccccagtaatgaaggtacttagaaaataattattgaatgaatgaaatctaaactgaatctgagggtgtnnnnnnnnnngtttgttttattgaattgtagaaggacataactgtgtgttcagtgtttttgtgcaacaaacttgtacattttatttcacttgtgttttgtcttaaa

SEQ ID NO: 2225 - DNA, 764 bp, Macaca Fascicularis
  misc_feature (1)...(764): n = A,T,C or G
cagttggggtggagannnnnnnnnnnnnnnnnnnncnnnnnnnnnncccagtccgactttatgagttttacctgtcaaaatgnnnnnnnnnnnnnnnncagaggaatgatgtgttttaccttcaacctgagcgctcctgtgtcccgaatagccccatgtggtactccacattcccgatagaccctggaaccctggacaccatgttaacacnnnnnnnnnnnnnnnnnnnnnnnnnnnnnnnnnnnnnnnnnnnnnnnnnnnnnnnnnnnnnnnnnnnnnnnncagattaagacggaagtgaggttcttattttcatacatattggtatgcaccaaactgtgaannnnnnnnnnnnnnnnnnnnnnnnnnnnnnnnnnnnnnnnnnnnnnnnnnnnnnnnnnnnnnnnnnnnnnnnnnnnnnnnnnnnnnnnnnagtgtggatgtgcaaatgaaaattgaaggaaagaatatgaactgagaaatgttnnnnnnnnnnnnnnnnnnnnnnnnnnnnnttcagaatgactaatttctccgagtggtgcataatcttattttgtttgggagtaacaaattgtggaatatttttaaggaaaactgttgtataaaactctaccatagtaaccttagaccttagagaggtagctttggagtgaaactttggctgcaataggctacttgggcaagccctccgtaaaagtcagaggagagatcagtacagagctaagagtgacatcaaatgaggactgtgggacccagattga

SEQ ID NO: 2226 - DNA, 674 bp, Macaca Fascicularis
cagcttttacagactgtaaaggagatctgttgtttgtgatgatggagcacagtcaaatctgtgcttctaactgagatgagagtgtattaatcacgtatcgcagggctccagctgttttagaagccacatcatgttaaacattaactggtttggattaaaagaacattaataaaataatacacatatcttagtgataaacagcttttttttttttaaggtcagattgcctcaggttcagaaagaggctgagaaatcaaatcttgaacacaatcaacttacatattttaaaggaatgtgcctcaaatgagaaaatatactagttgtctagatagaggaaagagatatttaattttttttaattaaaatagatatgaaatctactggcagtaaaaggtaaagccgagaagaaactgaaagctattctcatgttaccaaattctatctgcccatatgtttttgtataacattttggtgacagtgggagtcggtccctttcccagcctgcagagactatcttccaatacagaatctgtctattatgcttgtgtttacaaactgtgtttgttgggtttgggtttttattttctttggtggcatttttcaggtcactatgcttctataacaaaggtaattgttttcaaataatttgtcttcaccttttcccgtatttgtac

SEQ ID NO: 2227 - DNA, 699 bp, Macaca Fascicularis
  misc_feature (1)...(699): n = A,T,C or G
aaagacattgagcgtattggggctcaaggctgggtagagatggggctgagtcccaaggaccttggacggagctgaagggagataggaaggccgggggttgggggcagaagatgaagaatggatgaggactgtctgcctgcagggacaggggccaggaggcagggcagggcccctcgtgagcgggtaggggtgctggggcacctgagnnnnnnnnnnnnagaaggggctgcagggagagctgactgcggaagtcgttgtctnnnnnnnnnnnnnnnnnnnnnnnnnnnnnnnnnnnnctctgggcagcgcagatactccaacaatggacgaggtcttcactgcgtcccaggagggatcacaggccccaaagtgatgtcagtggagtttgagagttgggaacaagggcccggagtagccagaccacacctttgatatggtttggctgtgtccccacccaaatctcatctcaaattgtagctcccataattcccacatgtgtcagagggactctgaggggagataattgaatcataggggcagttccccccatactgttcccatggcagtgagtaagtcnnnnnnnnnnnnnnngttttatagagggtttcccctttcatttggctctcattctctcttgcctgcctccatgtaagatgtgnnnnnnnnnnnnnnnnnnnnnnnnnnnnnnnnnnnnnctac

SEQ ID NO: 2228 - DNA, 3826 bp, Macaca Fascicularis
ctttttattagcgctttctcagcctccatccctcagtgccgccggggggtggtgccaggtgttacgagaactcccacgtgggacaagatggtgtcttcgacccaggtgaacttcaacctgcgggctctcctggagcagctcagccaggatgagctgagcaagttcaagtctctgctcaggacagtctccctgggaaatgaggtccagaagatcccccagaaggaggtagacgaggcggatgggaagcaactggcggaaatcctcatcagccactgtcacagctactggacagagttggcgaccatccaggtctttgaaaagatgcatcgagtggatctgtctgagagagcaaaggacgaactcagagaagcagctttgaaatcatttaataaacacaagcctttatcattagggataacacggaaagaaagacaacctcatccagaaattcaaatacgctttctacctcagctgcagggagctcagccgcctgggcccgtgcagttttgcacagatggtcttcagggactggcctgaactgcaggatgacattccacacatcctagcccaagcacagaaaatcttgttcgtgattgatggtttcgatgagctgggagccccacctggggcgctgatccaggacatctgcggggactgggagcagcagaagccggtgcccgtcctcctagggagtttgctgaagaggaagatgttacccaaggcaaccctgctggtcaccacgcggcccagggccctgagggacctccggttcctggcagagcagcccatctacataagggtggaggggttcctggaggaggacaggagggcctatttcctgagacactttggagatgaggaccaagccatgcgtgcctttgagctgatgaggagcaacgcggccctgttccagctgggctcggcgcccgcggtgtgctggatcgtgtgcacgactctgaagctgcagatggagaagggggaggacccggcccccacctgcctcaccagcacggggctgttcctgcgcttcctctgcagccagttcccgcagggcgcacagctccggggcgcgctgcgggcgctgagcctcctggccgcgcagagtttgtgggcgcagatgtccgtgctccacggagaggacctggaaagcgctggggtgcaggagtccgacctccgcctgttcctggacggagacatcctccgccaggacggagtcgccaaaggctgctactccttcatccacctcagcttccagcagtttctcactgcgctgttctacgccctggagaaggaggaggaggaggacagggacggccatgcctgggacattggggacgtgcagaagctgctttccagagaagaaagactcaagaaccccgacctgatccaggcaggacgcttcttgttcggcctggctaatgagaagagagtcaaggagttggaggccacctttggctggcggatgtcaccagagatcaaacaggaattgctgcgatgcgacgtaagtcgtaagaatggacatttcacggcggcagacctgagggagctcctctgctgtctgtacgagtctcaggaggacgagctggtgaaggaggtgatggctcagttcaaagaaatatccctgcacttaaatgcagtagacattgcgccgtcttcattctgcttcaagcactgtcaaaacattttcccagctgatgcttgtcggaacctctgcctagctcttcgaggtcacaagactgtaacgcatctgacccttcaaggcactgaccagaaggatatgcttcctgcattgtgtgaggtcttgagacacccagaatgtaacctgcgatatctcgggctggtgtcttgttctgctaccacccagcagtgggctgatctctccttggcccttgaagccaaccggtccctgatgtgcgtaaacctctccgacaatgagctcctggatgagggtgccaagttgctgtacacaactttgaggcacccaaagtgcttcctgcagaggttgtcgttggaaaactgtcacctgacagaagccaattgcaaggaccttgctgctgttttggtggtcagccgggagctgacacacctgtgcttggccaagaactccctcaaggatacaggggtgaagtttctgtgtgagggcctgagctaccccgagtgtaaactgcaggccttggtgctgtggaactgcgacatcacgagcgatggctgctgcagtctcgcaaagctcctccaagaaaaatcaagcctgtcgtgtttggatcttggactgaatcacataggagttaccggagtgaaggtcctgtgcgaggctttgagcaaaccactgtgcaacttgagatgtctgtggttgtgggggtgttccatccctcccttcagttgtgaagacctctgctctgccctcagctgcaaccagagcctcagcactctggacctgggccagaatcccttggggtctagtggagtgaagatgctgtttaaaaccttgacacgtcctggcaccctccagacactccggttgaaaatagatgactttaatgatgaactccataagctgctggaagaaatagaagaaaacaacccacaactgattattgatactgagaaacatgatccctggaaaaaaagaccttcttctcatgacttcatgatctgaatccccccagagtcgttcattctccatgaagtcgttgattttccaggtgttggtgaactgcctgtgactcctcttctcccccgcccccactcctcagggataatgagctcactgctaggctagatgtttcagccatggttctgcctctgttttacacgtgcacacgtccttaactttgttacatatgaaatatctgtatcacgggtacattgagagaaataaaggtgagagcattcaaagaaaaaaaaaaaaaaaaaaaaaaaaaaaaaaaaaaaaaaaaaaaaaaaaaaaaaaaaaaaaaaaaaaaaaaaaaaaaaaaaaaaacacacagatgaactggagataagggcggcttcgtggaggatcgagttcaggcagactttataaaccagagcagctgcctgaaggtttccaagaaaaaaattctgcacagtttctaaccagggtgacagttcccctccacaggaagttcttttattaatttttttatctcttcttttgtaagactatcggtcatcagggagcacctgtgggcatttttttgtttccccccactgctcccatttgcctggaattcattattaaatctaaaccacagtggccttgcccaacacaggggcgaagttcgaactactgaaaaatgggtcactcaaatcgcctgtgcagaagaatcccaaataatttatggagatactccttcctcaaggaggtgaaacataaatccctgtccctgaagtgtgggctgtgcataatgtatggaaagcagggagaaagagtaattttgcaggagagaaacctgacaaacactagctcagccagatggccaaggtcaacatcagcagcggtcagtcgtgtctatagcatggacacttgatatgatgtgatgagaacagcacatcacccccaaacccataaccacagttgaaccacaagaaaaacagcagacagaccccacttgagggacagtctacaaagtacctcaccaacagtctatcaaaaacaaggaaagtctgagaaactaccacagccaagagcagcctagggaaatatgatggctacatacaatgtgggagaccctgtggaacagaaaaaggatggtgggtaaaaactaataaaatccaaatagactacagagtttagttaacagtaaaaaaaaaaaaaaaaaaaaaa

SEQ ID NO: 2229 - DNA, 722 bp, Macaca Fascicularis
  misc_feature (1)...(722): n = A,T,C or G
tagagtcccagcagctnnngatnnnngagctccatggggcgcgtgnnnnnnnnnnnnnnnnnnnnnnnnnnnnnnnnnnnctnnnnnnnnnnnnnnnnncaannnannnnnnnnnnnnnnnnnnncacatcagcctacctccctcctggctgctggccgggatgtcgccagcattaccttccactgcctttctccttgggaagcagcacagctgagcctgggcaccaggccacctctgttgggacccnnnnnnnnnnnnnnnnnnnnnnnnnnnnnnnnnnnnnnnnnnnnnnnnnnnnnnnnnaggtactgctcctccatgcccctggctgggctgtggggagaagaggcttccacatgtcctcccacnnnnnnnnnnnnnnnnnnnttcactccctagccaacaggagaggaggcctcccggggtttccccannnnnnnnnnnnnnnnnacctcatcacagtcttccttcctcttcaagcatttcatgtnnnnnnnnnnnnnnnnnnnnnnnnnnnnnnnnnnnnnnnnnnncactctnnnnnnnnnnnnnnnnnnnnnnnnnnnntctttctatgcttggtctgactgagcctaaagttgagaaaatgggtagccaaggccagtgccagtgtcttggggcccctttgcctctccctcactctctgaggctccggctggtcctgggacatgcagccaggcctnnnnnntgggcaggtcca

SEQ ID NO: 2230 - DNA, 754 bp, Macaca Fascicularis
  misc_feature (1)...(754): n = A,T,C or G
tgcacnnnnnnnncccnncagcaggcannnnnnnnnnnnnnnnnnnnnnnnnnnnnnnnntcaacacacacattcgtaaaaaaacacatggcctcgccannnnnnnnnnnnnnnnnnccacagcacgnnnnnnnnnnnnnnnnnnnnnnnnnnnnccgttcttctgtgtaatattaagaactgaatgtgaagtttnnnnnnnnnnnnnnngtaccttttaagannnnnnnnnnnnnnnnnnnnnnnnnnnnttannnnnnnnnnnnnnnnnnnnnnnnnnnnnnnnacaataatatcatgggagaannnnnnnnnnnnnnnnnnnnnnnnnnnnnnnnnnnnnnnnnnnnnnnnnnntatataaaaatattaaagagaaacaaaactgtacatttcctcattgctccgctacaaacaacnnnnnnnnnnnnnnnnnnnnnnnnnnttttctcctagcnnnnnnnnnnnnnnnaaaagnnnnnnnnnnnnnnnnnnnnnnnnnnnnnnntatatgttttattgattttacnnnnnnnnnnnnnnnnnnnnnnngaccgggtgaaggcattaggtgggtgtttgtttttggataaatcactaccattnnnnnnnnnnnnnnnnnnnnnnnnnnnncgctcttggtggaaggaccggtccctgtccctgctgtggtggccactgtccgcagttcaacacggagtccgccccnnnnnnnncngctgttggtcgttctgagggcctttagaagtgactg

SEQ ID NO: 2231 - DNA, 110 bp, Macaca Fascicularis
  misc_feature (1)...(110): n = A,T,C or G
actaannnnnnnnnnnnnnnnnnnngagaaaagatttattggcctcaccaattcctttggttttggtggtactaatgcaacacttnnattgcggaatgtnnaacaaatca

SEQ ID NO: 2232 - DNA, 107 bp, Macaca Fascicularis
tacccacatgtcccacgagacccctttccgcgcaatcccgtgtgtttacacacaaacacctctcgtgcccgagacacagggggtctgagatgtttatatctgtgtct

SEQ ID NO: 2233 - DNA, 754 bp, Macaca Fascicularis
  misc_feature (1)...(754): n = A,T,C or G
gtannnnnnatcaccagacnnnnnnnnnnngannnacaaacgnnnnnnnnnnnnggctgaatcgattattaaggagataatttcccaagagatttgtgtagttatggattcaaaagaagataacaaacatgtaggtcatctnnnnnnnnnnnnnnnaaaaagtgaattaaatcatgtaaaagtcacatctgaggctctctgtcannnnnnnnnnnnnnnnnnnnaaatcatcttagatcaatgctacaattttgtttgcgtgaatgttatgacctctgattttcaagaaacccagaagttactgagcatnnntgaagagagtaatctctccattttatatcctgttgttgttgtttcagttcattttcttgattttaaattagtacctcccagtcagaaaatggaaaacctaatgcagattaaagaattttcaaagaaagtaaaagaaagaaatattnnnnnnnnnnnnnnnntcatatcttacccacaggatgaacagaagctacaggagagtttaaggcaaggtgctatcattattgcttcattagtcaaggaaagaaattctggannnnnnnnnnnnnnnnnnnnnnnnnnnngaacacagaaaattacctactttctannnnnnnnnnnnnnntatctttattgtgctttatgcccccactactgtgtgtggtagaatgtttcaattgtcttttatatcttctctatgtaggatgtgatgcttagattataaagcagattaacgtttata

SEQ ID NO: 2234 - DNA, 899 bp, Macaca Fascicularis
  misc_feature (1)...(899): n = A,T,C or G
gacagagtgagactccgtctcaaaaaaaaaaacaaacaaaaatagtttaaagatcccgtctgggtgggagagctgtccctttccacctgaagccagggcactggtgctataactggtttcccaaggtgggagagagacagacccagcctggagctggccccgggcctgtgtgctgacttcttggagtcctcaaaccactgtatttttctgttgagcctgtacttggggagagatcagtagcattggaggaaaagaatcatggtacctcagggtttctttccnnnnnnnnnnnnnnngccatggtcnnnnnnnnnnnnntgcttttccannnnnnnnnnnnnnnnnnnnnnnnnnnnnacccaggccagtctcctctgcctgggatgcacccnnnnnnnnnnnnnntagcagggcaggctccctctgggcatccctggacgcatcnnnnnnnnnnnnnnnnnnnnnnnnnnnnnnnnnnnnnnnnnnnnnnnnnnnnnnnnnnnaggagaaacagacatgtttaccatccattttccaaagctcctgatctttcccaagattgtaactgaaaactgctgtctcttgtttcgttcgttttgggggtggtggtgctggctgagccatgcttgtgaagtggtgtgtgtctctgatttaacggattcactgctttctctgctaattgagagagcgttatttacattatttatttgttttgacacaagtgctttcagtgttttatcctagctaatagcttcttaaaggtaataaaacccttccaacctaattggtcagataagactttttttcttgtatgcttaaataaagcaattagtgaagcgcttctatccaaaatgacttttttgtccttttttaaaaccaatttactgttactggaaact

SEQ ID NO: 2235 - DNA, 3524 bp, Macaca Fascicularis
attctgagagaggagagtcaaactcccacctccagctctcgaaggagcttttcccgagggcactgcatagaggctccttttccttcagatcagcagtatcagcccaagccagaaccatggctccaaaactaaagaaaaagtcatcacgtcgcaaaaaaagcccaaaaccaatattagctgctagtgaagacatggaaccagtaaatatggagagcatgggtcatccagaaatttatcctttagtattaaccaccaagacccaggaaatatttaactgccgaatagatgaagatatcacagatgaacaaccttataagcttatcaataaagaggatatttttgaggacctgcgcaacagagctgcagtatctgatttccacccagtcaaaaaaattgtccaggaatatcctggaaatgagcttctgcttgtttatgacaaagacttcaaatatggacttaacttttatcttattggaactgaagagggcaaagaaaactatttaaataatgctatttattttactttagcccccagaagtatcagaagaacaagaggaatataaagaatatattcctgaagatgtgtatatttataaaccacctgtctctaaaccatgggtttctttgggcagtgaaaaagaaattgaggaagaatcagttacggaatctacaaagcagattacatatatgatttctcgaaaacgaagtgaatttggtgcaccaattaagtttagtgaccagaatgcttccagtgtaaaagatgcctatattgaatgtacagcctacccagataaaaattttacccttaaacaacttgaaaaagatgttggcatgcaagtaatcccccaaataaaggacataagcactcaggcaaaatggacatatcctaaaaatgctactacacaatattatccaagagaattctcagaagaggaaaaagagacactcaaacaatcgaagcctttggttgattttcttaacaatgcatccataagtgttgaaatagccctgcagcaaaatgaaatcacgaacacatttattgatgactggaaacacctcgcagaagaagaaggcacctttggggacaagactgatacccacctgaaagagtaccagtcctttaccgaccttcatagcccaacggagaaaatgattacctgtgtctcgtggcatccaactatctatggtacctgccacgtgctttccacaccttcactgccaggtgtcctcccaacaaccctgtaggacacacacctgtcatcatctccgtttcacaacaaaaggacccaagctcaactcagggaagtgacttgcccaggtcacccaggtggcatatgcagagtctgggtttggcttgggcctattgctctcccaaagctaaatttcttccttctaacactgcctttctgacgactagacaagagaggaaatgtgcctcctttaaagagctcagcagccaagggaggtaggtagggttgtgcaaaggtggaaacatggaaagagagatatttgtcctctttcttcctcctttcaccctccactggccctttcctcacaaaaaagaaacaaaacaagattttcttttcttccaaaatcttctgagtcccctgtatatcttatattaacagtacatgtcagtttggaccagccagatttcaagtgctaaataagtgacatgtaactagtggcaaccacattagccaacagagctctaagaaaactcttggtctcctatggacaaagtgaaaatgaagagtggctgtgtagaaaagcaaaagctagagacatctctccatatatagttgttgccaactttaatttctacctgtgtttcaatcagggctaatagctgtgtcggtggccgtgcgactttcttttgaagacagagttcacttttctggtaaattattgctgcagccatcactgattcttttctggagcttctctgatcctatacatcctcagttaatgctggagagcccagatgacatcttctgcttcaagttctgtccgagtgatcctaatatcattgctggaggctgtatcaatgggcagattgtcatgtgggatatcaccgcacatgcagatcgcatagaaaacattaagggaggtggtagtagaagtaaaaaagccacactgaagcctatgtttctccttgaaccggagagtaataaagaagcaatgtatatcagacactgtgcagtctcttcaatagaaaatggacataagagagtaattacagatatacactggctgtctgacacatttgagattaacagaatgggctccgtctttgagaatcgaagtggaatatgctgtcaacttgttacatgttcagcagattgcacaatatgtttttgggatattagaccacagaaacctttaaccccccaaacaacagagaaaaagaaggaagaaagtattgaaattccttttgatgtgccatctacttttttgcatctagatctctcctggaaacctctcactaagttaaagctgtccaagggtgaaacaagtttagaccactgtccaaccaagataagcctgaatgaagaccatcttctttgcaaaacacaagacaaaatgttagcacagagcaaaacagcgaaggcagaagaaatgaacccataccataatctggaaagtggggtggccaatcttctcaagccaatagatgacttctgcacaaagttcttcgtgggaacagaggaaggcgaagtgatatacacagattggaaaatggaaagagaccctgaaactggccgatttatgccaaagaagccagtgaacctccacaccattcatgacggaattgtccacactattcagagatcacctttctacgatgacattattctcacggttgggggttggaacgtggccatatggaaagaaagtgttatgactggacctctccttcagtcatgctgtgcaccaaaaaggtacacctcaggccactggtccctgactcggcccggagttttctatatcggccgagaagatggatatattgatatctgggaccttctggagaaaacccatgaaccggcccagtctcaaaacatttgcataactatgatcacctgcatcaaaccctggatcttttctcctaaacagcaatttatagccatagctgattattatggaacactgcatatattagaaattccttggacattaagtcgcccttccgccaatgagatgacaagtattaaccactactttgaaagagaagtcaagcatctggaatacgtagaacagcgcaaaaaaattcgtgagcaagaaaagaaagaaatggaacaagaaatggcgaagaaaaaagttaaaatatatcagaagtcaaaagaacaaatggaggctgaattaaaaatggactatgagagttatctggaactggaaaagaccgttcttatcaaccttggcctaatcaaagtcacagagaaggggtcatacttggatgtgatgtaaaaaagcttcctgaaggggtgttttggggaaaaaaaaaaaaaaaaaaaaaaaaaaaa

SEQ ID NO: 2236 - DNA, 719 bp, Macaca Fascicularis
gataagactttttaattttaagttccagctattggaagatgtggggataagattgacattgctgttgcagtattgcaaaaacgactaaattggttaattatgtctaccacttatgtttaagagaatcctttcactaacttaaattgttaacattgtgatattgagaaagagtattaacctaaacagtcactttacaacaatcatgtaaagatgtgtgtgcttgcagttgaggttttttttgcatttctgagcccactttgtattcatgagaaacaaaaacataacgggagaaaagttttaaataaccagcattgtaagtttttgtaaagtttgggatgtcaaagtattaacgaaggatactgaaaacatacttttactttggtcaaattactttttatgatctgatttcttaattttctgtatttgaaatcttgcgaatttggagtatctacatctgtagataaatagataactaaaacttaatggtagaaataagtgtaattcagcaacatgattcaacagtttttatttttaggataagttaccatttattatattaatatcaaatttatgtattgccttgtaatgctaaatgttcttaaaagaatatttgggctacttcaattctaccaccttctttcccttcccccaggacatacaaaagatcttatattagccaatcctctatgtgaattttgccatatcaagcattgtgcctt

SEQ ID NO: 2237 - DNA, 736 bp, Macaca Fascicularis
  misc_feature (1)...(736): n = A,T,C or G
ggggaaggagannnncagtgagagagatcacaggtgggggttgtgggnnnnnnnnnnnnnnnncaggctggggacagccttgtgggcatcagtcccgaggcnnnnnnnncctttcgtctgatgagctgtccctgtgcatggagagaggctgagggctaaannnnnnnnnnnnnnnnnnnnnnnnnnnnnnnnnnnnagagaaatgtcaaggtgaaacgtaaaagtgtctggcaggaaggtgagtctgaagccctgtacccgcattccgactatcagtggggagctgttagcaggcaggattcttcagagcagctgggctggagctcccctgagctcaggaagccccagggtgcaagggcaaggaaatgaggggtggtgggcattgaagatnnnnnnnnnnnntgtgtgggaagaggaaggggtgctgctgtgacttcaaggtctgaggtccaaaaacagcatttgaaaagagactctgaagccagtgttggaannnnnnnnnnnnnnnnnnnnnnntaggggtaggctggaggattccggcttcagggtcctgaggaacacactgaggtgccctctgacactagaatagggtgcccttcattcctacgcctgagtccttcactatatttccaagctccagtgaggaggaaaggattcggaaatgggacaggagagcaaacaggacagttgtgtgtgtgagannnntgtgtnnnnnnnnnnnnnnnntgtacctgaa

SEQ ID NO: 2238 - DNA, 972 bp, Macaca Fascicularis
aaaaaacaagtaaataaatgagatcacttccattaataatagtgccatgaagggtcatgtgtcatgaaaggctggcggtgaggctgaggatcttgggccacacggagctgaagagctgagagatgaggtcttcctatgtttcctggactgctctccaactcctgggcacaagtgaccctcctgccttggcctcctaaattgctaggattgcaggtgtgagcaaccgtacctggcctccattctattcctaattccttctaaaatactacatggaaaccacagtgaggttttcctcactaagttactcttttgaaggcagacgctaataacacctgctttgaaacaccatccttctgaggtcctctgggattttttctgaatggtggcccttgttgccatcttaaaggtctagtcaagataaaacatcatgttcctctggacaacctgaatggagggggcagcttcataccagggcctgacaatcttgcacatatccacatagaccacataggcaatgcctgaaccacagctgatctgaatcttggcagaacaccttggtatcctcccagaagatgagcgcaatgagagacttgtaagcagctcctgcaaggccatttcccactcagctctctgtcttccaaagagactgtcatgaggcagtttctcattgcttcccgggttccagtgagccattctgccttagccacttagagtacagccacaggttataacaaggcttagctgcagcatggcattgacccctcagcaacaacgtgtccacaacgtatgctgtagtcatccagccccttctgttttggtgtcgtcattttggtatctgagacaacagctcatggagagctggcacttgcttttgctttcaatgtctgtgtaaataataatatgtctaaattcaaaaaaaaaaaaaaaaaaaaaaaaaaaaaaaaaaaaaaaaaaaaaaaaaaaaaaaaaaaa

SEQ ID NO: 2239 - DNA, 2713 bp, Macaca Fascicularis
aatgggagagggaacagggcaggagagaggatgggatcgggagaaaggcgattcctttgggggaggggcgcgtggagacggagtatgagtgtgtgtgagtgtgcgtgtgtgcaaggtgtggttgcacggatgccggttgcttctgtgtatctgcgggcgtgtgtctctttgtattgtagcctggagtcagtgctccgttctgcacctgcaggatgtccaggtgtctgctgggtgggtctgtacctttgggctttgcccttcgtgtccgtgccttcgccactgggggctggtctatatttgtgtctccgtacatggttctttttgtttctggagagtaaattcctggagcaattgctagacctacctgctgtcacctggctgacacggaggcccgcctccttctctcagcagcctggggcccaggcccgggccaccatggcgctgcctccaagcccagccaccctgcggcacacactgctgctcctgccagcccttctgagctcaggttggggggagttggcgccacaaatagatggtcagacctgggctgagcgggcacttcgggagaatgaacgccacgccttcacctgccgggtggcaggggggcctggcacccccagattggcctggtatctggatggacagctgcaggaggccagcacctcaagactgctgagcgtgggaggggaggccttctctggaggcaccagcaccttcactgtcactgcccaccgggcccagcatgagctcaactgctccctgcaggaccccagcagtggccgatcagccaacgcctctgtcatcctcaatgtgcaattcaagccagagattgcccaagtcggcgccaagtaccaggaagttcagggcccaggcctcctggttgtcctgtttgcccttgtgcgtgccaacccgcctgccaatgtcacctggatcgaccaggatgggccagtgactgtcaacacctctgacttcctggtgctggatgcgcagaactacccctggctcaccaaccatacagtacagctgcagctccgcagcctggcgcacaacctctcagtggtggccaccaatgatgtgggtgtcaccagtgcctcacttccagccccaggcccctcccggcgcccatctcttatatcaagtgactccaacaacctaaaactcaacaacgtgcgcctgccacgggagagcatgtccctcccgtccaaccttcagctcaatgacctcactccagattccagagcagtgaaaccagcagaccggcagatggctcagaacaacagccggccagagcttctggacccggagcccggcggcctcctcaccagccgaggtttcatccgcctcccaatgctgggctatatctatcgagtgtccagcgtgagcagtgatgagatctggctttgagccgagggcgagacaggagtattctcttggcctctgggcaccctcccattccttcaaggcatcctctgcctagctgtgtcaccaacgtgaagaggtcatgccactgccacttttgcttgccctcctggctggggtgccctctatgtcatgcatgtgatgcatttcactgggctgtaacccacagggacacaggtatctttggcaaggctaccaattggacctaagcccctcatgctgactcagggcgggccctgcatgtgatgactgggcccttccagagggagctctttggccaggggtgttcagatgtcatccagcatccaagtgtatcatggcccgctgtatgcccaccccagtactccacagcaccttgtacagtaggcatgggggcgtgcctgtgtgggggacagggagggccctgcatggattttcctccttcctatgctatgtatccttgttccctcaggtaaaattgaggaccctgctagctatatagaaccaaattgccctttgtacaggaaccaacccctggcccaggggcactggccaagcacaagtcttttttgctgcacgcctctctgctcttctctgccccttccttcccccctcctccagagaattctaggttacatgttggaccttctctactacttcgctgggcactagacttttctattggcctgtgccaccgctcagtattagcacaagtcagggaggaagaggcaggcgatgagtctagtagcacccaggatggcttgtagctatgcatcattttattacagtgttagcactttaagcacatcccctaggggaggaggtgagtgaggggcccagagccctctttgtggcttccccacatttggccttctgtgattcactgtgagtgtcctgagctctcgggattgatggttttcctctcagcacgtctcctgcaccatgggaccccagccctgaccaacccctggttgccccatcagcaggaaggtgcccttcctggaggatggtcgccacaggcacatagttcaacagtgtggaagctttagggggacatggagaaaggaggagaccacataccccaaaacgacctaagaacgctttaaaaggcgacctgtaaatgattagaaattaatatagtacagaatatatttttcccttgttgagatcttcttttgtaatgtttttcatgttactgcctaggacagtgctgagcacacagtaagtttaataaacttgactgaattaataaaaaaaaaaaaaaaaaaaaaaaaaaaaaaaaaaaaaaaaaaaaaaaaaaaaaaaaaaaaaaaaa

SEQ ID NO: 2240 - DNA, 726 bp, Macaca Fascicularis
  misc_feature (1)...(726): n = A,T,C or G
aacatgttatanatcatcatagtactgtgagataagtgcaataagaagctagttataaagtataggggaaatagaggagtaatcatgtctgaaaagtcagggaagtcttcctagaggtaatttttaagctgattgttttagaattagtagaagcttgccagatggaaaagtccaggcaaagtgtaacatgaatgggaagggccacagtctagaaatggcagagtgtgttcctagtttgtttgtttgtttgtttgtacctgccttgttccaggaaggatttaaggtagttcatattccagtcctttaatgctggaatggctagagatgagactgaaagatgggcaggaagtatatcatcacaagctttgtgtttgatgttaatatgtatgatttttatattatgggaaataagctcttaaaggagtgatataatcaggtttgtgttttagaannnnnnnnnnnnnnnnnntgaagaaagaaattgaagaatcatgtaacagatatatgtgatcccattttttgtaaaagacagaaccatgtgtgtttatttatatgtgtttatatatatacttgtgtatgcaaaggtaaaagtctgaaaggatatatgctaactgttcacaatgatgacccccaggaatgggattggaggggagggggcttctgtgtttgttatgtatgctgggtgggatattgtgcttttatttctgtattgtttgaattttttta

SEQ ID NO: 2241 - DNA, 731 bp, Macaca Fascicularis
  misc_feature (1)...(731): n = A,T,C or G
atgatttgctttgttggcatctgtgtttatttacttgtatacaccacatgcagtttacatctttcttttaagtactctccttcccaggtaaattccaattatatttgacatccagctaagagggcccatctcttctcacctctttcctagtcagtatgttcagcaaatatttattgagcccttactatgggcaaatcattgtcctagataattgaggagaaaaatagatttttcnnnnnnnnnnnnnnnnnnnnnnnnncacaatctagtgaatcattacagtatggcctcattgctttgtttgaggtatattattcataacaatattttataccattcgtatcaatgtaattatagaacacaatatactatcaaagataagtaattgtgtggttatctgccatttaaaagtatccagtatttgatcacattattacaaataatgaaaaaatgatttgttttaatctgtannnnnnnnnnnnnnnnnnnnnngactgtaatatactagggttatattaaattgtttactctgcctcaccaaacacatactaggatataacccccaagataagtatttaactttgcattagatataaaggagactgggtgctataattagattattttgnnnnnnnnnnnnnnnnnnnnnnntgatttagtatgttctgtaattgagaaaatnnnnnnnnnnttatactttttagtgatttacatgtacattttatagggga

SEQ ID NO: 2242 - DNA, 636 bp, Macaca Fascicularis
  misc_feature (1)...(636): n = A,T,C or G
ccatgtgacacgtnnnnncaggnnnncccgaatctaaagatgccagatggannngcagaaacaatgctctccacacacatgtctttcaaaagaccaaagtgacgggtgtctcttgtgacaggttgcttcacatatgtttctacacagtaaggtgagtgccaaataatatttgaagtcttctgtctctttgtaaattattttctatgacccataaatttaaaaatatttttcagtgagtgcttttaacaaatgtaagctgccctgccacggggattaatgttatcttgtaaaaggtgttgctgtttgaattgatgagaaatggaagatgagaactccctaagggtgtttataaatcgatgtggtatacagaattaaaatggagtgaggtaagaagatacagctacagagaatagttccacgtatgggagaacactcattgtaattgggtagttttgttaatatttttaaaccctgcttttcaaaaattacagaatgtgtataaacgaataaagaaaaataatttagctgtgttttagacagcactagaatatattgttcagcacactaaaatatatttgaaatctgataagccaaaaatgtggttttgaatgaatatattgtgaatctctctcaaaa

SEQ ID NO: 2243 - DNA, 606 bp, Macaca Fascicularis
tcgtgaaaaccaacccaattagttagtattgcattctgtgtactatagttttgaatattaaaagtattttaaaatacctccattttgcctttccttttagtgaagatgatacctgcaaaagacatggctaaagtaatgattgtcatgttggcaatttgctttcttacaaaatcagatgggaaatctgttaagtaagtactgttttgccttggaattggatttttaatgttgactttatcattttgaagtggggagctaatgggaagtggccctctctgtttctcttcttcccaggaagagatctgtgagtgaaatacagcttatgcataacctgggaaaacatctgaactcgatggagagagtagaatggctgcgtaagaagctgcaggatgtgcacaattttattgcccttggagctcctctagctcccagagatgctggttcccagaggccccgaaaaaaggaagacaatatcttggtagagagccatgaaaaaagtcttggagaggcagacaaagctgatgtggatgtattaactaaagctaaatcccaatgaaaatgaaaatagatatggtcagagttctgctctagacagtgtagggcaac

SEQ ID NO: 2244 - DNA, 261 bp, Macaca Fascicularis
tcatgggaaacaaggaaagattgaaatactgtaacagaccagaggaaactaaggaaacttaactgacgactgaatgcagtgtgctgtattaaactggatcctggaatagaaaatagtctgtagtggaaaaactgagatatggatagtctcaagtttaatagtaatgtaccattattactttgttagttttgacagatgtaccatggttatgcaagatgctaacaatagggaaaaataagtaagtgggtatcttgaggatcc

SEQ ID NO: 2245 - DNA, 706 bp, Macaca Fascicularis
  misc_feature (1)...(706): n = A,T,C or G
gcagatgtgatgcttnnnnnnnnnnnnnntatactggataggacaannnnnnnnnnnnnnntggctgggnnnnnnnnnnnnnnnnnnnnnnnnnnnnnnnnnnnnnnnnnnnnnnnnnnnnnnnnnngcacttttagtgnnnnnnnnnnnnnnnnnnnngtaaactataaacattttgttgttgttnnnnnnnnnnnnnncttcctaaaactctgctcaaaggcctgtcccttcagaaaagcacgaagcaggagactccnnnnnnnnnnnnnnnnnnnnnnnnnnnnnnnnnnnnnnnnnnnnnnnnnnnnnnnnnnnnnnnnnnnnnnnnnnnnnnnnnnnnnnnnnnnnnntacacgaacgccctgtaaacttccacattccaccactnnnnnnnnnnnnnnnnnnagtggtcaggtcacgtgcttgctggagagcagaaaaaannnnnnnnnnnnnnnnnnnnnnnnnnnnnaggctgcatttacaagaattacacaaaacctttcatcctgccagagaaggctgggagggaggacctgagnnnnnnnnnnnnnnngccactcannnnnnnnnnnnnnnatctggccgtggcggcggagaagctgaagccagggggcttgtggctcagacgatgtcccagggcaactnnnnnnnnnnnnnnnnnnnnnnnnnnnnnnnnnnnnngnnnnnnnnnttccttctg

SEQ ID NO: 2246 - DNA, 660 bp, Macaca Fascicularis
  misc_feature (1)...(660): n = A,T,C or G
ttctgtaaatcaagaattcatattttaaaaaatttttttctagagatggggttctgttatgtttcccaggctnnnnnnnnnnnnnnnnnnnnnnnnnnnnnnnnnnnnnnnnnnnnnnnnnnnnnnnnnnnnnnnnnnnnnnnnnnnncccagccccatatatatattttttttaactaaaaagtataggattctagacatgaatataaagatagtctcagccgttgaccagtgcaggtattgtgtgtgcacgttcattagaaggaggatacatggatctctttcctttctctgcagccagttgctgcttccacctgttcagggaagaaaacaccccatactggcaggcatggagccaacaaggagaacctggagctcaacggcagcatcctgagtggtgggtaccctggctcggcccccctccagcgcaacttcagcattaattctgttgccagcacctattctgagtttgcggtaattcaccttttctaatatctaccagtctctggggagcacacagttggggcagagtgggtatcttcccaggggcacccaggctgttagctagggcagctaccttggaggctgagaatccctttcctgctttgaccatggcggggtgggtgtgatttaagggggggttgtataggaaggaagttg

SEQ ID NO: 2247 - DNA, 721 bp, Macaca Fascicularis
  misc_feature (1)...(721): n = A,T,C or G
gcaggcaatgctggctgttggctggggcctcngttccactaaggcnnnnnnnnnnnnnnnnnnnnnnnnnnnnnnnnnnnnnnnnattatagacatgaaccaccacacccngcccacttctgccatattttgttggccagtgtgacaagggttgctactctgctacccaccctcctttcaccacatgtcgcatgcacatgtgtgcacgtacacacacacacacacacacactcacaccagagcccaccttgactcaagtcctcttttctgagaggatttttctttgtggcttcctaaaattcagtggaaaattcattgcttggggatgagnnnnnnnnnnnnnnngaaagctgtaccaaggggagtgtttgcctctgcctctgacactgtcctctgcctctgtcctgggagccagctggtttttagcagagatggagtcccaccttggctgcagtgagctcgaaagggacttggcagctccgctttctacccagcgagctgccagcacgactgttgctttccactcgggcatagtctgcccggaagccccaattcaagacagcttagcttactcctggtggcaatgggagctgcctgttcagctccagctcaccagccccagtgcccacaggatcagcctggttcccaagctctgctcctctccccagcaagtgagacgtgggtgtcaagagagtctgagggatccagacccggctgcatg

SEQ ID NO: 2248 - DNA, 1497 bp, Macaca Fascicularis
cagaagcaccgtctttgaccagagctggtggaatggacagaactgccaggcttcaagcagaacagggatcgtggtgggtgcccaagctcctcctgagtacccctttccagcatcccaggtcccgcctttccccctgcagcgttgggtgtgggcccaatgaggaatggttctccgaggtcacagctcaggactgtgccttccccgggaagcccggtgtcctagagcccaggaaagtgtcctagggtgtggcacagtcagaaaaacacagaggagttgacgatggccagagggtttcaccccaggagacacagcctacaccaacctcagaactgcacagaggttcttcaaaaagtagccactcctggcattgtccattcaaaatgttccagctgaacttacagtgaacccagactcctcatttgctctatgggtccttccgcatctgaccttcacctgctcctctccatcctcccctgccagctcactcctcccagtcacgtccagccaggctgttctttcttccctactattgtagctttgcccagccggtcccagcctcagggcctgtgcacttgtcctttcctggcctaaaatgtatgccactcccgaatctcaaacccccagttacatgtgactgagtccctctgatctttctgctgttgcccagatttcatctgcacaagaggtctttcctgctcacttgagtattcactcttccccatagacactcactttccctaactctattcctagcacctgtcattattggaatttttcatttcttttttgcttattgtctgtcttccctacttagaatctacattccatgagggtaggtgtgatggttaatactgagtgtccacttgattggattggaggatccaaagtattgatcctgggtgtgtctgtgagggtgttgccaaaggagattaacatttgggtcagtgggctgggacaggcagacccacccttcatctgggtggcaccatctaatcagctccaaaaatataaagcaggcagaaaatcgtgaaaagactagactggcttagcctcccagcctccatctttctcccatgatggatgcttcctgcccttgaacatcagactccaagttcttcagctatgggactaagactggcttccttgctcctcagcttgcagacggcctactgtgggactttgtgactgtgtgagttaacactacttaatgtatctaccctattcgttctgaccctctagagaaccctgactaatacagtagggaatgaatccatcatgttcatttctgtattccctgtctgtaggacagtaataagtatttgctacgtgatgactgaatgaataacggatagccccacacaggcctgtgcacacctgctcttcttggagacctttgacataaaattctaagttttcatctgcaaaatcaaaaaaaaaaaaaaaaaaaaaaaaaaaaaaaaaaaaaaaaaaaaaaaaaaaaaaaaaaaaaaggccaca

SEQ ID NO: 2249 - DNA, 453 bp, Macaca Fascicularis
acgtggattaatcttcagttcgatgttatggagcagttctacattacaaatctagtctcctataatatgaacagtgagcagtcagaaatacacaaagggttaaatagggtaaagactctggccaagaaaggaaaggaaagttctaccacagtgtcttctctaattaaaatgcctgggaaatatatggaagcagaaaccagcacaaagcacatacccatctagaaataatctttcagttaaaaaacaacgctcaaaaccagcactcatttctctaagatataagtattttacaatttcttgttatattgagttaaatgtactgacgagtctatatgcaaatgggtttaaacactaatttgatttctcttctgactagctctggagagctgtgacatctgggtgttggtgtcacttacacaggtggttaagaactttcatactaaactacacgct

SEQ ID NO: 2250 - DNA, 782 bp, Macaca Fascicularis
  misc_feature (1)...(782): n = A,T,C or G
atgagttagagaagtgatgnnnnctgtggggaatagaaataagactgtagtagattaggggaggtggcaaaatttaaggagatgccttaggaaggagcctcacacttctgaaatatagatgttaactgggttaggataaaagtaaaatctcnnnnnnnnnnnnnnnntctgatcaggaccagaagtccaaattaaactatgtctctaaattatagttgtgatttttacctgattaaaggtgaaagtgaagtctaaacttctaggcatctgcacatatgcagacaaaaaattatagcaaactaatccttcaaatgaaattttaaataattagtccccacatgccacagttaaatccctgacagtactgttaacatcagatgatagaataaatatgtgtacctttccatagtgaagtcaaaggaaaaaaacgcattatatctaggattaagaggccaaaaccaaaatatcttcatgaacatttgaccgtaagtttgtttctgtttttgtgctctcgtttacttgaagttatatttattctaatttattgacacttttgtttaggcatgcctacattttaaaaaattggtgattggttttgaaatttaaaacttctagaaccctcaccaagttttactattaaaacccttagtataaaagatttctgtgatccttgtaagtannnnnnnnnnnnnnnnnnnnnnntttttaattgtatttttgaaataatggtcagatgtaccacctgataaagaaaatataatatgatctgnnnccaaaatgaa

SEQ ID NO: 2251 - DNA, 830 bp, Macaca Fascicularis
  misc_feature (1)...(830): n = A,T,C or G
aaaactgatggtgaccaatgcatgtttacaaataagatcctcatagatcttagggtaaattataatttgctacagttttatgattcttcttgtgattttgaactttttttgacccaaaataatgcagtctaaaattaggcaaataagatggcacttagactcctgggttttagttagtggaggttttctgtggggtcataatatgcataagccgagaaccatggttgtctatgggacatatctgtcagnnnnnnnnntagaggatgttggggatcaaatacaaggcacagagaaacactgaattggcttacataagaataggatagaattnnnnnnnnnnnnnnnnnnnnnnntcagctggacaattttaagcaaatgtatcatttggcttgtatcttctgttgtgctggaggaggttagaaatagggactctccagaccagcctgaccaacctggagaaatcttgtctctactaaagacacaaaatttgccgggcgtggtgccacatgcctgtaatcccagctacttgggaggctaagccaggagaatctcttgaacccaggagnnnnnnnnnnnnnnnnnccgagatcgtgccattgcactctagcctgccattccactctaacaagagtgaaactcggtctcaaaaaagtaaaagttctgcattagagcccatagaggacttttaatatggaacctgaattcaaggatcccacaataagtggtcagtagttaatgatgaattaaagactaaatatttggtctccacccaatacctttgtgacttttagtcccaatttcctcatctttaaaatttaggtgaaagtgcc

SEQ ID NO: 2252 - DNA, 636 bp, Macaca Fascicularis
atttttgtactcttagtagagacacggtttcaccacgttggccacgctggtctcgaactcccgacctcagatgatctgcccgccctggcctcccgaagtgctgggattacacgcgtgagcccccctgccccgcccctttttaaaaaaaaaaaaaacacaaaaactctaagttccacgatacacgtgcagaatgtgcacgtttgttacataaatatatatgcgccacggtggtttgctgcatctctcaaccccacatctaggttttaagtcccgcacgcactaggtatttgtcccaacttcaacacacactgctttttgaaactttatttttctgggaaagtgtgtgctttaagataagtcagattcctcacggattttcaatatgttttgtgtagtttgttggggtttttttttccactttggtaaacacacacactcaccaaataatacctgggtgaaatgtacttattattactaaattcttattgtgtctgtataaagcttcagacccaaagagggtcaaaatgtctgaatcaaaaatggagaactctgttaatcactcagttttgttctgtttaattttacaaggatatcgtacttacactcaaagaaacacggtgagtcagagtttggtgc

SEQ ID NO: 2253 - DNA, 735 bp, Macaca Fascicularis
  misc_feature (1)...(735): n = A,T,C or G
tggcggcgnngggcgcggcggtgcagcacatggaccannngcgcgccgcgctgagcccactggcggacctgcacgcgctcgtgctgcgcgtggacccagccaactttccgctgctaatccagtgtttccacgtcgtgctggcctcccacctgcaggacgagttcaccgtggaaatgcaagcggcgtgggacaagttcctgactggtgtggccgtggtgttgacggaaaagtaccgctgagcctagtgctgcgctggcctttgtttgtgcctgtcaataaacagaggccccaaatatctgcccccgcctgtgtggtctttggggagctggcaaagtgaggtcactattgttggccagagaagctcagggacctgcaaggatcctcctagaactctcaaatgcaccccacccccggaggtttgtcctcccatggcgggcagtgtggtggggcagagggagtactgtgatgtggggggcgggtggccttcgacttcaactcttgaatctggcttccaaccgcactgttcgcaaagcacttccccattcatgcatttattcactcattctctctccatccccacttcctgctgggacctgtagatgctaatcctggaccctttgcagagagatgcagaaactgaggtcccggagccaaatgtgcaacctaattagggccccagagcagagggctccgcagacctcactgttcctttccccttcctcccccatggacact

SEQ ID NO: 2254 - DNA, 304 bp, Macaca Fascicularis
  misc_feature (1)...(304): n = A,T,C or G
tatgnnnagtgtatgnnnnnnnnnnnnnatctgctcacccgccccccgccccccagggcttgccgtgtagcttagcgtggtgggcccggcacccccgccccccgccccccagggcttggcgcgtagcgtagcgtggtgggcccggcacccccaacccccgccccgagggcttgccgcgtagcgtggtgggcccggcctcccccacgcccacactgaggacttgccagtttcccagaggacgccgacttttgtgagacaagaggcctgggtttccatgtgaccccacagtggggctggactaggg

SEQ ID NO: 2255 - DNA, 669 bp, Macaca Fascicularis
  misc_feature (1)...(669): n = A,T,C or G
gaannnnnnnnnnnnnnnnnnnnnnnnnnnnnnnnnnnntggttggcggggctggcgccttnnntctctgtactcactcaccctggttccatctgtcaaactcaacttttttttttcttctcttggtgtgctaattggtttgaagagccactccatccccaaattcaagattagaaagatccctnnnnnnnnnnnnnnnnnnnnnnnattccttgacagagtatattcaccatttagaagtgatccagcaaagactgggaggggctctaccaggtaatattctccttcaannnnnnnnnnnnnnnnnnnnnnnnnnnagtgaataaaatgccnnnnnnnnnnnntgcgacaattctatctgaggaaaagatttgtttttcccttttcccaaggaagctcgtgggacagcatgggcactactcttnnnnnnnnnnnnnnnnagccccagatgccttcaattnnnnnnnnnnnnnnnnnnnnnnnnnnnnnnnnnnnnnnnnnnnnnnnnnnnnnnnnnnnnnnnnnnnnnnnnnnntgtgactttcgtgaggtgacaggtactcactccaatgagccctggctgtgtgctgttgtgtgtnnnnnnnnnnnnnnntccttcctggatacacagagaatggcttcctgttgttttgtttattttcttaagcg

SEQ ID NO: 2256 - DNA, 2606 bp, Macaca Fascicularis
  misc_feature (1)...(2606): n = A,T,C or G
gtcacgggagtcgtgacctcgctgtggccccggcagcggctgcagggctatttactgaggacccactggatgtgaagcactgtgcatagttttcttcgattgttgcaacatcccttgcaagtttctggaccagcagagctgaaggaacccaaacttggactgaagtgaccttgctaaggtcagctctatggctcttccacatgattcaaacgaaacttcctatttgctacctccaaacaatgaggactgggaccggcaagccattcctgactttgtttatgggcagaaggatctcatggcagaagggattcagtggccaaggaatgcacctggcgtcctggaagctctgccacagtctccgtttgatgctgcactctgctctgcctggaagcagcgggtggagctggggctgtttcgctaccgcctacgggagctacagacacaaatcctccctggtgtggtgggtttcgtggctcagctgaatgtggagcgtggtgtgcagaggaggcgcccacagaccatcaagagcgtgaggcaggcatttgaccctgaacagttcaacttcaacaagatccagcccggagaagtcctctaccgtttgcaccgggagcctgatctccctgggactctcctgcaagaggatatcctcgtggtgatcaacgtcagccccttggagtggggccacgtgctgctggtgcctgagcctgcccgcgggctcccccagcgcctgctgcccggtgcactgagggcggggattgaagctgtactgctgagcttacacccgggcttccgtgtgggcttcaacagcctgggaggcttggcctccgtgaaccacctccacctacatggctattacctggcccacagactgcccgtggagcaggcgccaagcgagcccctggaccctggaggccatttgcatctgctccagggcctcccagctccgggcttcctcttttacactcgtgggccagggctggacttggagtccttgatatgcagggtatgtcgggccactgattatctgactgaccatgagattgcacataacttgtttgtgacccggggagctccgccaggaaagacatcaccttcctcagccctcacaggggtccgagtaattctgtgggcccggaagtcctgctttgggataaaggatggtgaggctttcaacgttgccctctgtgagctggctgggcacctccctgtcaaaacatcccaggactttagcagcctgacagaggcagctgctgtggccctcattcaggactgtcggctgcccccatcccaggcagaagaggtacaggcagcactggtggccctgatgtcccagaaagagcaataatacttctggatgtatttatgttcttttcttcttttcttttgagatagggtttcactctgtcacccaggctagagtgcagtggtgtgatcccggctcactggagcctcgacctctggggtggaagtgatcctcccacctcagcctcttgagtagctgaggctacaggcatgcaccaccacacacctggccaactgttttttaacaattaggtgattttgtattnnnnnnnnnnnnnnnnnnnnnnnnnnnnnnnnnnnnnnnnnnnnnnnnnnnnnnnnnnnnnnnnnnnnnnnnnnnnnnnnnnnnnnnnnnnnnnnnnnnnnnnnnnnnnnnncttgcacctagcctggatgtatttcttttctttctttttttttttttttgnnnnnnnnnnnnnnnnnnnnnnnnnnnnnnnnnnnnnnnnnnnnnnnnnnnnnnnnnnnnnnnnnnnnnnnnnnnnnnnnnnnnnnnnnnnnnnnnnnnnnnnnnnnnnnnnnnnnnnnnnnnnnnnnnnnnnnnnnnnnnnnnnnnnnnnnnnnnnnnnnnnnnnnnnnnnnnnnnnnnnnnnnnnnnnnnnnnnnnnnnnnnnnnnnnnnnnnnnnnnnnnnnnnnnnnnnnnnnnnnnnnnnnnnnnnnnnnnnnnnnnnnnnnnnnnnnnnnnnngcctggatgtattcactttttacctgatgagtccctttccagagcgctgcccatcatggtcatttggacatttattttcatggctgccttctcacctatctcagcctaagaagaaggataaagaaagaactaataatgatctttttaaaggggagctgataatggtctctttaaaggggagaaagcctagaaaaattctactgagtcagacttcatgaatgtatctgctacctctccccgttcttgatcaagccccagtggtgttaaaaaggagtgtgtatgacagttacacactcccgactttatgtttggactttgtctttctttgatatcaaatgttagcaaggtgatagtgcatgtgcctccagcattgagctgccatttctgttctcagcctctccgtttattcccctttgctcaccacttatttttatttcttcatcccttctttccatttagccctgctccacccaaatgcccccctccactttcccggccaccttgagctttcctctagcccccaacactgagttgaatgctcttcactgacatcatctgatataaaaacacagtgtcgtcacaaaaaaaaaaaaaaaaa

SEQ ID NO: 2257 - DNA, 1385 bp, Macaca Fascicularis
aagatattttcaaaatggaaagttcccatgccaaagatttttgccttcttcaccaaactatgatttcctgatgttcttaaaggtagtgttcaccaggtttttccattcttattttgaatgtagtttttgtgtttgtgtgacttgtttttcagcctgagctgcagactaacaacccaggacttatactgcccaatttgacagctcatttttattttagtttcaacatatacctgaactggacttacaattccagaaaaattaaaggctcaagaatggggctgagtacacactgtgtgctaagcaaagaatatttggattgaattgaacccctgcagaacgtggactattcagagacactgaatttggccttgggtgaatacctgccttgggttggccaactcgcagtcaacagcaatgagccaaaagagacaaaccaagtttcaaaacggcaaatcaaagacatcagaaaatagctcagctaaacgtgagaaaggaatggttgtcagtggcaaagagatttatgatgcagtcgggcgatcaaaatttgttctagaaaaccttcggcattacacagtccatccaaatttggcccagtactataagcctctgaaggccactgcactgcagaaattcctggctcaaaacaggaaaaccaccagcttcatgttaaaagtaacagagtatgaccaggataagaccttactgattatgaccaacaacccacctccctgctcaatcacccatcaggacaaggagagtgcaccaaaatacttttccaaggacttactgctcaaggtcatggagagtcatcatcagcacaaacccactgaagacctctggctgccccgcatgcctcagaaaaaaaagttaagatctaagttgaaaccaatcttccctttgacactgtcggacgatcctacatccaagagagaacaatggtttaggttttccaccgacaatgatttcaagagcgaagggaagtattcaaaagtctacgctttgaggatgcagaaaaaaacgtaccctcagctcacctttgctccagtccatgagagagcttccaagaagtcagcgagtgaaaggccgatttccaaggtgattcgggaaccactgacactcgcatcgctcctggaagagatgcccaccagaaccgcgcccggggagagcgccttccgcaacgggagggccccgcagtggattatcaaaaaggccacggtcatcgggtgaacacagaaccctcagtcctcccgcctcgctctcctgagactgaggggtccgcagaggtcgccaaccaaataaaaccacattcctgctgcaaaaaaaaaaaaaaaaaaaaaaaaaaaaaaaaaaaaaaaaaaaaaaaaaaaaaaaaaaaaaaaaaaaaa

SEQ ID NO: 2258 - DNA, 712 bp, Macaca Fascicularis
  misc_feature (1)...(712): n = A,T,C or G
ctaggctgctgggtgaggggggtctctgggctgctgggcagctaggcgagggcatcagggcaggagctgagggctgcacagggcaactgccctgcgctcctatttacccaccaggggcagtgccagggtgggctgggctcacagcagggcccaaaggannnnnnnnnnnnnnnnnnnnnnnnnnnnnnnnnnnnnnnnccaaaggccgcgccgcgctgtggctgccttgttacagaggctcttttcacagcagnnnnnnnnnnnnnnnnnnnnnnnnnnnnnnnnnngtccatcctcagtttctatggggtaagaccctccatggaccacaggatgggtgaggttcataatctgggcgcggggtgggggcnnnnnnnnnnnnnnnnnnnnnnnnnnnnnnnnnnnnggtagtgccagtgaccacagaggaggggcagctttgagcctgcatggggtcggagacgggtggcacaggctggggtccaagannnnnnnnnnnnnnnnnnnnnnnnnnnnnnnnnncgggatgggggcggggagggtgcaggtcagggtcccaggctgaagggtgggttccagtccctctcaccagcacaggcagcaggcctgggcagcacacaggtaggctcaggtgcccttggctactcagaattgtgggcagggtcctgctggcatctggagnnnnnnnnnnnnngagggtctcactcccacc

SEQ ID NO: 2259 - DNA, 453 bp, Macaca Fascicularis
tgtgtgagactcttcattaaagcagtatggtttcatactatacgatgagatattatgtctcaaaggtatatggtaaatttcagcagcagagcaataaatgttcaacagaaagcagcagtcataggagataacaagggtaggaattaatgggagctttcccacaggtaaacaggtgatggcatgaggaggttttaaccacctcataaataaattcttagccatgatacgatgtggattgcaactcaaccaaactttaatcaatgtgggtattggtgtaactttgttttctaaagcaaaaaagaaattgagttactaaatttgagcttttatatgataatgataattacccttcactgaaacaaaccaattatttctactcatctgttttcattgcaaaagaaattatcttttaacaatatatgtatatagcatatatctccaaagcaaatatgg

SEQ ID NO: 2260 - DNA, 703 bp, Macaca Fascicularis
  misc_feature (1)...(703): n = A,T,C or G
acactttcaagcatacagatgaagagnnnnnnnnnnnnnnnnnnnnnnnnnnnnnnnnnnnnnnnnnnnnnnnnnnnnnnnnnnnnnnnnnnnnnnnnnnnnnnntnnnnnnnnnnnnnnnnnnnnnnnnnnnnnnnnnnnnnnnnnnnnnnnnnnnnnaggagagnnnnnnnnnnnnnnnnttaannnnnnnnnnnnnnnnnnnnnnnnnnnnnnnnnnagagcggatgaggatacagaaggctggaggannnnnnnnngatgggcgtgttttgggtgtgctagaggtgtctcgctccattggggaaaancagtacaagcgctgcggtnnnnnnnctnnnnnnnnnnnnnnnnnnnnnnnnnnnnnnnnnnnnnnnnnnnnnnnnnnnnnggcctgtgatgggctcttcaaggtctttaccccagaagaagccgtgaacttcatcttgtcctgtctcgagnnnnnnnnnnnnnnnnnnnnnnnnnnnnnnnnnnnnnnnnnnnnnnnnnnnnnnnnnnnnnnnnnnnnnnnnnnnnnnnnnnnnnnnnnnnnnnnnncggccgacannnnnnnnnnnnnnnnngtgcggatagggcactgaggggtgggtgcgcggctaggagcacgcatggtgttgacttaaaaggttcattttgtgtgtgcacatggagnnnnnnnnnnnnnnnngactcccaggtgaaa

SEQ ID NO: 2261 - DNA, 737 bp, Macaca Fascicularis
  misc_feature (1)...(737): n = A,T,C or G
gacagcccatcaccnnnaatagaggcagtgagactgcaggtgggctgggcccacctagggagctgatgccccttctccccttcctggacacgctctcatgtccccttcctgttcttccttcccagaagcccctgtcacccacccagctggccctgtggatgggatcctctccaacctcctctagccctcccttggggaagggtggggggaaatataggatagacactggacatggcccattggagcacctgggccccactggacaacactgattcctggagaggtggctgcgcccccagcttctctctccctgtcacacactggaccccactggctgagaatctgggggtgaagaggacaagaaggagaggaaaatgttcccttatgcctgctccgggacttgttctcagcttgggcttcttccacctccatcacctgaaacactggacctgggggtagccccgccccagccctcagtcacccccacttcccacctgcagtcttgtagctagaacttctctaagcctgtacgtttctgtggagtaaatattgggattagtgggaaagagggagcaacagcccgtagccttggggttggacatctctagtgtagctgccacattgatttttctataatcacttggggtttgtacatttttggggggagagacacagatttttacactaatatatggacctagcttgaggcaattttatcccctgcactaggcaggtaa

SEQ ID NO: 2262 - DNA, 595 bp, Macaca Fascicularis
ttttctcctggaaactccaggtccattctgatttaaatccctaagaatgtcagaattaaaataaccggtctttcccataattggaaatatttattttttctggatgctgtaatcaatttagtaagtgaccaccagattgttatttgcactaacaaagctcaaaacacaataagtttactcctccatctcaataataaaaattaagctgtaatcaaccttctaggtttcatcttgtcttaaaatggtattcaaaaagggggatctgtggtgtgtgtgtggaaacacatacaccttaatttacctgttgttggaagctggagaaatgattgtccggcaaccgtttatctttaattgtattttatttggttgagggatttttttataaacagtttaacttgtgtcatattttaaaattactaactgccatcacctgctgggggtcctttgttaaatcattttcagagactaatatggataatccaggtaactttaaatagatgagcagtgagtgaccaggaagtttttctgcctttaactttgacagttcttaattatgatcatccaaaaccagctttcgcataaatttctctttttg

SEQ ID NO: 2263 - DNA, 734 bp, Macaca Fascicularis
  misc_feature (1)...(734): n = A,T,C or G
gagaaagtcaaaannttannngctatgacaggaaaagaaagcctcagattgggtttgtagaactttattaagtaaaatctccttcgctgaaattgcttctttttggtgttggatagagnnnnnnnnnnnnnnnnactaactaaataccattcactacnnnnnnnnnnnnnnnntgtccaaactcatcctctttnnnnnnnnnnnnnnnnnnnnnnnnnttcctaacaaaatgagattataggatagagcctggtgaaagccactcttttgctgtgcgcacacctgccnnnnnnnnnnnnnnnnntcaccttcatgattatagcgnnnnnnnnnnnnnnaaagcccaaannnnnnnnnnnnnnnnnnnnnnnnnnnnnnnnnnnnnnnnnnnnnnataatattggtaatatatattaaatgtgccaannnnnnnnnnctactctctattttagtgtttatgtttaatttcaaaagtaatggaataaaaaagaaatatattttctgttattattagatagcatttttgtatttctctattttcgtaatcagtaaatagtgtcatataaattcatttgtctcctctnnnnnnnntacttcaatatgaatctataagtagtaaatcagaaagtaacaatctatggcttatttctatgacaaattcaagagctggaaaaataaatgtttgattatgcacttttagagatgcatagttgccacaaaacctgtgggatgaa

SEQ ID NO: 2264 - DNA, 254 bp, Macaca Fascicularis
gacccataagtctgttcatcctgctgaagtcctctccccattgctccttcaagccaaaactacactttgctggttcctgtcccctctgagaaagggggcagaaagctccttcctctatccctcccatcgagatctgttctggggatggagcttccaacttcctcttcccagcaggaaagaatgccgcccacccttctgccttgcagagtgggattgtgggagggattggcagccttctccaccacctgtccagc

SEQ ID NO: 2265 - DNA, 705 bp, Macaca Fascicularis
  misc_feature (1)...(705): n = A,T,C or G
gctctccggccgctggnnnnnngtgttcacagcgcagctnnncccgcgccctgccgtggtgctgtgcggctacgcagcgctgcgggacgcgttagtgctacaggcggatgccttctccggccgcgggtccatggcagtcttcgaacgcttcacacgcggacacggagcnnnnnnnnnnnnnnnnnnnnnnnnnnnnnnnnnnnnnnnnnnnnnnnnnngttcttgnnnnnnnnnnnngctatggctacggggacccggagttcnnnnnnnnnntgaacctcttcagtgacaacttccgcatcatgagctccagatggggcgaggtgcctggcacgnnnnnnnnnnnncgtcttctctgcccacagcaacagcaagacccagagagccatttccaggaggagatgtcgggcacctttgtgattcccctgcttgtgactnnnnnnnnnccccactcaattcaaacacccagannnnnnnnnnnnnnnnnnnnnnnnnnnnnnnnnnnnnnnnnnnnnnnnnnnngctaccaacttcctggacaaggccaccctacagaggttcctgctccctgnnnnnnnnnnnnnnnnnnnnnnnnnnnnnnnnnnnnnnnnggcctgggcagtgtccccccnnnnnnnnnnnnnnnnnnngtggcctgctgaggtcaggctccgctgtagtgggctcgctggccctcaaacctcc

SEQ ID NO: 2266 - DNA, 737 bp, Macaca Fascicularis
  misc_feature (1)...(737): n = A,T,C or G
tagcccagtgctacccagnnncttagggcagcccccagggccggccagcctgtactctgggcaagagcccaaaatggctaagaatgtttgactcccttaatctcttccccagctacannnnnnnnnnnnnnnnnnntggtctnnnnnnnnnnnnnnnnnnnnnnnnnnnnnngacgcagtatcctcaaacctgtnnnnnnnnnnnnnnnnnnnnnnnnnnnnnnnnnnnnnnnnnnnnnnnnnnnnnnnnnctcctggatgtgatgggggctgccagagaggctcttagcataaaagggattagaagggcatttttctatgtgcctnnnnnnnnnnnnnnnnaaacaggcacctggtagctgtgggacaccgtggnnnnnnnnnnnnnnnnntaggctttgggaagataggacataaaggaaaatgagagaaacaaaatgggtcnnnnnnnnnnnnnnnnnnnnnnnnnnnnnnnnnnnnnnntatgnnnnnnnnnnnnnnnagatgggatacatcttgcctcagccccaagattcctccaacttacccatcccatccagggcctgcacagcttagagaggctcagcttggcaaatgctaaggcttcctcggannnnnnnnnnnnnnnnnnnnnnnnnnnnnnnnnnnnnnnnnnnnnnnnnnnnnnnnnnnntcttgtatttcttgtaatagtagttatttattgattctggtagcaggcagttctaaataaagat

SEQ ID NO: 2267 - DNA, 744 bp, Macaca Fascicularis
  misc_feature (1)...(744): n = A,T,C or G
gatagaaccagatgatggaacttcangnctgnnnnncatccaggtccttcctgaaactccattcttgtgccttagaggagcagctgtcactcacttgggtgatggagattgcctaggtttacttnnnnnnnnnnnnnnnaacagaatgcagactcagatcacaagaattaaaatactggtctcccaggctgtgctcagctgagacctgccttaagccccatccctctgtctacagcgtctgctgctttgtgtgcctgcctgctgctctctccccacatataaggcctcccaggcctccttcccaaaaggaatccccgggaatattccccagcaaatggagtggctccatgggtctccccaaagaggccccannnnnnnnnnnngtggccactgaagagnnnnnnnnnnnnnnnntgagctttctcccagctccattatccccaaccatgactctttcccnnnnnnnnnnnnnnnnnncctgaacatctctgttctgtgtctctcttgcctctaggagagagggagtacagtctcctcttatttcttctcttgcatcgccnnnnnnnnagtcactgctcaaaaatcaatcccctcaaccactannnnnnnnnnnnnnnnagttggtgccctttatagaaaggtggtgtcccatggtcctgtatctgttctcaaggaaatgcctgagtgccgaaacaagaccatctaaggactaatagataaatcctcttcatgtgaagagaaagc

SEQ ID NO: 2268 - DNA, 730 bp, Macaca Fascicularis
  misc_feature (1)...(730): n = A,T,C or G
caggaaannnnnnnnnnnctgggcctggctttgctgatgacgccttnnntgcagccctgctcgtgtgcgaggctgtcgggctgtctctagggtggtctccagggtgggagnnnnnnnnnnnnnnnncaagcctttggccctcagagaaagtgctgaaacacgcccctgcgccggaagtcacnnnnnnnnnnnnnnnnnnnnnnnnnnnnnnnnnnnnnnnnnnnnnnnnnnnnnnnnnnnnnnnnnnnnnnnnagcccctttttatccccgaaatgctnnnnnnnnnnnnnnnnnnnngggtggggaggggatgtctcacctgagctgactctgttcttcnnnnnnnnnnnnnnnnnccgcctnnnnnnnnnnnnnnnnnnnnnnnnnnnnnnnnnnnnnnnnnnnnnctttcccttcccactcgctnnnnnnnnnnnnnnnnnaggctgggccggagaaaccgaaatcctcagccctgcgtcttcctgagtcagcgagtgnnnnnnnnnnnnnnnnnnnnngacatgtgggtcctggcagaagctatggcccgtatccgcacatccagggaggaggcacagaaggcccagctcagcggcccccgccccccaccgcccacgcggagcagcaggggcggagcagcctcctccgcagtgtgtccacgtccgtgtttgagccttgctctggggctcagcccaacacctggctcgggctcactgtcctgagtgc

SEQ ID NO: 2269 - DNA, 2444 bp, Macaca Fascicularis
ttcctttctgcttcccatttcttggagacaaatctggttgccatggagaccgtgctgttgtcaaggtggctgattggccggcgccggatgcagggatgcttccttgggcccccggcgggcgcagccctcagcccgcactgcggagccaggcggcagcatggacggggctggggcagacatgtgggccagcaccttcaccctggccatggccgagaggaaaccccaggacgtctgggttctgctacctgagcacagcctggtcccaggacgcctggacggcggtggcgtccagtacctgctggtggggctctcgagggttccctgaagctcacagctgcttgtgtggttagcaaatggtcaccggtctggtgactgctgtggacaagccagtctctcccagtgctctccccaaatctcccctcgcctggcgacgcccagcagggctgcctgggccatgaccgcaggcctcagtgacgccctttccctcagctggcaggctccagtgcagtcgctgtccggggacctgggactcggcccacgtgcatgtccttttccacctgtggtgggacagggccggccgccgggggctggtgcagatgcgcatctggggccagcggtgcaagctgtgccctgcgcccggggactgccaggtgaggcccccaggcgagcggcccttcctcagcaggctggtcttgcacatcctgcaggactgctacggggatggcctcggcccaacccggcaccccagggaggcctacgagggctgctgtgaggcctgcgagctgggggtctgtttccttcagaaggccccagaccctgcctggagcaccaacaccacgacaggcaacttccctgccacggcctggggtggcaccggcgccgtctccaggggcaaacagctgcccacctccggcgatgacctcggcaagagtggtggtgtcatcgccatccccttctcccttgtgcgcgccagcaatgaccaggtgcccatcgctgagggccctgcaatccctgcctctctttcacaggaggcctctctccctgtgaccggcagccatggggctctggtcattggccagggctccatctacctgtctggggattctgtggccatgcctgggggcaaaggcttcccagtggccattggagaccccctcttccatggccccggcctcctcggcagcagtatccagaccttcgagctcaaaggtttccttttcaagggccggggttccctctgtagccccgttggcgtggcccagggctggggccccgtctccctcaacaatggccttgtccctgtggggaaacacacgccaaccatgttctactgcgtcggcctctcggccagtggggagggctccctcaccttcccctcctccctcactagcatcttcaccaacatcttctcagaggccaccgatggccctgtggccactaaagaggcctccatcaccctccccttcatctttactgatgtcaaggacgccgttgctgaagtggctgaaggcaacgagaaggaaggaggcggccagggcctcatccctgtgggtcacgaccccctgccagagaccaacgctggtggcctcgcctcccaggtcaagggctccctcgccctctccttccctgctgatgtccaaggcaaagattcctttactgacatctctgaaggcaaagagaaggaaggtggcctcgtcaccgcgggtcaggacgcccctctggaggccgatgcccagggccccgtcaccgtcagtgagggctccatcaccatccccttctcagtcttcgatgtcataaagcacaagggcggtggccacgttgcctacggcccccagggcaatggctgcgtctcccaaggctattaccagaagaggcggctgaggtccaggttccacaaggcccgctgtgggtgccgctgggaggaagacgagcgccctggccgcgccggtcgcaggccgcacgccgagccctacgaggatttctggatctgggtgtccatgaccgtgtgcgtcttctggctcatgtgcatgtgtcggctgaaccccgggatctacccgcagcaagtgtgacgccccgaagttcaggcaaccctcgcctctgggaccccgcctcatctctgggacccccgcccctgcctttcagatgcgcgccctgcctccgaggccccgcccgcccgcctccgagggagaccccacccctgcctctgagacccccgcctccgaggccccgccccatcacctccgaggcctcacctttgagacgcctgccctgcctccaggaccccacccctgcctctgagaccctgccccgccagcagcccagcctctcctgtcgctcgcttctagtggtgttgtgggtctgccctgagctgttcctgtgcgctccaggctcttcctatgtgtgtaactccaataaaatcaagcaaaaaaaaaaaaaaaaaaaaa

SEQ ID NO: 2270 - DNA, 742 bp, Macaca Fascicularis
  misc_feature (1)...(742): n = A,T,C or G
gaggcagtgaaggagctttnnncccagnncngnnagannnnnnnnnnnnnnnaccaccggaagcccagcccagcgcaggctgcggagacgccggccctggagctgcccctccccagcgtgcctgcccctgccccgctctgagggtcctccaggcctgctcgggttccagggccctgctgagtcgcggccctgctcagccagaagaggctcccagacctgggtgtacagagcgctccctcctcccggggctgtggctgggcctgtcctggggtcgtggcccctgcttcctgctccttggagcaggctcccagannnnnnnnnnnnnnnnnnnnnnnnntccgagggcacagcctctccttgtactttcacagccacagaaagtatgctcattttcnnnnnnnnnnnnnnnnnnnnnnnnnnnctgttttccaaggggagagggcggggcctcttcattggctcagcctggcaaaagtgaggcacactgctactgtcttggggttgtggagatggacctgtgaccccgtggaggccgtgtgggggcagcagcctggcctctgccatggtgggtgtcctggggcctgtgtggagggagccacctcaccctgcagcccannnnnnnnnnnnnnnnngaacaagcccaggtgtacctgtggccttgtttcacccttggaaccagcactcctcgcccagcagcgccgccttcagcggccgtgacgaggccagctggacacatggtgag

SEQ ID NO: 2271 - DNA, 721 bp, Macaca Fascicularis
  misc_feature (1)...(721): n = A,T,C or G
gtggattctgtaagantccagtttccaaggttagattcacatccctaatcttgcagagactagaatttcacagctcactttggaacatattcgaattcaaccagttaaaatcagaggaccaagtcgtggggccggggggcggtgttgaggagaggtatttttaaagatctggcaacttttcaggattatttgttgagaactctaaggtgaagatcaggaaagaaaagactgtgtgtgtgtgtgtgtgtgtgtgtagttcaagtgcctaaatcttgtttacctatcactttttaaaaaataattgaagtgtaagctaaataaaatgcttggagttttgcctgggcttagtgnnnnnnnnnnnnnnnnnnngtgtgtgtttgcataggaaggtgagatgaccatctactaaagaggaagtagctaaatacggatctgtgggtgttttttaaaaaaactcaacctatctggtattttattttaatggataaaaatgtaattttcctaaggtagcaacttatttccaaattaatatagatgaaaaatagatacccattagactaaattgaaagctttttgttctatatttgcatagcctttgagatattaatttcttagcagtgcctaggaggtctggggtttcctctttggtagnnnnnnnnnnnnnnncttgatgcagataaaatcacttgtcaatgcaaaatgtgttagaacttgataaagc

SEQ ID NO: 2272 - DNA, 1692 bp, Macaca Fascicularis
gtataaaataagatgaaaaagcatgtaactagaatctttcagtaagtttcctccctaaaggtgttattttcatcaatcgtgacatagaatctaaagggttttgattgaacaatcttaatacaaacagtccagtcttactacggtaaaaggaaagaacgattggccatggcattattttagtgcaacaacaattagtatgcctatgtggaggcataaatctctatgaattatgtaggagccctataaaggcaaacagaaagcatgtgtatgaagcttgccaagtatgatagagtatcccttaactgtctagatcaataggcagaagccagaatttcctaagcatttctagggaagtattcatcattttcatgtcataacaataacaccaccaaatatatactatatgcgggtacttttcttggaaatacaataatttcaaggcatagaggtgttaaaagatatagccattattcttattttacaaagaaagaagtcatgtcaaagttagttatggatatagactgaaacaagttatccgtggagacacaaatcccattcagatattctagttttgaagtaattgcaccctactaactttaagaaaatttaggagttattgataacttcatagtccttaaattaagaggggaaatgcttatttacatgagtgacaaagaagaaaaaagatagtgtttccttaggctgatttaagaataattttaacttaaaatatgactcttacaagtcagataaacaattgtcatgtatttctacattccagtctacactgaatttgtttatattaatgcaaagtgtgaccaaaggatgcttagccctattctttgaagatgatatagaaacaccatgcttcatcatcagaagacatgtaatcttacaatctatagtcttatacctgaacagaaaatgaatttaccttttttaaaaaagaaacctataatgtaacagttaaatatagtcttaaggatcaagaaagcttataacggtagagatttactttaatacctgttcttctaatgcgtttctgttatattatgcagtattctgagatcctaaacattctagaggacgttaaataactgtgatatatttttccaacctgtgtttattactgaaattactgaattaatggctgcaaaacatcaaataatactgcccaataaatcttttgacatacccttgtaaagcaaggaaatgcctttgtgtgtgtgtgtgtgtgtatttgcaattataagtttagaatcaaattttttaaattatgcttagctatttaaaaagatgcacttttaatgtgtttaaatatagttcctattatctatatgtttgccctcaattttggaaaaatgttagtttgatttagctttccagaaacgtctttatcagtcattgctcaatttttatcatccaaatgtaatttgactattattttagcctaaaaaatattgacacaaatgaataagtagattatgaaataaatatgagattttgtattaagcatcttacgtttgataagattttcaggatttttttaagacaaacatttgtctgcttccttgaagtgaaaagtttcaaaactattccaaaatgttcccaaactgaatgatttgtttaaggattttggagacacaagttttaacaaaaaacgtaacattaattaaaaaaaaaaaaaaaaaa

SEQ ID NO: 2273 - DNA, 720 bp, Macaca Fascicularis
ctcacatgcagagagagtacaaggctccctttctccttgtcctcagtgtacccatgttcttgctaccatcacagctgaatgcaatggaaggcggtcctctgagaggagcagggtggagatgctaacgtggagagcccctcccattgctgatagatcctcatttggcacacgctccacccacccaccccattctctgctcccacatgccgtagccccatcacagaagacatgacatggaaaaaacaccgtgtccaccttaattcttttcttaaatttggacacggatccagggtgtaggttaagggatttttaatttgccagattgtatgctatgcttatgttgttgaatgtagaatgaatctatggtatgacagcagcttctggataaacattacttgaggacctaaaatgcagaagggaaaaagcaacttttatcagttgcctactttgctttcattttatctctaatattctggatggggaaccatccaaagcttctgactgcatgaaggtcaagtgtaccagtgtgcagctgattttcttttccagaattaaaagtattttgggtggtgctgagggtcagaggaagaagattgtaagaaaggagaaacatgggcttggggagaacccagaattggggacagaagacctggcactaggtacagcacttagcacctctgatcttgtttttcctcatctgtaaaaggagattaccaatgc

SEQ ID NO: 2274 - DNA, 3567 bp, Macaca Fascicularis
  misc_feature (1)...(3567): n = A,T,C or G
ttgtttcagctatgcagttctttagtctaattttaagtctcttatgctgtttgagtgttggttcagaagttggacgatttggcctctctccatctctatgaggttcctctcagaacctcatctttccacttgtttctccatgtgaccttgccaggtaggctctccagctaagtaactagacatcttaaatggtgacttcaggcctccctaaaacacaaaattggaagttatcaggccttcttaaggtataggcctagagctggcactgtattgcctctgctgtatatattggttaaaataagtcccagaccagttctaagtcagtgtggaaaaaaggactgtataagggtatggataccagaagttaggcttcattaagtaccatcattaagactagctaacacagtcggccttctggctccaagtgacccatgtcccttccacatgcaaaatatcctttccttctacctcaaagctttaagtctcatccattaaagcatcaggcaaagatttaaagtccaagatcttatcagctaaattatgtattggtacagatggatctaaagaactatgaaccaaggacacaagttctaaaggcctgtgaaccaaggacacaagttatctttctcccatatacccaacgtaaaatgtgagacagggataggagtaccataatagaaacttctatgtaaaaagctggagttggggagtaaacatagcattctctggcttttattttattttttattttttatttttttgnnnnnnnnnnnnnnnnnnnnnnnnnnnnnnnnnnnnnnnnnnnnnnnnnnnnnnnnnnnnnnnnnnnnnnnnnnnnnnnnnnnnnnnnnnnnnnnnnnnnnnnnnnnnnnnnnnnnnnnnnnnnnnnnnnnnnnnnnnnnnnnnnnnnnnnnnnnnnnnnnnnnnnnnnnnnnnnnnnnnnnnnnnnnnnnnnnnnnnnnnnnnnnnnnnnnnnnnnnnnnnnnnnnnnnnnnnnnnnnnnnnnnnnnnnnnnnnnnnnnnnnnnnnnnncacagaaggccatcactggcttttaataattctgaaatctaggtaggcacatgttatcaactcactgttctgggggcaaggaatgtatgttgattagagaatagttgtgctctctgggaatagttctcttcagttattttcgctattctctgggcttttggttccatccactgatttttacttttccataaaaaatgaccagtgtttacagttgagtagcttcctcatcttctgtctgtctctagggagttggggacccaaacatcccttttctttgattgtctctgtacctccctgtctaagcttatataattcttttgaaacctttgttagcttcctgtatataagatcttaatgtactttatgagacagaaggcacacctataaatttttgaaataggcccccttctaccttgggcttagaatctgaggtctgtgggacaatatcatttagaatcttagagccatttttcccagtcaaaagagtgcatcaggcatggcctcaaatttttctgagtcttaatcaaatatttccttaggccatgctttattggcagcaccttggatttgtttcttgagctaaagccatttcttactttgagaatcttcattagctcatagctattagtatttattgtacattgctaagaaaaacctcataaaacccccacactccaaaacaaacagtggacaatttcagtattcttcctggaaatcttagctaaatagacaagttcattggctatattttctatttttcatgttaatgaaagagataatgtcaaactttacactgtcacacaaacaatcttttctctagcctctgataacaatgctcccccacttttcttccagacttcattaaccatctcctgtaggcccttcttggcttctgcatgctatccagttccaaaaccaatgctacatattttatatttttgtttcggtagggctctctttcaaatatcaatttctgttttggttattcattgctatgtggatataatgacttataagaactatttattattgtctctcatgtttctgtgagttaagtaggctcatccaagaaattcttctgtggtcttattgagggtctctaaattgatagtattcaaatagcaactgggactgcactcatacgaaagcctgactgtgatgctgagacggctgagtctctttttctttctatgcagtctcagggcttgtcttctcacatatataaaaaaaacctcacatatatagatatgcatatgatatttatacatggatatttttaaatactggcataattcttacatgaacactcatgactctccaaatcagaagttgacaggctttcttaaggcttaggctcaaaactggcataaagtaacttctgatacgttacattagttaaagtaagtcacagactagtcaaagttccttgtggaaagggactacacagggttctaatatgaagaaacaggattgattggggcaatatttggaaaccggctaccacacatgttatgacttcagtttcctaaacattactgtgattgctagggagaaaatggattggtggaggacatttttgaagtatcacagtggagagatagttgtagtttattaccgaatagaggcaatggagctagagagcagtaaactattcaagatatacttggagatagatttgaaaggacctgttgatgttttattaccaagtagaggcaatggagctagagagcagtaaactattcaagatatacttggagatagatttgaaaggacctgttgatgtattggttgtgaaggatgagtaatagggaagactcgaaatgattcttagtttataggcatatgcaacagagtgaaagatggtttccatttacctctacatgaggcagaaaagacgtttgaggcattggtaaccaatagttccgttttggacttcttaagtttaagagacatgttagatgcataagtgaagatttcaagtcaaaaagtagatatatacaaatctgcagaacagaaaaggagatcagggatatatatacttcatcctcataagaatatgcatgatatttaagaggataagattctagatgagatcaccttgaaaggagtacagataagagagcctaggactgaacgtagaaaactcaaactcttaaaggtcaggaggaacaaaagacggcaaagatgactgagaagaccttgaggtacaatgataatcgaaagagtaaagatcaggcctggtgcagtggctcacgcctgtaatcctagcactttgggaggctgaggcgggtggatcagnnnnnnnnnnnnnnnnnnnnnnnnnnnnnnnnnnnnnnnnnnnnnnnnnnnnnnnnnnnnnnnnnnnnnnnnnnnnnnnnnnnnnnnnnnnnnnnnnnnnnnnnnnnnnnnnnnnnnnnnnnnnnnnnnnnnnnnnnnnnnnnnnnnnnnnnnnnnnnnnnnnnnnnnnnnnnnnnnnnnnnnnnnnnnnnnnnnnnntactgtgtcaaaaaaaaaaaaaaaaaaaaaaaggccaca

SEQ ID NO: 2275 - DNA, 155 bp, Macaca Fascicularis
gtatcatgcaataagtcatcaaaggcttagtctagtgtactggtaagcgtagtggcattgaagcacttttcacaatatcaacatacatttgaattgcaacacacagatatttgtagagtattacctagtgaacccatttattatttaaaaaaaaa

SEQ ID NO: 2276 - DNA, 1955 bp, Macaca Fascicularis
gcttacacattcatgcaaaggagttcgcacagtgctgggcaccaccaggttctggctgctgtgtcccatgtggttgggatgccgtggtgggcccagagccggatgggatgctgagctgggactctctatcaggtcccggtcaccttccctgctgagggcatcagaccctgagacctggagctttcagcctgacgtctggcacagcctcagacgcagtgatcatggagcattctctgggaagatgcgcctcaattttgtcctgccctagcctggaaaacacagagaactctgaagatagcctagcctgagttcaccagagccatggggaggagccagcccaggtatcaaagaggccctccagagtcctcaatctgtgatagccctccacctagctattctctcacaaagcacctggctcttctccttctgagcactcatcccaagggacatccctgttcttccagctctgctcaaactctgctgaaggactttggttctctgcccttcacatcgtttccctgagatgttgcattcctctgctatcactctgatcctaatagtcacagtgaacaagacaagaaactgagccacagaggcatcgagcaacttgcccagggttgcagagttggtacgaggaagtggtccagatgcaagcctgtgtctgtttgattcccgagtctgtgctcctctctgtccctccttgcaccactctacttagaaggacacgaggtttgggagcagatccacaccactacagctgtgacttggaaggaacacagccatcattgatgtcaccgcagtccctgcaattctgtagcacagtgttgatttcattgtaccacaatgtagctctaggaggcaggacaggattcgtgcccattttatagacaaaaatgctggggttcagggcttgacctaggccctatcgaggatagtaatatggtttggatgtctgtccactccaaatctcatgttgaaatgtgattcccagtgttggaggtgggacctggtgggaggtgattggatcatggggatggatcctcatgaatggcttagcaccatccccttggtgatgagtgatttctcactctgagttcacatgagatctggttgtttaaaagtgtgtggcacctcctctaccctcttgctcctgctcgcatcaggtaagacatgtctgctctcacttcaccttccacagtgagtgaaagctccccgaggcctcccagaagtcgagaaaatgctgatattatacttcctttatagcctgcagaaccgtaagccaattaaacatcttttctttataaattacccagtctctggtagttctttacagcaatgcaaacatggcctaacaccaatagagaggagctggaactcaaagcaagttcttttttttcccccaaacttggctgaaggtgcgaatctcctggtgtgtttccttgggtcccaattcagaccttaaaatcaggatttgagagaagagggtgcacagtccctgcctcttcagataaagctctcttgccagagatttgcaaatttatttgaagccttggaacattttatttcaaaaatctttatgctggagaaaaaacccagtggatcctaggggtgggtgacaccaccctccatcctactcagagccccaagggtgcctctgggcctaggtcaagcaccatgaacgatactgtcattcagattccaagtctgccactcatcaacagtggtcccaacagtttttgccaacttccctgtgcctcaatttcctcatacgtacaatgggaaaataatgttatctgccttgcagaattgtgaggatcaaatgggcaaatgtctgttaaatactgagaatagtgcctggtgcctggcatataagaagtgctaaataaataaatgtcattcactggaaaaaaaaaaaaaaaaaaaaaaaaaaaaaaagaaaaaaaaaaaaggccaca

SEQ ID NO: 2277 - DNA, 659 bp, Macaca Fascicularis
  misc_feature (1)...(659): n = A,T,C or G
ccctttccctttccctttggcttccgttctcttccccctttatttnnnnnnnnnnnnnnntctatcagaatgagatctaatactcacaagtattatcctagcaaaacagaatcccacatactcaacacatctttaaaaaacccctagaactggctgggcgtggttgctcacgcnnnnnnnnnnnnnnctttgggaggccaaggcgggcagatcacaaagtcaggagatctagaccatcttggccaacgtggtgaaaccccgtctctactaaaatacaaaaaattagcggggcatggtagtgcgcgcctatnnnnnnnnnnnnnnnnnaggctgaggcaggggaattgcttgaacctgggagtccgaggttgcagtgagatgagattgcactactggactccagcctggcaacagagcgagactccgtcacaaacaaacaaacaaacaacctagaactgtacaatttttttttttttaagttagccaactatctgtgggcaannnnnnnnnnnnnnnnnnnnntatatgactttgtgctttacattcaaagaaagttcaaaacttttcctcttttggagtgttttccttttcccccaagggatctgggtaatattgatgtgtttaatgtattcaactcctagaaaatcacatatataaaa

SEQ ID NO: 2278 - DNA, 644 bp, Macaca Fascicularis
  misc_feature (1)...(644): n = A,T,C or G
tgtaaaatatgacaagngcctgttcaagggggtgttttcaattctgtgggctcagcagatgatactactcagcctttggggaaatgtccagttggctcctggcttaggactctccacaaggagctccaaatggtagggcttatcccctaccagaataaaagtatggcccaaattatgtgtttagaatttgcttgggctttaaacacgaaacattctctatgcctggtagagacaattccagtgtcagtgtcccacctgggacctctacagtcctcagtaaattatgattgcaatgaattagaaggcttttgtcttccatatccatcatccattatagcatctgtgtctccatctggttagggggagggaagctgaaatcattgatgtatcaatagaagtaatttagtttaggaacttgcatctataacttaccttgttttgttccactttaaagtcaagacaagaaagttaagctagcacacaggtgcacatgcttccagatgccacatgtgaacatttgttgatcatgtaactaccgatgagactttagctagaagataaattaaatcttagctaaatcattgtttttcattctggtggctataaggatgaatttgctctcagtcttgatacattgaaagccc

SEQ ID NO: 2279 - DNA, 764 bp, Macaca Fascicularis
  misc_feature (1)...(764): n = A,T,C or G
caaagtgctgggatacaggcatgagccaccatgctcagtcacaaaattctttatgaattttacacttggcaaatgttaatgatgaaagccatagtctgctcctaatacatgtccaaagcattgactatttatcattagctgcctggttacattagctccctagctccttgtatagaccactgctaatcccttaaaaacaagaggtctggcactagtagcacaacctaaggtggnnnnnnnnnnnnnnnngcaagccacagtcaaacttttctgccaaagtcagtagacttcagtgtatcaggctgctgctatcctaatgtatgtgtctatgagtctatttatccacacatctgcccttggctgactttctctgactcattgcttgcttgcttgtttccttgctttggaaaactattgaagatgtgtaggttattctttaggaaggggattgctacaaaaataccactgcaaaagggtggaaaagggtggagaacaggggagtagcctggctggatggctcaaatataaatgaatgaggaattnnnnnnnnnnnnnnntcacactttgtgatcaagtgatgtaatataggaattagtgtaaaagggaagaatgtctgatactgatctattaggtactttagaggcttcttgattggcataaagttcctaaggttatagcttttccctccttttggctgtatagcaaagtgttttaatccaaggttgtgccttactgttccattaaaattgtatcttcgatccatc

SEQ ID NO: 2280 - DNA, 760 bp, Macaca Fascicularis
  misc_feature (1)...(760): n = A,T,C or G
agcnnnnnnnnnnnnnnncaggnnnnnnnnnnnnnnnnnnnnnnnnnnncttgcaaacaaaagaactgtaaaacaagggcactatttcacatgggctnnnnnnnnnnnnnnnnnnnnnnnnnnnnnnnnnnnnnnnnngctgtgcctatcaagtcacagcccacagacctcccctttagtctattagtctggccagtagacccgggtctgggggagcagatatgtggaggagctgaggacccctcgggctacattaggaacgatttctttgggttgatagcttttccttgcctccctttcactgcttccgtctctagggggaatagaaaagggtgnnnnnnnnnnnnnnnnnnnnnnttttttaatcatttctgtctccccaggcgtccaggtgatcccccaaannnnnnnngtccagccccagacctgccgcctgggaatcaggattccttcttccccaaggcactgagcgtctgtctgcagannnnnnnnnnnnnnnnnnnnnnnnnnnnnncccgattgttcctccccagcccccggcatgtttcaccacaaccctgttgctacatcagagtgtatttttgtaattcctctagctaccatttcaatggccccatctctcctgctcacctgcctcttcccccttctaggggcaggtgaaaggaannnnnnnnnnnnnnnnnggttttgacnnnnnnnnnnnnnnnnnnnnnnnnnnnnnnnnnnttctttccgactgattgttttaaacaacgatctc

SEQ ID NO: 2281 - DNA, 779 bp, Macaca Fascicularis
  misc_feature (1)...(779): n = A,T,C or G
caggctggctgngaacaaggaatagtgtgctgggtagaaagggcgtgggcgggtgtagattggcctgggagtgttatagtagggagcaggcttcttcattcnnnntgagactcgcagcccccacttcttcccnnnnnnnnnnnnnnnnnatgaaggaagaagtggggttccccctgacccagctgcctcttagggtttggtgtgagacatgcacacacactcacacgctctcactcaccacacnnnnnnnnnnnnnnnnnnnnnnnnnnnnnnnnnnnnnnacagaaagctcttcccacccaaataggccaggccccagcatgatcctgaaatctgcatctgccgtggtttgtattcattgtgcatatcagggataccctcaagctggactgtgggctccaaattactcatagaggagaaaaccggagaaagatgaagaggaggagttaggtctgtttgaaatgccaggggctggccatgaggaataggtgaaaannnnnnnnnnnnnnnnnnnnnnnnnactagactgaccctacccttccctcagtgagcagaatcactgtggtcagtctcctcctgtccnnnnnnnnnnncatgaatactcctgttcctccagtttcccgtcctttgtccctgctgtcccccacttttaaagatgggtctcaacccctccccaccacgtcatgatggatggggcaaggtggtggggactgggggagcctggtatacatgcggcttcattgccaataaatttcacgcactttaaaagtcctgtggct

SEQ ID NO: 2282 - DNA, 725 bp, Macaca Fascicularis
  misc_feature (1)...(725): n = A,T,C or G
agagcagcnnnnnnnnnnnnnnnccaaatnnngagccaatatttattaccgtgtttgtaactcctgtaccactgggcatgnngtttttacaggccttagcttctttccccataaaatgaggagnnnnnnnnnnnnnnnnnnnnnnnnnnnttccagnnnnnnnnnnnnnnnncgagataagttcctgtggcctgcaggaggcattactactcagcacccaatgnnnnnnnnnnnnnnnnnnnnnnnnnnnnnnnntgtcaattgcactacacctttcccctacagatatcacaggaagcgttaactgattagaaaatgggactggtagcaaggaaaaacatcttccttgatgtattaaaaattgggaaatgctccctggttttcatctggaaatcttattatctaaaaatcattnnnnnnnnnnnnnnnngagttttccaaggtgaggctgaactgatgatacaagcagaatagctttcgagtaggtcactgagaccacgcttgtgagctagcagagactctgagttacctccttatgggacatgtcctttcctgttctcctatgggagtcacaccacctgctgggctgatgagatgcaatttcaagatctgcctcaactataatcttttgtaatataacaacaaaaaggagcaatctttaaatgtacttactcaccttctacactgtaattcttgcactnnnnnnnnnnnnnnnnnnnnnactc

SEQ ID NO: 2283 - DNA, 657 bp, Macaca Fascicularis
  misc_feature (1)...(657): n = A,T,C or G
ggtggagtttcccccgacagaatatctccaactcaacatgtccaaaacagaattcatgatctaaaagccttgagcattccaaggctctctgtcccacaaaatgacattgtaactcagaaaactagatgatatccttgacacagattccccccaccacacccttcatgaaatccctaatcaatctatccacagtgtattgatatggctttttacatgtttcttgaatcttttttttcttgctaataaattatatacccactaacctattctgatctacttttatctctaatcttcatgactgcaatagtgtnnnnnnnnnnnnnnnnnnnnnnnnnnnnnnnntattctccatgctgtagccagaatcatcttctgattatgttctcaaaattcagcatcaaatgcttcattgatttggctgggcannnnnnnnnnnnnnnnnnnnnnnnnnnnnnnnnnnnnnnnnnnnnnnnnnnnnnnnnnnnnnnnnnnnnnnnnnnnnnnnnnnnnnnnnnnnnnnnnnnnnnnnnnnnnnnnnnnnnnnnnnnnnnnnnnnnnnnnnnnnnnnnnnnnnnnnnnnnnnnnnnnnnnnnnnnnnnnnnnnnnnnnnnnnnnnnnnnnnnnnnnnnnnnnnnnnnnnnnnnnnnnnnnncacgc

SEQ ID NO: 2284 - DNA, 155 bp, Macaca Fascicularis
ccctgatccccccgcccacaggcccctgtgaaatactctaaaaatgacaaaatacctgaacacaaaagaacttataagagatatgaactccacctgccctacaaactccatctcactttttcttctcacttcatatgttttctaccccactggct

SEQ ID NO: 2285 - DNA, 1508 bp, Macaca Fascicularis
  misc_feature (1)...(1508): n = A,T,C or G
tttttaaatggggatttaaaaaatggaatctagatatatgtttttctattttcttttattttatggaaagctaaagtacaaaattgcttggtctggatagctgtcagcccctctatgtcccttccctctttctcctgcatttgtagcttcccccacactttggtcttctttcccgcagcttgtaaatgggtgcaagttttacctgtctttttactctcatgttcgtctttctttcctgctctgctcctctttctctcttgacagtcaaactcacagagaccagagttaacacgaaggatctgtgatggtgccccactttcttcctccaatcacccataaatcctctggattccactgccccatccacacccccaacactactgaaactgtcctgccatttcaaatcccatgcagcttgtcagtcgttgtcacatttgacctccctaagggaaattgacaatttcctttggagtctgttccctctttgggagcccacaaccccttctcttgcatctttccttgtagctcattaatttatgcttcccagcttttgctgtttttttaaatgcaggtgcttctcgtggttctgtcttttggccttggcttttccatgctctttactcctcctggacaaaatgagctatgccctgggatttagccatcacctgtctgctgatagtttccaaacccacttcgtcattccagatctccctctcatggactcgacacataggtattttggaatgtctttactaataggtatctaaaaattaggtttgttaacaaattaagattttcatcttacctttaactctgcaccttttgcttggtaaatagcatcgtttggccacccaagtgagaaacagagatgcagccaagtcctgactatgcctagatccaatcaaccaaatcccccaatcctatattagacatttccttctaatgtttccaccaaacatgattactgttgctcctgttttggttcaggttgtgatcacttttcatctgggcagatgctttctggaatcctgccttcagtctcctgcacctccaaattacctccaattcactctccagatgatatgtctggaatagcattatctagtacagtagccactagctgtctacacctatttaaatttaaatttattaaaattaaataaaatttaaaattcagtttcttagttaccctagccacacattgagtactcagtagcccatgtggctaagtgaacagtgcagataggggacatttcattcattggatcacgaggtcagnnnnnnnnnnnnnnnnnnnnnnnnnnnnnnnnnnnnnnnnnnnnnnnnnnnnnnnnnnnnnnnnnnnnnnnnnnnnnnnnnnnnnnnnnnnnnnnnnnnnnnnnnnnnnnnnnnnnnnnnnnnnnnnnnnnnnnnnnnnnnnnnnnnnnnnnnnnnnnnnnnnnnnnnnnnnnnnnnnnnnnnnnnnnnnnnnnnnnnnnnnnnnnnncaaaaaaaaaaaaaaaaaaaaa

SEQ ID NO: 2286 - DNA, 815 bp, Macaca Fascicularis
  misc_feature (1)...(815): n = A,T,C or G
agaggaacaaggnnnnngaagaagaagtcaaggaatttgtcaaatccatgaaggaacccaagaccgaggcttaaggatcccaggagtactgcaaggacagcccgagagaggcctaagtctgacccctttctcagtgctacctgatgacggggatacaaaattactctctgagagggaaaggatattttgagggaaacattaaatttctccataaataaatgaatagagtttgcaggaaggtgagggtgaacagagatgtgtgtggacatctctgaccgtccatcgctgtattcaaatggattttgtnnnnnnnnnnnnnnnncaggcatgaccatgtccaacgaagacattcaaggcagcacatctcaggacccaggcaatagactggccccaacacaggctgagctgaggtgtgattaattctttgttttttgtgtggaacagctcaccttgtcagacagcctcagggtatctctgagacacaggggcagaaaatgacattcatcttttgagtcctcatccatggagtgctgtgtttggggggctacatctgctgaagtgagaaccccatttttccaccccaccatgatgcccgttctccatgtcttttcttaccttccctgtagccttgagaaggagaattatgacgtttgggctaaggtggtgaggctcaatgaagaactggagaatgaaaagaagaagtttgcagccctagagatcagcctccaacttattattaggcttattattaggctaaaccagaacaagcaacaaactgtatttatgcaagcaaaactgatgaaaaaagcacccag

SEQ ID NO: 2287 - DNA, 747 bp, Macaca Fascicularis
  misc_feature (1)...(747): n = A,T,C or G
gtatatatatnnnnnnnnnnnnnnnnnnnttnnnnnnnnnnnnnnntatgaattnnnnnnnnnnnnnnnnnnnnnnnnnnnnnnnnnnnnnnnnnnnnnnnnnnnnnnnnnnnnnnnnnnnnnnnnnnnnnncgagaagagagnnnnnnnnnnnnnnnnnnnnnnnnnnnnnnnnnnnnnnnnnnnnnnnnnnnttnnnnnnnnnnnnnnnnnnnnngctcaaaatgccacagaatctctcctcttctccccactccttccccatggcaggaaccggaccatccctacatgcaacatgctgttcctccagcccctcccannnnnnnnnnnnnnnnnnnaccttggggcaggggggcattacatgggatgcttgtgtaatcgaccacccagcctcctctgtcccctcccggcctcccccagaatcacttcctaggacacccgagctgcttgcccagggtcctgtttccctnnnnnnnnnnnnnnngcataccagggctttgtgacagtctctaattcccttcccttctcgttaagaatcatattgtatagtagctttcagaccatacagtattcattgggttactcctattattnnnnnnnnnnnnnaattgtgaaggtcggagtagttagatctttagcttttattccttatttttttgtattactctccatgtgtataaattattgatcatgttgctggcttttataaacnnnnnnnnnnngaggagnnnngcctcagcctttgca

SEQ ID NO: 2288 - DNA, 687 bp, Macaca Fascicularis
  misc_feature (1)...(687): n = A,T,C or G
agccccagtnnngnnnntagcatagccagcagtgccccaggcagaacctggcaggggaatggggagatgactcccccacttcaaggaccccgtgctcgattccggaagaaacccaaggctcttccctacaggagggagaacagtcttggggacttgcccccaccacccttgccacnnnnnnnnnnnnnnnnnnnntgggccctagagctgagggcagcaggcagcatgtcttccctggagcgggagcgcagtggagagaggaaagtggtacaggccatgcccctggcagcccagaggggtccccacccggatgaagaggnnnnnnnnnnnnnnnnnnnnccgagcttcctttcccggggccagggcannnnnnnnnnnnnnnnnnnnnnnnnnnnntcttccaggnnnnnnnnnngctctaggggatcccggggccctggccggagccggagtcggagccggagccagagccaaaggccgggacagaaacgccgagaggaaccaagatgnnnnnnnnnnnnnnnnnnnnnnnnnnaggagtgccacagggaagggtagtagggnnnnnnnnnnnnnnnnnnnnnnnnnnnnnnnnnnnnnnngaagcccattggtttccacnnnttnnnnnnnnnnnnnnnnnnnnnagagctagctcctccctttctttctctttctaccctgaga

SEQ ID NO: 2289 - DNA, 743 bp, Macaca Fascicularis
  misc_feature (1)...(743): n = A,T,C or G
tgaaaaatcacaatgaagtaccaagaaaatgtttgtcaatataaaaattttagcagcatttccatagtttcaggctccaacattagtcgtacttcctccctcccactatcaaaaaagaagagactccaatgggatagagtagannnnnnnnnnnnnnnnnnnnnnntgggcctcagagaaatactccatnnnnnnnnnnnnnnnncccctccctcccatccctgaactgctagaatgtcaaagcacagaaaaagcctcctttgtgctgacatttgagacaaggatccattcttcgggctgccgggagaatnnnnnnnnnnnnnnnnnnnnnnnnnnnnnnnnnnnnnnnnnnnnnnnnnnnnnnnnnnnnnnnnnnnnnnnnnnnnnnnnnnnacaaggaaaggccactgcagggcgggcgggatctggggtgtggtggcggcggtggcactgctggtgggagnnnnnnnnnnnnnnnnnnnnnnnnnnnnnnnnnnnnnnnnnnnnnggtccggggcaggcatgatcagtgagggtgggagacagacaatgtgaaaatgtaacactggccaacgattcccctgcttctttggtactttccaaannnnnnnnnnnnnnnaagtataagggaagcacaccattaaaaaannnnnnnnnnnnnnnnnnnacaaaagcaatgatgatatattacacannnnntcatacacaannnnnnnnnnnnnnnnnnnnnnnnnnnnntgtga

SEQ ID NO: 2290 - DNA, 744 bp, Macaca Fascicularis
  misc_feature (1)...(744): n = A,T,C or G
tgcccagcgtggtgaaaccctgtnnctactaaaaatacaaaattagctgggcttggtggcgtgcgcctgtaatcccagctacttgggaggctgaggcaggagaattacttgaacctgggaggcggaattgcgccactgcactccagcctggnnnnnnnnnnnnnnnnnnnnnnnnnnnnnnnnnnaaataaataggtccattaaagaaattttaagtggagatgtcctttggagctgggagtgaaagtagcacttaagcggtggctttcgcatgtcttgataaaagtaatgagttgtttgcctcaatacagcttcaaccaaaattgggattttgagctcaaaaactgttaatgcccttcatagaaattaagggcaatggaaatcttttcttaacattttacacctctacccctaaaattttaagaattatacttcataaaaatgtgcagttttcatacaacagcccagtgttgataatagaggttaatgattccttattgttagggacctatcttgtaattccagagttatttatgttttctacagttgaagaggaaaaataccgcttatttttgcctccttttcaggatttgttttggcttcttgagtagctgtaatatttttgagactcctacaggccgggcggggtggctcatgcctataatcctagctacttaggaggctgaggtgggagaattgcttaaacccgggaggcagagagcggagatcgcatcactgcactct

SEQ ID NO: 2291 - DNA, 2331 bp, Macaca Fascicularis
  misc_feature (1)...(2331): n = A,T,C or G
aggcttgcttaaggaagcgctgcccctgctgccgccgccacggccgccgggagctaggagtgaacccctgcgggggaggaggttccccctcgcgatcgtggggacagccagtcctgtgaaacgaggaggcggttccggaggcccagaaacgcccagggagaactggagccgggggaagaggggacatgagcggccagctgagtgcagccccaggccgctaggggcggacccagcagtccctcagctctcctcggaaccatgggtgggcagtctccactgtcacagcccaaagggtcttagccatcgggtgcctctccctaatgtgtacacgtgcagaaaatgagtcctgggacggggaaagggccagcatagggggcttttggtcttcagctgtattttattttatctatttatttatttaaagacnnnnnnnnnnnnnnnnnnnnnnnnnnnnnnnnnnnnnnnnnnnnnnnnnnnnnnnnnnnnnnnnnnnnnnnnnnnnnnnnnnnnnnnnnnnnnnnnnnnnnnnnnnnnnnnnnnnnnnnnnnnnnnnnnnnnnnnnnnnnnnnnnnnnnnnnnnnnnnnnnnnnnnnnnnnnnnnnnnngatcaggctggtctccaactcctgacctcaagtgatctacccgcctcagcttcccaacgtgctgggattacaggtgtgacctactgcacctggccttcagctgtattgtattgtagtgtagtgtagtgtagtgtagtgtagtgtagtgtagtgtagtgtattttttgnnnnnnnnnnnnnnnnnnnnnnnnnnnnnnnnnnnnnnnnnnnnnnnnnnnnnnnnnnnnnnnnnnnnnnnnnnnnnnnnnnnnnnnnnnnnnnnnnnnnnnnnnnnnnnnnnnnnnnnnnnnnnnnnnnnnnnnnnnnnnnnnnnnnnnnnnnnnnnnnnnnnnnnnnnnnnnnnnnnnnnnnnnnnnnnnnnnnnnnnnccatctcctgacctcgtgatccacccacctcggcctaccaaagtgctgggattacaggcgtgagccaccgcgcctggccaattcagctgtattttaaagcgaaggtccccccagcactcccagccatcctccttcccaatcaggtacaaaagagccatggtcatggcccgtaccatctgtgtccaactactgaaggcacccctgtgcattgcatgatccagtgtgatcctggatgattggggcttgtcatcagggaatccacatctcactggtatcttccactcccatgcacctccacctacctggacacatcccattcctcagtgaaactgttttgtcctgaaggggcagcaacattcctttaaaacagcatgaaggtcgttctggtggattccttcaggccttctagggcctgagggaggtctgatatacacttcattcccacctcccaacccctcagaatctgagagaatggagccgagtacctgtaggaccagcgaatcagaggaagactatgttgaggaaaaggaatctgagaaatgtgttaaagaggaagctaccatcccctctaactcttcacagcaggctctcttaaaagctgactataaggcattaaaaaatggggttccctcacccattatagccacaaaaattccgaagaaagtcatagccccagttgacacaggcgacttagaagctgggaggaggaagagaaggcggaaacgcaggtaactattccctagatcccctcaactgcccagctccagggagtcacccactggcctcccttcaacatttgggggagctgggatctaagatcttccctttagcctacaaaagaggacaggaaatgctggagcatcattaaccctttgatacaacacaaacaaaattcagaactatttaggctggttcattttggaatcccagcctgtttacatcgtcctggtctttcttttaagccgcttctagaggaaaggaattgtgttgttaatttgttggatgtctcttcgtctgggtgcctgtccttccctcccactctgcctgatttatgctattcctccattctagatccctggccatcaacctgaccaactgcaagtatgagagtggtaagcactcagcccgtcgctcacactatggtgcataacagggtgcctacagccgctgctcttcctctggaatagacccccgatcaggcttccagcccctggggcctggcaggcttgcctataacctgtactgagcttcctaggtgtcctctgcctcagacactggcagctgagacattgctgttccaggcagtctcagtgttagggagggtatcttcacagtaaacaaaaaaaaaaaaaaaaaaa

SEQ ID NO: 2292 - DNA, 771 bp, Macaca Fascicularis
  misc_feature (1)...(771): n = A,T,C or G
atacattgtccatgtgggatgaaaatgtgcacatcacattcaggttttcctgctttaacatttctgtacttctctctttgaaacacacactccacagatcttatataggaaaaatgtgaacaacttttgggctgcaaaacattaatgcatacgtaacaattcatcattgccaagagcagctagaagcaaatatttaggaagaaaaagaagtataaaaattcctagagacagcatgctttattttctcaaaattccatatgtgactatgagtgtatggagaaatcgtttgttgtttgatttttaaatgtattgtttaatttgtccttggtaggcaatctccttcaaatattattagcaaaatcagacatagatcaaagtatttatttgcatcttctgactgaaattaagcagtacttggtttcaaatgttttaaaaataacaccttttaaactggagttgatattgaagatcatgtaaaattgttctttatagactttgtattctaaatatgaagtttattgttactacttattagttaattccatggcagattttcattactattgaatatattatacatagaaactagggtcttaaataattaagttgacttttcctgttagttattccttaagataaaattatgctggtgatgggactgttgaatttcnnnagaaattaactctttagaggcataagtaatcgaaagactgtttcccctgattaagtacaaataccaataagccaaactcatataaagattttcgtatt

SEQ ID NO: 2293 - DNA, 727 bp, Macaca Fascicularis
  misc_feature (1)...(727): n = A,T,C or G
caccacatgggctggtttcacttcctcagtctcttgcctaccccagtgagagtctgatcttgtttttattgttattgcttttattattattgagactctagttcttgttttgtctctctgaatgaagaagaatgtgtcttcgttaggccaagtctgcgggaagcctggggcagcagcatgaagtgttagaggaagtgggttgggtatgggagtttccatctcctctctgagcctgtcagggtgtttgtggagagcagagcaggagcaccctgttggagaggccagggcatagctgtgggcaggcttgggcttcagtttttctgtgcccaccatttgcccctttgtcctagggtactctgaccagcagggcatgttggtgcccatactccccaccctacatgttctcaggttctgtcccatggcgcaggtgatggtctccctctgagctctgggtccacctccctggcctagttctccagcatctgctcacaggttcgagccacatcactgagcttgaggcgggcatagtccactcgcttcagagccatctgacagtccttcctcgaagagtagctggagccctcatggggctgccctgtggccacctacaagacagactatcaatggagcaccatctcctttacccttactccaagcaggcatcaggtctcttgtctcatttcttacctgagtttgaatttgttaggccannntggtagctggataa

SEQ ID NO: 2294 - DNA, 775 bp, Macaca Fascicularis
  misc_feature (1)...(775): n = A,T,C or G
tcagtaggaagcatgtcacatgtgcactgttggnnnnnnnnnnnnnnnnnnnnnnnnnnnnnnctgaaccctannnaagcctttgggcacagtttaaaacttataatggtggaccatgaacctcaaaacaaacggatatttttggagtttgaggatannnnnnnnnnnntagttaaagtttatatttggggcatgaaaaactactaaaagaagaaaagtgttagagatactacatttcaaagggttggcattttccctttggccactcaagcagcatttgatgtatctaaagaaacagagtcattgtttattttttaaaaaattatatgcagttgtacaagacaccacattccattgaaatgnnnnnnnnnnnnnnnnnnngcaaccagataacaaaaacattttgagtcttttatctaggtagttctaattattcagatacttcgtttaacaaaggaaaacatcctgacttgtctcatttcatttgtagacttttcattgtataggcacaaccaaagagtcagactggtttaaaaccgcaaaaggaaaaaaagtatctcacacagtggatgttgtttctaagaatgttacaaaatnnnnnnnnnnnnnnnnnnnnnnnnnnnnngaagaaaaaaaaaaaacaaaacaacttttcatttcaaagaactaatatactttgannnnnnnnnnnnnnnnnnnnnnnntattgtcaagctttaactgcctttttagaactttttaaaattttgaccccacaaatctattgtattagtgc

SEQ ID NO: 2295 - DNA, 731 bp, Macaca Fascicularis
  misc_feature (1)...(731): n = A,T,C or G
atcctgtcgcctccnnngcgtagacnnttcagagggtaggatgcaggcaaggttcctctctggggcctgcaggcccgtcctcccctggctccttcccaccctttctcaccattcacgccaggctcagggcgcaggactgggatgcttcctgcttctgaagcctctctgtgccttggtctcctccatgaaggtgcattgagctgaccaggtaagagctgggtgcagcaggtcccatgtggtnnnnnnnnnnnnnnnnnnnnnnnnnnnnnnnnnnnnnnnnnnnnnnnnnnnnnnnctggcagtgttgccatgggatgggtgtcttccacccacggcttgctggcatggctggctgtgtcannnnnnnnnnnnnnnngggccctgtgcacacaggccctgaggaagcaccagactcccctgtgctgtcctctgtggggaaaaggggtgatatggtctggctgtgtccccacccaaatctcatcttgaattgtcactcccacaattcccacctgtcgtgggaggaacctggtgggaggtgattgaattatgggggtgagtctgtcctgcactgttctcatgatagggaatgagactcacgaaatctcatggtttaaaaatgggagtnnnnnnnnnnnnnnnnnctctctctttgnnnnnnnnnnnnnnnnnnnnnnnnnnnnnnnnnnnnnnnnnnnnnnnnnnnnnnnnnnaggcctccccagccatgggaa

SEQ ID NO: 2296 - DNA, 680 bp, Macaca Fascicularis
  misc_feature (1)...(680): n = A,T,C or G
gagctgcacattgagcggnnnnnnnnnnnnnnnnnnnnnnnnnnnnnnnnnnnnnnnnnnnnnnnnnnnnnnnnnnnnatgactgaacaagttcgcagcatttgtaagannntagccatgaaagccgtccnnnnnnnnnnnnnnngttctgccctctnnnnnnnnnnnnnnnnnnnnnnnnnnnnnnnnnnnnnnnnnnnnnnnnnnnnnnnnnnnnnnnnnnnnnnnnnnnnnnnnnnnnnnnnnnnnnnnnnnnnnnnnnnnnnnnnnnnnnnnnnnnnnnnnnnnnnnnnnnnnnnnnnnnnnnnnnnnnnnnnnnnnnnnnnnnnnnnnnnnnnnnnnnnnnnnnnnnnnnnnnnnnnnnnnnnnnnnnnnnnnnnnnnnnnnnngtctcggattgcccctcggtctttctggatgactctgctgacagatgccctgccccttttggaacaaaaacannnnnnnnnnnnnnnagaacagacttacgagttgatgcagtgtctggaggacttgacgtcaagaagacctgtgcgtggagaatttgatattcagcagctccaggatgaggacatagaaaccaccaaggtggaaatgctgagnnnnnnnnnnnnnnnaaatcttgctcgggcaattannnnnnnnnnnnnnnnnnnnnnnnnnnnnnnnnnnnnnnnnng

SEQ ID NO: 2297 - DNA, 1321 bp, Macaca Fascicularis
tactggaggtctcgcccgcgtggctgtgggcgtggctagcgtggcttctcgggaccacctgaactcgcggccatggccccggccgccgccagccccccggaggtgatccgcgcggcgcagaaggacgagtactaccgcggtgggctgcggagcgcggcgggtggcgccctgcacagcctggcgggtgcgaggaagtggctggagtggaggaaggaggttgagctgctctcagatgtggcctactttggcctcaccacacttgcaggctaccaaaccctgggggaggagtacgtcagcatcgtccgggtggacccgtcacagacacgtgtgccctcctggctgcgccgtggcgtgctggtgacgctgcatgccgtcctgccctacctgctggacaaggtcctgctccccctagagcaggagttgcaggctgatcctgacagtgggcggccttcgcaggggagcctggtgccaggcgggcgtggctgctcaggggtgcggcgctgggtgcggcgccacacagccaccctgactgagcaacagaggagggcgctgctgcgggcggccttcgtcctcagacagggcctcgcctgcctccagcagctacatgttgcctggttttacatccacggtgtcttctaccacctggccaagaggctcacggggatcacgtacctccgtgtccgcagcctgcccggagaggacctgagggcccgtgttagctacaggctgctgggggtcgtctcgctgctgcacctggtgctgtccgtggggctgcggctgtatggcttcaggcagcggcagcgagccaggaaggagtggaggctgcaccgcggcctgtctcaccgcaggggctccctggaggagagagcggtttccagaaaccccctgtgcaccctgtgcctggaggagcgcaggcacccgacagccacaccctgcggccacctgttctgctgggagtgcatcaccgcgtggtgcagcagcaaggcggagtgtcccctctgccgggagaagttccctccccagaagctcatctaccttcggcactaccgctgagccggcgcccaggtgggcctggacacagatgacttctacagaagtctgaacgcaagatttagtctcaagatgaaccctacttgcacaggaattagaacattctcacgggttttctatcatgtaagatactaacccagccaccccgggagagaacagaaagctgtccctgactgtgctttctcagccctgggaggggcgctaaccccaacctggtatgactcagccacttcttcaggaatttcacttatttggacaggattttaggttt

SEQ ID NO: 2298 - DNA, 711 bp, Macaca Fascicularis
  misc_feature (1)...(711): n = A,T,C or G
agcccgcaccccaggctggcttccctccagcctggcatccggcccggttctcacttgttntccagannnnnnnnnnnnnnnnnnnnnnnttctgaagggactcgcagaatttctatgnnnnnnnnnnnnnnnnnnnnnnnnntgagtcggtaatcctgccaatcctaaggggtgggggacggaaggacacgtaccctgcatctcccacctggcgttgcctgggaggggtgtgggggaaaagnnnnnnnnnnnnnnnnnnnnnnnnnnnttcnnnnnnnnnnnnnnnnnnnnnnnnnnnnnnnnnnnnnngtgagagtctcctctttttcattctgcagatgggagatggggatgattgaagtgagatttcagnnnnnnnnnnnnnnnnnnnnnnnnnnnnnnnnnnnnnnnnnnnnnnnnnnnnnnnnnnnnnnnnnnnnnnnnnngggatatcttaccagtgagatgagattcgtcagggnnnnnnnnnnnnnnnnnnnnacagtatcctcaggctcccgcactggcnnnnnnnnnnnnnnntagtnnnnnnnnnnnnnnnnnnnnnnnnnnnnnnnnnnnnnnttccccacaccnnnnnnnnnnnnnnngtcaagcaggaagggtcattggcaataatgaagaggctgaattacctctcctctctgcttcccctgggtcctcacaggcctctgaggctgtgtattatcc

SEQ ID NO: 2299 - DNA, 713 bp, Macaca Fascicularis
tagcagagattaactgattcctaataatagcctgtaggatagctaccttggcacagcttgcaagtaatttaaggcttgtccttagaggctggtccataaattatgtttaattagctgaaggtctccctgggacacatcagactggtgtgtgattgagcctaccagctcagtgacctctgaatttcatgttggagtataagggagatgctgagatactccagtaaaatgtttctttcctttactaaaacaagagctgaattcttaacttctgctagcagctccgagaggtaccgccactcggtttgagggtctctgctcagctagttcctggctttgctcttgaccgattacttatacttccagggtctcagtgccttatctctaaaaagaagccgagttcaagtctacagacccttatctgaaacccttaaggctagctgtgtctcataggtctgatgttttggacgttagaaatgcaatccagcacataggccatatacctagtgacacccacagcaaggcctagggcagccacccgtaatcacagtgatagtcaccacagtgggataaagagaccagaagtagcctcatgatggttccaattagggtttgctctaaatgcatgtgtcaaaattaaattaggattttagagcttttttggattctagaacggaggataaggggccgtaaacctcactgtgaatcagagaagc

SEQ ID NO: 2300 - DNA, 717 bp, Macaca Fascicularis
cagaaacaaaagaaaaagttgatgtagtatataccttcaactgtttttgaagttgacttttttttctttaagctttaggtaaaagtgtatgaggagggagagggcccaatataaatattcacatcttcttacctttttgggaatggaagaagataaatcttgagtttttctgcctatattaatcaggaattaccctttgaaaaaagtgctaaataaatatttcgattttttttttcaagggaagttaggtgaaagaaggaaaaacatcacaagaaagactacaacatgctgtttgttgtctgagaggtgaggaaccaaagggaggcaactaaagtgggaaaccatcttgctttttctaatcagttcgtggaacagaaatgtggaagctacctttaggaacatggagaatttccaaaccaacaggcaaaggaaaactaacacacaaaaatgaccttctaaagatgcaggttttggccaggcacagtggctcaagcctgtaatcctagcactttgggaggccaaggcagatgggtcacctgaggtcaggagttggagaccagcctggccaacatggtgaaacctcatctcgaccgggaagtgcaaaaattggccaggcgtggtggtgggtgtctgtggtcccagctactggggaggctgaggagggagaattgattgaacctgggaggcggaggttgcagtgagctcagatcacaccat

SEQ ID NO: 2301 - DNA, 741 bp, Macaca Fascicularis
  misc_feature (1)...(741): n = A,T,C or G
aagccagcaggccaaagggtggcccaaaggctgatgaacggtagggaagggtgagcaggttcctatgttggtgggcaccaatattccaagggcagctctctttgctgaatgagggccttctcgtgaggtactnnnnnnnnnnnnnnnnnnnnnnnnnggtaactcaaggaggaggaagaaaatcaaaaccaccctactccctggggtgagggaagaacaggaggggaggaggaggagtgtgctnnnnnnnnnnnnnnnnnnnnnnnngggtggcagcaggggaatnnnnnnnnnnnnnnnnctaggcctctagctataaatagtccggagggcccgagaggctcccgccccgtccagcaggggtctcggcttcctgtgtggaagcacctggcacactggctctggccaccactatgctaaaaccctcttactctccaacgaaccacggaggcgggctcctctctgcgcctagcccttgagaaagctgtcttaccactgaaggntggcgctgcccagatcaggcagcaggagtgaggggcacagtcaccccaggcctggctgagcccaggtctggacactgagtgtccagagctgcctccccaggagattaaggtgggggcaaaggggaagcttcaaacactttgcctacttttgttcactaccctagtccactgtgactcaggtcttcccatcaggcctatttgtctacccaataaagtgtgttttttccagaaaaaaaaa

SEQ ID NO: 2302 - DNA, 2990 bp, Macaca Fascicularis
  misc_feature (1)...(2990): n = A,T,C or G
attagacagaaatggcatctaccctcttttctgagcctcagttccataaaggtgtcttagaatcatcagtgtcaaaagatgttatctacaagatgtgaagagaagaacaggaaatctgtgaaaagtggagcagaacaggagcttaagaaaggcagtactgccgaagcaagacctaggggttcctgctggctcacggaccccttgtaaatcttgacccatggttttctgaacctcctgagatctggtcattagttcccgtgaacatattcctttctataagcattccattccaagaaactactggaatgagtctgctcctttcaccagaactctaagagttaaaataataaaaatcaacacataatatgagatgcactagctgtaaaattcacttccaaaggtgtgggaatgtcccaaattcgaaaaaagagagacagattttaacctccattggaatcttgactgaacatagaatattactgccaatggaattagcatagcttcagaatagacaagagtaagtcactcattcacccactgattcagcccttcattgctatgtgctgggaattgttgcaggtattgtggggttagaggaaagactgagacaagcaagagccctgcttctgaagcatttaccttctagtgggtgtgacagttaatgatcgatcatttgctcacttgtaaattattcaaaaaatatctgttaattattaaatgttggggactcaatagtaagcaaaagagtcaaaagttcagtcctcatggatctgcattttaatgggggaataaatagaaaataagttgtaaatagaaaataataactgccaaatcgacatataagacatccggtggtactaagtgatacaataaaaaatgaagaaaggggagtgggggtagggagtttgggggtaaggactagagagttggaatcagatgtgctatttggcatagggtggccagactaacctcactgaagaggtaacctgcacgcagaggggagaaaatgaggctgatactcagtgaaggaacacaaagagcagagtacaacacccagtaacaccatctatagctgatttctttgctttctctatcctgggtttcttactttgtgtattacaccttgtaagaccctcccacttcagatgcaggggcaactgatgacttcacgaagatagtggtggttactgtggatatttggtggatagtctgttatatgggatatgtccccaagataatttcctaggcccctcctgttacaaaattttgaaacaaaaacaattttttaaagcccgttgagttcctaatatgccaggctaatttttttatttttattttttgctnnnnnnnnnnnnnnnnnnnnnnnnnnnnnnnnnnnnnnnnnnnnnnnnnnnnnnnnnnnnnnnnnnnnnnnnnnnnnnnnnnnnnnnnnnnnnnnnnnnnnnnnnnnnnnnnnnnnnnnnnnngcctacgaatatctttctaacattgtaagaatgaggtaatgtttccatcaatctaatacagatatatttcttccctccaaaatcatttggtttgttttattgtaactccgtcttaagttgacatggaaaatgctatgtactatgaaaacttagctgaaagggaagaatcattttagaaagacatatttaaaacaccgcactgctaatatattgatcctttgtagttatttcctaaaatgctgttttcaaaacattcctttatcaccctgtgtggcttagacctatctcataatctgttaattggaaagaggctgcaaacaccagtagtgtgcattctgcaggtacacgctgccgaagaaatttcctgcttattcatgccccgtctctgtctcttttagagtcataacttatttaagtataggatgcttgattttgctagactttctgaaaacaccaaggtggagtatcagaagtgattttagtcacaattagttctgtgggagagcttagacagaataacatccccctttgggaggtggtcttgggtgcgtgaatgttggtatacggtctttattttaggtctgatacaaaacgctaataaatttaatgtttttcttccttaatttattggcatagttcttcaggtagcagctcatttttattaatgatattgggattaactatgaacaagctatgtgtagacatttgcatttaaggacattgcggtgtttcaaagatcccatcattgcagcttgtatcctttagatccaatcagaaacttctggtgtcttacattaatgctcatttgagctaatcagtaatctgtttaaacagatttggcaatactttaaaggtattgtagactatttatttatagatcatattacccttaaagttttaggggaaaaaagttgtcacatgtactgaaaacttttttttaaaaaggtgatgatgaagtgcattctgtagcagcagcgcagctgggctttaaaccacacagaaggctgtgtccaagggcagcctccttcacccttcctgcccccagtgaggactggataactaggacttggggatattctttgttgtcagggttattctatatagtaaagaatatttggttcacatttatacattttctttttccactcacataagtttctatcttgagggcatagtccaaagtgtaaaacttggtgtttacgagaattgtcttccagaactccactgtcatcgctttcaccaaagtggaagtctgcatgaatatgctcagaatctactattcaacattctgttacgttgtaagtgaagtccacctacaaaatagatttaatatattgaatttatttgtacatatgcagagtatggtattcgcgtatggaatctgctttattcctattttttccaactctgatgagtagaatattaaatgtgttgttatggaaatgcagagtattgcttctataggaagataattatgaaaataaaacctgaaactatgtaaatatgaaaaaaaaaaaaaaaaaa

SEQ ID NO: 2303 - DNA, 4338 bp, Macaca Fascicularis
aaaggaaagaaaagatgaaaacccctcttctggctccaggaaacaagcttcaacccattgcacacaccggagaaggggtttccccctgcccgcccgcccgccccccaactacctccccgctcctgccagtgtctgcctctctgcccccacgggggtttatttgatctcacattaaccaaggaggagaatgtgagaaaagggggaaaatgcccaggaggaagcaggagcagcccaagcgccttccctcacatgttagtaggcaggaagaggcggagggagagctcagtgaaggagaacactggtatggaaactcttcagagactccgtcagaagcatcctttggggaagtccaggagaactataagttgtctctggaggaccggatccaggagcagtccacgtcccccgacacctccttgggaagcaccactcccagcagccacacactggagctggtggcactggacggtgaggtcctgcgagactcactgcagtgtcaagatcacctttccccgggagtgtcttctttgtgtgacgatgacccaggctccaacaagcccctgagcagcaacttgaggcggctgctggaggctggttccctcaaactcgatgctgtagccacggccaatggcagagtggagtcccccgtgaacgttggctcgaacctctccttttccccaccttcccaccacgcccagcagctcagtgttctggccaggaagttggccgagaagcaggaacagaatgaccaatacactccaagtaaccgttttatatggaatcaaggtaagtggttgccaaactcaaccaccacctgcagcttgtctccggattcagccatcctaaaactgaaagctgcagccaatgccgttctgcaggacaaatctctcaccaggactgaggagaccatgcgatttgagtccttttcctccccttttagctcccagtctgccagttctaccttggctgctttgtccaagaaggtcagtgagagaagtttgactcccggtcaggagcaccctccaccggccagctccttcctttccctggctcctatgacttcctcagcggcccttctgaaggaggtggcagcaagggctgcgggcagtcttctggctgagaagtcatcgctgctgcctgaggaccctctaccgcccccgccttcagagaagaaaccagaaaaagtcagtccgccacctccaccaccacctccaccacctccaccaccaccaccacaatccctggaattattattactcccagttcctaagggaagagtttctaaaccctccaattcagcctcagaagaggaaagtggaaagcctttccagtgtccaatatgtggtttggttattaaaaggaagagttactggaagcggcacatggtgattcacacaggtttaaaaagtcatcagtgtccgctctgtccattccggtgtgctcgcaaggacaatctcaaatcccacatgaaggttcatcagcaccaggatcggggagagacctttcagtgccagctgtgcccttttacttcctcacgccacttcagcctgaaactccacatgcgttgccatcagcacttcctgaggacagaagccaaggtgaaggaggagatcccagacccagatgtcaagggatctccccacctcagtgacagtgcctgcctggggcagcaaagggaaggaggagggacagagctagtggggaccatgatgacgtctaacactccagagaggactagccagggaggggctggcgtctcgcctttgctggtgaaggaggaacccaaggaagataacggcctgcccacctcctttactttgaatactgccgacaggcccgccaaccacacaaagctgaaagacccctccgagtatgtggccaacagtgcgtcagcattgttcagccaggacatctctgttaagatggcgtctgattttctcatgaagctgtcagctgcaaatcagaaggagcccatgaatcttaattttaaagtgaaagaggagcctaaggaaggggagtccctaagcacgactttgcctcggtccagctatgtgttcagcccggaatctgaagtgtcaaccccaggcgtctctgaggacgcactaaagcctcaggaagggaagggaaatgtgctaaggcgggatgtgtcagtcaaagcagcctctgaacttctcatgaaactctcagcggaaagctacaaagaaactcagatggtgaagattaaagaggaaccaatggaggttgacatccaggactcccatgtctcaatatcacccagccggaatgttggctacagcactttaatcgggcgagagaaaactgaacccttacagaagatgccagagggcagagtacccccagagcgaaacctcttcagtcaggatatctctgtgaagatggcttccgagctcctctttcaactgtcagaaaaagtgagcaaagagcacaatcatacaaaagaaaacaccatccggaccaccaccagccctttcttttcagaagacacatttagacaatcaccattcacctccaattcaaaagaactgctgcccagtgaatctgtgctgcacggaagaatatcagctccagaaacagaaaagatagtcctagaggcagggaatggattaccatcctggaaattcaatgaccaactttttccctgtgacgtgtgtgggaaagtgtttggccgacagcagaccttgtcccgacacctgtcgctgcacacagaggaaagaaaatacaaatgccacttgtgcccctatgctgctaagtgccgtgcaaatctgaaccagcacttgactgtccattccgtgaagctggtgagtacagataccgaggacattgtcagcgccgtcacctctgaaggcagtgacggcaagaaacatccttattattacagttgtcacgtgtgtggatttgagacagagctcaatgtccagtttgtcagccacatgtcactccacgtggacaaggagcagtggatgttttcaatctgctgcactgcttgcgacttcgtcaccatggaggaagcagagataaagactcacattggcaccaagcacacaggggaagacaggaagacccccagcgaatcaaatagcccctcttcatcctccctctcagctctgagtgattcggccaacagcaaagatgattcagatggctcccagaaaaacaagggtgggaacaacctgctagtcgtctctgtcatgcctgggagccagccctcactgaacagtgaggaaaaaccagagaaagggttcgaatgcgttttttgcaactttgtctgcaagacgaagaacatgtttgagcgtcatctgcagatacacctcatcacccggatgtttgagtgtgatgtgtgccataagttcatgaagacccccgaacagctgctggagcataagaaatgccacactgtccccaccggtgggctcaactcaggacagtggtgagtttcagactcctctaggtgcccattctgcatttattccaccaaccgccccgctgccatggagtgccacctcaagacccactacaagatggagtacaagtgccggatctgccagacggtgaaggccagccagctggagctggagacgcacacccgggagcaccgcctgggcaaccactacaagtgcgaccagtgcggctacctgtccaagaccgccaacaagctcatcgagcacgtgcgcgtccacaccggggagcggcccttccactgtgaccagtgcagctacagctgcaagcgcaaggacaatctcaacctgcacaagaagctgaagcacgccccacgccagaccttcagctgcgaagagtgcctgttcaagaccacacaccctttcgtcttcagccgccacgtcaagaagcaccagagtggggactgccccgaggaggacaagaagggcctgtgtctagcccccaaggaaccggccggcccgggggccccgctcctggtggtcgggagctcccggaatctcctgtctcccctgtcggttatgtccgcttcccaggctctgcagaccgtggccctgacagcagcccaaggcagcagctcagagcccaacctggcactcaaggctttggccttcaacggctcccctttgcgctttgacaagtaccggaactcagattttgcccatctcattcccttgacaatgttataccccaagaaccacttggatctcacattccaccctccccgacctcagactgcgcctcccagcatcccctcacccaaacactccttcctcgcctatctcggactgagagaaagagcagagactgtctgagggcagccatgttctgtaccaaaaacaaagagaaaaaaaaaaaaaaaaa

SEQ ID NO: 2304 - DNA, 945 bp, Macaca Fascicularis
  misc_feature (1)...(945): n = A,T,C or G
agagtcccagnnnctcacccacaaggtccacctcagcagctgcaggcnctgaggaccagcccctcatgcccacggggtcagacccccagagtggtctgagaaggcactgggaggtactgatcggggtcttggtggtctccatcctgcttctctccctcgtcttctttctcctcctccaacactggcgtcagggcaaacacaggacatcagcccagaggaagactgatttccaacgtcctgcaggggctgcggagccagagcccaaggacaggggcctacagaggaggtccagcgcagctgctgacgtccaggaagaaaacctctatgctgccgtgaaggacacacagcctgaggacggggtggagctggacagtcaggctgctgcatctgaagacccccaggatgtgacctacgcccagctgcagagcttgaccctcagacgggagacaactgagcctcctccaacccaggaacgggaaccttcagctgagcccagcgtctacgccaccctggccatccactagcccggaggggacccagaccccacactcagcaggagactcggaccccagaaggcatggaagtctgcccccagtggacaccagtgaaccccagtcggcctggacccctaacacagaccacgaggagacgctgggaacttgtgggactcacctgactcaaagatgactaacatccctgnnnnncggtggctcacgcctgtaatcccagcactttgggaggccgaggcgggcggatcacaaggtcagnnnnnnnnnnnnnnnnnnnnnnnnnnnnnnnnnnnnnnnnnnnnnnnnnnnnnnnnnnnnnnnnnnnnnnnnnnnnnnnnnnnnnnnnnnnnnnnnnnnnnnnnnnnnnnnnnnnnnnnnnnnnnnnnnnnnnnnnnnnnnnnnnnnnnnnnnnnnnnnnnaattgnnnnnnnnngct

SEQ ID NO: 2305 - DNA, 971 bp, Macaca Fascicularis
  misc_feature (1)...(971): n = A,T,C or G
agctaaagtgcgggaagaaannnnnnnngtggtcggcaaaaaccgaagtgtctgcatgcaggacagaagccggatgccctacacggatgctgtggtgnnnnnnnnnnnnnnntatattgacctcacccccaccagtttgccccatgcagtgactcaagacattcggtttagagaatatcttattccaaagggcacaacaannnnnnnnnnnnnnnnnnnngtcctgtacgatgacaaggaattnnnnnnnnagagaagttgacctggccacttcctnnnnnnnnnnnnnnnnnnnnnnnnnnnnnnnnnnnnnnnnnnnnnnnnggaaaaagannnnnnnnnnnnnnnnnnnnnnnnnnnnnnnnnnnnnnnnnnnnnnnnnnnnnnnnnnnnnnnnattttaccttgaaacctctggttgatccaannnnnnnnnnnnnnnnnnnnnnncacaaaggctttggcactataccacccttctatgagctttgtttcatcccagtctgatgaagtgtctagctgctagattgcagagcaaggctgttcagtccnnnnnnnnnnnnnnnnnnnnnnnnnnnnnnnnnnnncaaccattatctcctcctatgttaataggaagaaggccatctctgagccctatctcttttgattgtatccttccttcaaaatccattccaattttccctgtatgaaagaaaatttattgtttcatttccaataaaattatgtttgtaacacaatnnnnnnnnnnnnnnntacattttatctgtagtcatatgaaatggaaagcaccctataaatgccatattttgctttgctaccacaaatgagaaatcagaaattattgcgtgagattttaaaaaaatgttgaaagtattaaaacatgagctttattaatctcacactcctatctacctgtctaggcaaatgatctcttgacagattagattgtatacttcttttcccccagg

SEQ ID NO: 2306 - DNA, 1679 bp, Macaca Fascicularis
tacagtgtatgctttctccgtgttttctttgatgaatactttcttaacatagacacttggattggcaccagctgtcaccaacaaagctgccctgaacattatcagtcaatcctgttaagcaattggagaatttttctggaacgctgagttagggatgagcttgctgggttgcaggtgtaagtatgctcgatatacttttctgcagaatgtctacacctgtgtgcaccgcagctgcagagacacgggaatcttatgttcctgctaactgctctcgttatttaactttctgacctttgccgcctcccccgtgccccaacacacacacacgcagtataaagtggtaatttcttgttttaaatcgaacttttgaatgatttgagtttgggcatttttttgtatcatgagttattttggtttccctatatgtgaaaatccttttcctaggctttggctacttttctaatttgtccctttttttggttatcaaattccaggccattgtctattccattgtcacttttgggtattggaaataccttcccattctgtagcctgtctatggaacataaatcttgatttttatgtaatcagatttttctcgttacggttatgttcttggaactttatttaagaaatccttttctatcctgagaccacaaaaatgtccccaccattttcttctgtttcatagttttgccttttatgtttaatcctttaaggcatctgtagttcattttatatggtgtgaaatagttcttattcatttattcaacacatattggtggagtgcctgctgaatgtctacacctgtgtgtaccacacagtaccactcttcagagtactttgtatatatctgtgaacacatattcctgccctgtgaagcttatgttgtccttcaaggtagatccctactggttttccacctgttttctttagcactcaggttgaattccacaattttacacatagcaccagttgaggaataggctttattggagaaagggaaggcttattaggccagcatcagcaagaaaaaagaaaaccagagggtcttcattttttcatcatccctaaaagaagcctgctggaacctgtgcagtctgccagataggcgtgtgaacggagcctgcgcagtctgctccatgtgcatgcgtccagcccattggagaaccttacccttttatcgtttgtcctttaaggacaagcctgagagcaacgttaattatgtgggaaaaattagatcattttgtatcaggcagtctagatttggatgctagctatttgtcaaaaaaccagctaccccagagttggagatattgagaactgaggagagttatagccctttcgaaagtggaaagggagacagtttgttaatgtgagtgtgacaggtgatgtccatgtcatggctgttctgactctgaaaggcacttctgccaacgtctaaaccgcactcactgggaacgtctgtggggtggggtggctgtgctgtcccttctgcaggtgagagacgtggtgtcgcctgttggacttgctgttgagcctggcttgcaaacctgtagtgaaacagctcatgtctgtgtgcacatgcccctgtgtgtctgctgtcattaacattgtgtgtccagttggtaaagtgacaaataaaggtgttttaaaacgtgaaaaaaaaaaaaaaaaaa

SEQ ID NO: 2307 - DNA, 964 bp, Macaca Fascicularis
  misc_feature (1)...(964): n = A,T,C or G
atggggtcctgnnntggacaaaggaaattaagaatnnnnnnnnnnncagacnnnnngttgaggtaaaagtgtgctttggcttaaaagagatacagtatattaattacgtcttttattattattgcttatttcttagaatcatttctgactttctcaaaacaaaataatattaatcaatgagtacttctatttgctgcatttttcttatagcctttgagacagctggtaattatcaagtcattttgcattttttaaaacaattttataaagcattctcttgactatgtagaataccacctactggatagaacaatttctgtactcacaaacactgccattttcttagannnnnnnnnnnnnnnnnnnnnnnnnnnnnnnnnnnnncttgcagtaaaaatgccaaacactgtagtactttggaaccggtttattcttgtgctaagcagaactgtaaaacagttaaaatgtcttatcaagtaattcgctgattatatagacaccacttttgtattttatttcattctttgttttaactcatgtggtagtgatatttaatactttctgatcaaacagtttcaaagtaaaactttaaatttcacatttcttttaaagaacttgtaaagcataacagtgatgtcatacttcttaagtggtaaagaaaggtataaaatttggaaacattttgttgggcatagtagtaattgggtgaaaaggataaattatatcaaaatgagaatgtgctgtaattggaagtaaggagctaaaggatgtttctttcagttaagtagtataactggaatgttttactattaaacgtggcttttataaatgcatggtccaataattttgttcactgttagtatttaattcactgtcagcttattgttttctgtaccctgataatgaattttaaattacaaaaaattatctagcagctacagttaaaaatgaaactagatataaa

SEQ ID NO: 2308 - DNA, 672 bp, Macaca Fascicularis
  misc_feature (1)...(672): n = A,T,C or G
aaaaggaatacagattatttntaatgactaaattggaatacttcttacactaaaaattatttcttaggcattctgaatctgggatgagaaacaggattgtttcacaatagtaagcacataatttttaaggccaaggcacatttgactcctgagatgaatttttttgtggtcataatcacatacttagttgtttttgatgccccaaaataaagtgagaatgttaattttccaggaattcttcataacagtatcttacaaaaaacatgttgctgtcttcacagtgttatgtgtaaaaagtcattgtttaaagcatgaatattccctctggggtacttgttaaagccaaatttattttgcttccctccacttagaagtgctgcacactttacagcaacttcctttctttccatggcactgacctagttaacagaagtcttataaaaatttaaaaagtacacgtttcctataaaaaagtgagagttaaatgaggtaaaatggcattagttggctctattttttaaagctatataattgttcagcgtcacttttctaagtacttatacatatctaaacatgtcttcacggtttatattttcacttgtatatgctgggctggattaagctttgttgtgattgtgaccaatattcaggccacgtgagcactgtcttatc

SEQ ID NO: 2309 - DNA, 707 bp, Macaca Fascicularis
  misc_feature (1)...(707): n = A,T,C or G
tnnnnnnnnnnnnnngtccctggaactgcccaccctnnnnntgccaccccgtcaggagatcctagtatggaggaacatctgtctgtcatgtatgagagactgagnnnnnnnnnnnnnnnnnnnntccttcagtcccacgactacagtctgtattccttggatgtggaattcatcaatgagatcctcaacatacgtaccaagggccggacatggtacattctttcactgaccctctgccgtttcctggcctggaattacttttcacagcttcgttnnnnnnnnnnnnnnnnnnnnnnnnnnnntgagaattggaccctgcaagcacggtggcggctcgtagggctgcctgtccacttgctctttttgcggttctacaagcgtgacaaagacgagctttaccggacctatgatgcctactccacttnnnnnnnnnnnnnnnnnnnnnnnnnnnnnnnnnnnnnnnnnnnnnnnntgatgccttcacactcacctccaacgcctgtgaagaagctgctagtgggagccctggtggcnnnnnnnnnnnnnnngccagaacctgacttaaacctgtgttccaagccctgatccttgacctttgagtgggggnnnnnnnnnnnnnnnntaagcccaagagaaggaggtggaggcagcnnnnnnnnnnnnnnnnnnnnnnnntcccttttctctcctgccttcctttccatctc

SEQ ID NO: 2310 - DNA, 1837 bp, Macaca Fascicularis
ctctggcagattatcagtgtttgcctcccaaatcccaggaccaggatgacatcagaaaccaggtttctcaagcaacctgcatcttttatgagagaagagagagtgagagaagaattgcctctggactgtcatcaatatgttgtacctaaaatccaggaccaagactctcctagagaacagaacaagcatttcaaaccaccctcatcttttgagaaatgggagattgcaagaggaaatactcctggagtgccatcggcttatgatggatatcgatcaggattgagcactgaattccaagctccactcgcatttcagtctggcgtagataaagaagaagataagaaagagcgtcaaaagcagtacctgagacatagacgacttttcatggatattgagagagaacaagtaaaagaacaacaaaggcaaaaagaacaaaagaagaaaattgaaaaaattaagaaaaagagagagcaagaacgttatgctgaagagcagaggatcctaagaatgaactttcatgaagatccatattcaggagagaaaatgagtgagatattagcccagttacaacttgaagaaataaaaggagccagagaaaaacaacaacagagagaaaaagaatacctgagatatgtagaagctttacgagcccaaatccaggagaaaatgcagctgtataatattactttacctccactatgttgttgtggtcctgatttttgggatgctcatcctgatacctgtgccaacaactgtattttctataaaaaccacaggggtaagtttgttgaaggaatagtcagggactaatggcaacaagaaaaatcaataagagtagcgggagtagtaatttaccatttattgagtgcttactatgtgtcagagactgttataaaccctttttaaaataactatatgaggcaatgaaaaaattataatgagttatatttctcttggagatctgttatcttcttgtctccatttatgctggggaaatattttcagctcattctactgtagaaggacttcagttccaggtcctttaactgaagactattagaatttgccttttatgtaagttaggactctatccagttgaattccctgttacccaaatactttaatggtatgtaacatggatgtattaccatgtatatccacattagattgctggttctgccaggagggactgaggaaaataagaaacagtataaactctatcaggagcgtcccaggtagagaaaacttagtccttcatattgtctttaatatttctatttcctatgcatccttaaagacattgatttatatagtgtaaagattatgtagccctcatgtatacactaggaatactgccagtatatatattcctagtgcttcatctgtatgatacgagtttcttaccagccatttccctattctaaaacctctagggctccccattgcagtataagatacatggcatatttggtgtattttctctctggctctgggccctactccagccttatcaaagttgctatacccagtatgtgccatattgttcactccttttgcacctgacacactcagttctctgtgttcttttctttactcttgttatttcttcaaaactcatcttaagtgttaccacttctgggagtcttccatcctgtcctaggtagttgtacattcattcccagcttcattctatgatgacattttttttttttttttgagacagtcttgctctgtcatccaggccactgcactccagcctggacaatagagtgagactccagctcaaaaaaaaaaaaaaaaaaagaaaaaaaaaaaaaaaaaaaaaaaaaaaaaaaaa

SEQ ID NO: 2311 - DNA, 737 bp, Macaca Fascicularis
  misc_feature (1)...(737): n = A,T,C or G
gctacaggcacccactctgcagttacttgatataagttaaatgaatccatccatccaaatgtcctttcactgaataagtannnnnnnnnnncttcctttgtatcaggcactattctaggagctggggctacagtgcagatggaaaccagcaaatctcgctgccctcatggagcttacatgtnnnnnnnnnnnnnnnncagagttctcctgtcataagttctggctcctctgccagctcttccaaataggttcagagaggttttctccttgtcctgttgtnnnnnnnnnnnnnnnatggtggccctcactttgctattcatatgcactaagtagtttatagtgtgctttgtgattggcaattgtgacagattctattcttctattggtatgtggtttctttggggcatttgtttggatactgatggcatcttctagggagtctgaggcacctacacaaacctcaggtcactatcacgtgatactggagttgcctgttaaattatatttcttcttccacaaaactgcagcaaggtctnnnnnnnnnnnnnnnnnnnnnnnnnnnnnnnnnnnnnnnnnnnnnnnnnnnnnnntggttcaacaaatatttgtaaaatgaatgaatcaaatagtccttcaaagcatcttcaaaagcattaataaatctggattgcacctgaagtttatctttctagtattcagaatataagcaaatccttgcttaaattattccattttac

SEQ ID NO: 2312 - DNA, 1615 bp, Macaca Fascicularis
  misc_feature (1)...(1615): n = A,T,C or G
tgtatggaatatttttatggagcttacacatttcttacgtttattcctaggttttattttttttgttactattgtgaagagtttatcatttctgtataatatttactaactttttttgtactaagaacaagctttttaatcttgttatgattatattttcatttgcctatttcaggaattttaggtatacattcatatcatcttcaagtaatgataattttgtcttactcatttgaatgaaattgacagaacagtatccactaatccagctaatataactgaacaaatattctgaagagactgccttctcacaaagaatttacaatccagtggaagagacaaataataaacagttaaaaaaatgcagtgtaatcatagcaataatagagttatggacgagggctggtaataaaaaaatagaacacctagatctgtctagtggacttagtaaaggctttgtagaggaactgttgctttaaacttaaagattgctttgaatcttaaagtgaaaccaaaagtttgccaggtaaacagtgttgagggacatttagtaaatgacatatgtaaagataagacatgaaagagtgtaacacaaacaatttgcctatataaagtatgataaagtaggtaggaacatgacttaaggctcagagactgtgtcatgaagagttgtatcatagcaagagcttgattcaatcctaacggtgatggggagctgctaaatctacaggtgatgacatggtagaattctgttttatagagatctcttctcaaatcagtaaggcagatataatgtgttggtagtctgaagactggagccaaagattgtaaggcagctacatgattgtgagggttaaaaggtaagtgctaaagataaatccaggatttggatgattgattaacaataagaagaagggagaaatacaggatgattcctgctttgagactgtagggtaatggatgatggtgcctttcaggagataattaaaggtggggaaaggcattagagcagatgatgatgaccatgttaattgtgagccctttgtgcggcatttaactggagatgtctggagggtgtatatacaaaacaagtaaggatgtaaatgtgggtaacaataacaaaaatcagttgacaaaggaaaagaaataaatgagggaaatttatcagaaaaggccaaagaagtagggaatgaaataaaagaatgtaatagcgtagaaaccaaaaacagataatgtcaagaaattggggtggtcaacagtgttaggtgctgctgaataacataagaactgaaaaatgcccgttttaggccgggcatggtggctcactcctgtaatccgagcactttgggaagccgaggtgggtggatcacctgaggtcagagttcaagaccagcttggccaacatgatgaaacgccatctctactaaaaatgcaaaaaaannnnnnnnnnnnnnnnnnnnnnnnnnnnnnnnnnnnnnnnnnnnnnnnnnnnnnnnnnnnnnnnnnnnnnnnnnnnnnnnnnnnnnnnnnnnnnnnnnnnnnnnnnnnnnnnnnnnnnnnnnnnnnnnnnnnnnnagagcaaaactctgtcaaaaaaaaaaaaaaaaaaaaaaaa

SEQ ID NO: 2313 - DNA, 407 bp, Macaca Fascicularis
  misc_feature (1)...(407): n = A,T,C or G
aatgtgaggaggtggagggacagcccacccccgtgtccaccgtgacccctgttcccacgctgacctgtgtttcctccccagtcatctttcctgttccacagaggtggggctggatgtctccatctcagtctcaactttatgtgcactgagctgcaacttcttacttccctacagaaaataagaatctgccgggcgcggtggctcacgcctgtaatcccagcactttgggaggccgaggcgggcggatcacgaagtcagnnnnnnnnnnnnnnnnnnnnnnnnnnnnnnnnnnnnnnnnnnnnnnnnnnnnnnnnnnnnnnnnnnnnnnnnnnnnnnnnnnnnnnnnnnnnnnnnnnnnnnnnnnnnnnnnnnnnnnnnnnnnnnnnnnnnnnnnnnnnnnnnnnnnn

SEQ ID NO: 2314 - DNA, 972 bp, Macaca Fascicularis
  misc_feature (1)...(972): n = A,T,C or G
cagcagggagcagcttctgtatctgtatgccaggtacaaacaggtcnnngttggaaattgcaatactcctaaaccaagcttctttgattttgaaggaaagcaaaaatgggaagcatggaaagcacttggtgattcaagccccagccaagcaatgcgggaatatattgcagtagttaaaaaactagatccaggttggaatcctcagataccagagaagaaaggaaaagaagcaaatactggttttggtgggccagttattagttctctatatcatgaagaaaccatcagggaagaagacaaaaatatatttgattactgcagggaaaacaacattgaccatataaccaaagccatcaaatcgaaaaatgtggatgtgaatgtaaaagatgaagagggtagggctctacttcactgggcctgtgatcgaggacataaggagctagtcacagtcttgctgcaacatagagctgacattaactgtcaggacaatgaaggccaaacagctatacattatgcctatgcctgtgagtttgtggatattgtagaggtggtgctccagtctggtgctgaccccactctccgagaccaggatggctgcctgccggaggaggtgacaggctgcaaaacagtttctttggtgctgcagcggcacacaactggcaaggcttaatcaaaagactggaaaaccacagtctgtaatagcataaggcttccattatgaaagaaaactacaaaaataatacttctttttctgcccatctttgttatgctcattctgtggcccacagttctnnnnnnnnnnnnnnnnntacaaggaattgaagannnnnnnnnnnnnnnnnnnnnnnnnnnnnnnnnnnnnnnnnnnnnntccagggctactcagctcagcctcagnnnnnnnnnnnnnnnnccacctcttgctatcagagtcaattatatagatgggacttaaaaaccaaaacaaactca

SEQ ID NO: 2315 - DNA, 691 bp, Macaca Fascicularis
  misc_feature (1)...(691): n = A,T,C or G
tgcccccgaccaaaaagccccccctgactgccccccgcggcggcttgaccttgaacgagcccttgcgcccgctgtaccccgctgctgcggactctcccggtggggaggacgggccgggccatttggcctctttctcccctttctttccagactgcgccctgcccccgccgccgccgccccatcaggtgtcctatgattacagcgcgggctacnnnnnnnnnnnnnnnnnnnnnnnnnnnnnnnnnnnnnnnnnnnnnnnnnnnnnnnnnngggaggagggggcgcaccgnnnnnnnnnnnnnnnnnnnnttccctccgttagagacggatgtggagagcgccgcgcctccatgggtttctccnnnnnnnnnnnnnnnnnnnnnnnnnnnnnnnnagatgaaaccggatttttaaaaattcagttaataaaannnnnnnnnnnaaaaagagatgaagaggagttggggattgtttaatcannnnnnnnnnnnnnnnnnnnnnnnnnnnnnnnnnnnnnggttcttactggaccagaggagccaagaaaccaagacggtatggggtggggacggcagaaggggcaagagctggcttctgtagnnnnnnnnnnnnnnnnnnnnnnnnnnnnnnncagtgtgtttagtgtaattgccccttctaaacagtgtcctagtccctcccttccctctcc

SEQ ID NO: 2316 - DNA, 1805 bp, Macaca Fascicularis
aggaaggtacagagaacaaagaatgggttcagacctacagtataaacattttcatgagctgaaggcaccaaactaaaagtgtccctaccaactgccaagcaggaatacatttgatgtttaagtccaaagatagaggatcctacatacttccaaagggaaaaaagccatgcgcctataaagtagtgagaatcagacttgtccttcataacactatgtgagtgtagatgttactttattgatctcacagctgtgcgggaaaaggattttcaacatggatagtcgtttgcacacatatagtagtcttaagtttgaaggtagaatagcaactctcagaccaaaaaccaggttagacccctaatacaaacttttagggaaaaaaaatagtgttatttaataagacttaaaatgaatctttacagtagatgacatggagtaagttattccaaataatttcccctcttgccccatttaaatttcaattggtaaagaaataagcaactttggagtctgtggacaaatagactgggttctaaatactgggttcaaatgaaccattctccatttcacttttatttaccttcccttaaggcttcacaacatcatctcaagagtactcttctacagcaaaactgaaggaaatttcacctactttatctgaatccattttttagggagaaatatcaagagtggtacaaaactgcaggtcattaggctggccaccaggtattcccacccaccagaagctagctgttgtactcacccggaaccatggtgcaccaccacagcggcgaggtcatacaggcagctctccgggccactgttctcaggctacagaacaaggaagaaggagcagtggtcaatgacatcagtatgtcaatgacctctaacctctccgtgtgatgacaatcttactgaagagccattttttcaccatgctaaaaaggtaaccaccttacctctagtaagtagcatttcatgtctaggcctctcaatggaaattctacatatgtatcaactttatttcttaaatatgctgtccagtgaaatcttttcaaatgtaagcatagcacctggaggacagagatgaggtcaaagattgtgaacacctaagttacttttcaaagtttgatactactatcagttcagtaaataacattttagctgccctctcaatcattcttccatgcataccttatgcattcattctgtaaagggtttagcttttactgaaaatcctacagacatacagaacagttcacatagtgtaaagttatagacatagtcttagcagtcaagcatttttcccttgaaattgcttcgtaactcaaaattcaacactcaccttgggtagtttttgaatccaaaacttttttgtggacttttgtttctttttgcatttatggcacatatataactctgtctcatcaagttcttctaagtcagtaaaactgcgaagacaatctaaacaaattgattttggcagcattaaaacaagataccttttatagagccaatgtactgtagaaaaaagactgaactttgaagctgaatgacgcaggtttaaaatctcagctttattagctatacgaccttagaaaagttaacctttctcagttgcaaactggagacaaaaaataatacctactttgaagaactattgtaagggagacaaataacatgtgtaaagcacctggcatcatgcctgacatctggtgatcaattgtgttggttttactattaatgaaaattcatctggataattctgataaaatggtttcctgatgaaaaaaaaaaaaaaaaaaaaa

SEQ ID NO: 2317 - DNA, 736 bp, Macaca Fascicularis
agtcaagatgttcttttcacattttttaaagggctagtatgttctacagtaggcaagtagtcattcaagccaagtgaaagagttaactggtccctgaggattgttagcagaatttgaattttgaccctggccatttgtactacagaagtgatggtgggattaaaagaatacataattacagtgtttcgggattgggctcttttttgtcttaatagaaaagcagaaacttcataaatattagccgtgctttagataccagataacaaatattgtttcccctgaagatatgacctactagaactactcacatatatatagtccagtcattactaacttaatagttatggtgaaacagctgataataagtcagcagactctcaagagtttctgtaccttgattattgacaaattcattgttttacatcctaccgaagtacatgtgtgtggggaaggggtggggaactggttcacaatataatctaaaggagatcaaacatctgtagggacaggtacccagtgataataatatatctgaaaacacaagccatttttattctttatcccaattaacttgaggtactctaatgatgaagcactcgattgcactatgacctccttgagtgatgtgcagcttggttcctctctcactttttgtttctttttaatgtgcaaatgtgagtgtgcgatcttcagtgtgtctgcataagctaacttaaaatgaatttaagtacagttt

SEQ ID NO: 2318 - DNA, 748 bp, Macaca Fascicularis
atgctgcttcttcctctccccctgctgctcttttttttgtgctccagagctgaagctggggagatcatcgggggcacagaatgcaagccacactcccgcccctacatggcctacctggaaattgtcacctccaacggtccctcaaaatcttgtggtggtttcctgataagacggaactttgtgctgacagccgttcattgtgcaggaaggtctataacagtcacccttggagcccataacataacagagaaagaagacacatggcagaagcttgaggttataaagcaattccgtcatccaaaatataacacttctactcttcaccacgatatcatgttactaaagttgaaggagaaagccagcctgaccctggctgtggggacactccccttcccatcacaattcaactttgtcccacctgggagaatgtgccgggtggctggctggggaagaacaggtgtgttgaagccgggctcagacactctgcaagaggtgaagctgagactcatggatccccaggcctgcagccacttcagatactttgaccacaatcttcagctgtgtgtgggcaatcccaggaagacaaaatctgcatttaagggagactctgggggccctcttctgtgtgctggggtggcccagggcattgtatcctatggacggttggatgcaaagccccctgctgtcttcacccgaatctcccattaccggccctggatcaacaagatcctgcaggcaaattaaccct

SEQ ID NO: 2319 - DNA, 764 bp, Macaca Fascicularis
attctgtttcttcctttattacttcttattataagtatttcccccatttaataaatagactcttcataatcctttttaatggctaataatcgttcatgtggctgcattatttacttaactaattccctattattgtacacagaaagaattgtcttccagaaaattcattcctgtgctttgcctctcaaattagccttggtgtatgtggctaagtctcaggagtttctggataccaaaggataagtatcttcttagactcaaaaattgttcacaaaattggaagcagagattcatctaaaatagacccaattctgatatattatgacatataattagaaatgtgtatgaatttttatgataaaccaggaaaataattttaaacattcaatgtggttgaaaactattttgtgtatatatttgtgaattatagatgcaacctgtatgaatagaactgtgtatagggtcttttgtgatacttaattttacatcttttgtaggtgtacaaaagaaagcagagtctgtatgattacataagaaaacaaaaccttgccttgctttcactgaaggatttctagaactgtgtatctgtactcctgctctattttaagtatgtctatcctttgattgtattttagataataaaacaagaaactctttcttgttcagtaaaaaaaaaaaaaaaaaaaaaaaaaaaaaaaaaaaaaaaaaaaaaaaaaaaaaaaaaaaaaaaaaaaaaaaaaaaaaaaaaaaaaaaaaaaaaaaaa

SEQ ID NO: 2320 - DNA, 145 bp, Macaca Fascicularis
ggggagcacgaggacacagaggtgtgcgcgagaaaaaagcggaggcgcaaaattatatttttggggcacattttctgcactataagagggggagggggtctgagtatatattaatatatgagaaatttttccacatcacatagag

SEQ ID NO: 2321 - DNA, 794 bp, Macaca Fascicularis
  misc_feature (1)...(794): n = A,T,C or G
tcatgatgcacatgtgatgtgcnggcactaccgaactgtacannnaaaaagagttataatggtacatttatgtttatgtgcannnnnncacaatttaattttttttaatggcatnggattggctaaaaaggtggcagtaggcccnnnncaggcagatnnnnnctgctctnnnnnnnnnnnnncagggaagnnnnnnnnnnnnnnnntgtgaaggcggtggagagggtgatcaggagcttgagctttggggcccacagggtgcttaggagggccctaaggcagagtcaacccccagagctgtgagtgccaggccctatgcgccactgcccagtgagtattggctagtgtttggaaggacttgagaaagaacagcagtgtgcgtcttgtggaaagtcttatttttcctgcatagccccagccccctgaggctctgtgagaccactgggccttctgagggacatggtcaggacattttggatatgagaggcgagctgaaaaaagaacatttaannnnnnnnnnnnnnnnggcgtagtgaaccacnnnnnnnnnnnnnnnnnnnnnnnnnnnnnnnnnnnnnnnnnnnnnnnnnnnnnnnnnnnnnnnnnnnnnnnnnnnnnnnnnnnnnnnnnnnnnnnnnnnnnnnnnnnnnnnnnnnnnnnnnnnnnnnnnnnnnnnnnnnnnnnnnnnnnnnnnnnnnnnnnnnnnnnnnnnngaatcacttgaaccaggaggtggaggttgcagtgagccaagatcacaccacagcactttagcctgggtgacagagcaaaac

SEQ ID NO: 2322 - DNA, 752 bp, Macaca Fascicularis
  misc_feature (1)...(752): n = A,T,C or G
agcagagaaaacacatgcaaatacctnnnngaagttcaagttgactnnnnnnnnnnnnnnnnnnncctgcccctcccagtggatgataaaactcctgggagtaagggtctattttcacttgtttcgaaattcatagcacctggtacaatgcctggcatgtagcagacactcagcatcgctatgacggatacatgaatgaatgaatcaatctctaggaggaatcaatgaattaatggcatgacttgcagggaaacatctgcaacaaacatggctctgggctggccttgataaatgaagacgccgagagaaattttaccccaaaatatggcaccctggtacgatgaatatttcaaatgcaaggccattggagnnnnnnnnnnnnnnnnnnnnnnnnnnnnnnnnnnnnnnnnnnnnnnnnnnnnnnnnnnnnnnnnnnnnnnnnnnnnnnnnatccctgaaatctcattgtctatcccagaaacaaagannnnnnnnnnnnnnnncaacttgttagacctttttataagataatatctgtctctcaggtttgctcagattccaaagagaataatttacaattgaatttcagtctcctgggtccattcattctccctaataatcatttactgctcctcaaaagaattatcaacatttcccatctcccctctttgctatggagaaagttatataagcatctggatcacatggagatactgagtaatattctctggcaattccctcatgctatgtac

SEQ ID NO: 2323 - DNA, 701 bp, Macaca Fascicularis
  misc_feature (1)...(701): n = A,T,C or G
cagatgaagctgaggagccgtgcctaggatcccttcccagctctgaggatgggctggggagctctgcaggtgtggattcaccttatggcnnnnnnnnnggnncagccctacccaccctgcccgatgcccattagcacaacacggactgagacaggatgcccacggggactgctgctnnnnnnnnnnnnnnnnnnnnnnnnnnnnntccccttcgccacccccgcccaacccaacggcagacacagagaccaggtccccttgcagatggctttcccatcttcctgcaagtcatctgcacacacacagttggcaacacatagcgtttccttctttcagaaacattcctcttctggggcttcagaaagctggcaaggccactagcagagcttttgttaatgccccagcagcttggcgagctcacagnnnnnnnnnnnnnnnnnnnnnnnnnnnnnnnnnnnnnnnnnnnttctccaaactgccgctccaccagtgcctnnnnnnnnnnnnnnnnnnnnnnnnnnnnnnnnnnnnnctgattctcatcgaggccccttgctcctatgactgtgcttgcagaacaagtaaacagtctcggatgccgctgtcccgggggagcccgcggaagcnnnnnnnnnnnnnnnnnnnnnnnnnnnncctgggcccagctcacttgtccagctacctgccaggtggctttcact

SEQ ID NO: 2324 - DNA, 750 bp, Macaca Fascicularis
  misc_feature (1)...(750): n = A,T,C or G
tatgagtatnnnncccgggggnnnctgacagcctgnncaggccccccggtgcgggtatagccatatctgcctgtctagactctgcagtcaccagctctgccagctcggggaggcctgctaggctgccacttagccccctggctttggctgtccctctccccagcctggagagggctggcctggtcactagaagggaggattgtctcaggcgagtcttggcctgagaggaaagccccctcccaagctcccaagaggctcctgaggaactcggggtgtgaaccccattggggtgtgctcagggttgtgagtgtgttgcccgtgtgtctgtgtgtatgtgtgcaggggtgggcgggcttggaggggacgctgggacccttgccttagatttctgactggtagggtttctccaggctcaaccccacctcctcaccccccgccggggtcccatgggccacctcctgcatgtctccgcggaggggctaccttccttcccatcgccctgcctcccagccagactcatctaagggttcttgtccttgtctatggggcaaactgtagcacccctcaccgtggtcccctggcctctgcaaagccaccagcctgagggcagtggcaggagatgggggtggggggtgctgctctgggctgggttgggaagggagttggggaggggctgaaatgcacggtgcatgtctggtgtctgtcatgccaacctggacacctcatgcttctgtctcccccaccccactc

SEQ ID NO: 2325 - DNA, 562 bp, Macaca Fascicularis
  misc_feature (1)...(562): n = A,T,C or G
cacccnnnntccccactatatnnnnnnnnnnnnnnnnnnnnnnnnnnnnnnnnnnnnnnnnnnnnnnnnnnnnnnnnnnnnnnnnnnnnnnnnnnnnnnccacctggagcccctagcgtttccttggcccctcttcccnnnnnnnnnnnnnnnnnnnatgagagggacctcctgcccagccacccaccnnnnnnnnnnnnnnnnnnnnnnnnnnnnnnnnnnnnnngaggctggccgggcttctgtccagtctccnnnnnnnnnnnnnnncttttctcacatcccctagttggtgcctgatcttctctgcccacggggtcagacccacggtgctgttttctgtcagtctccggcacagcaccnnnnnnnnnnnnnnnnnnnnnnnnacagggctaggaggacggcctggtcagcagnnnnnnnnnnncccagtgccgtgtttcgggggttgagggatgtaagtggagtcattgcacagagacannnnnnnnnggagaaggagnnnnnnnnnnnnnnnttggccnnnnntcaggagccccctcccatcctctccccactctcc

SEQ ID NO: 2326 - DNA, 684 bp, Macaca Fascicularis
  misc_feature (1)...(684): n = A,T,C or G
ggccgcttcccctctgctttctttcctggagctcagggtgtggagactgagcctgtaggggccaggatgcactcctgccgtggccactcccaagtgtgccctcttccctctctccagatcaggtgtctctgnnnnnnnnnnnnnnnnnnagctccatgctgagacaccaggctatgtggacccccaccttgnnnnnnnnnnnnnnnnnnnnnnnnnnnnggnnnnnnnnnnnnnnncctaaaatggcnnnnnnnnnnnnnnnnnnnnnnnnnnnnnnnnnnnnnnnnnnncaggcagagggcagtggttctcccaaataggagacctggggcctggccaggccagggtttggacctaatggctttgactgaattacccccatcctcctcctttccggaaaagggagagctagagccactcactgtcatnnnnnnnnnnnnnnnnnnggggcggtgttggcctgccttctggaatggannnnnnnnnnnnnnnnnnngactgggggcaggaggaggtggggaggggcactgcctgcggaaggtaggattagatcattagctcagtgacctcctagggtttcgatgtgctgtgttctcatcctacagctggtttggtaatgatctgcaagtcccggagagcaacagcacagctctgcctgacactctcattaaaatctatgcagcc

SEQ ID NO: 2327 - DNA, 724 bp, Macaca Fascicularis
  misc_feature (1)...(724): n = A,T,C or G
aggagtgcacttcccacnnnactaggaagccctatggcatcctcaggctcccangacccgcagcctnnnnnnngtccctccntnnntccacacccaccctccgtatgatcccctgctccgcccttgtgcttggctgccccctgcccgctactctcaagacacccaggggtggtgggccctcactggccggcccctcccagcactgtcctctgccatnnnnnnnnnnnnnnnnagccagnnnnnnnnnnnnnnnncatacttctagtcacccctcctcctgcgaagtgatctgcaatggctgtttgaccagagcaccaagttcacacctcctgagcttgatgtctgtggctgtccacctcccagccatacttggctgtccccaaatgctccctgtggccacacgtttcccatgacctgtgggctccgcagacggacctctctccgctagagatgcccttctcccaaatgacttccctcctggaaggcccagcctgagtctcnnnnnnnnnnnnnnnnnnnnnnnngaagcagccccatgatgttctgtgactgcacagcactttgtgtcttgctctgggcacttgccgctctggctggtgctgccgccgctgattgtgtactgtgtcttgctgccctttctagactgtgagctcctcgcgggcagggaccgcctgtgttctctgtatttcccacggcgcctagcacagtgccttgcacttgatag

SEQ ID NO: 2328 - DNA, 707 bp, Macaca Fascicularis
  misc_feature (1)...(707): n = A,T,C or G
gaccaaacaagtcgcctttcgagggcctccaccgatttatggatgagaggaggtggaggtggaaggcaggcccgagtccattcttggacacccaaactcagcccccttaaagagtggaaacaaaacaagctgcactttgcagaggtggtaaatgaaaggactcttggcctaactgcannnnnnnnnnnnnnnnnnnnnggacaaagtttgagtctggatgggatctgcgctgaggtaccttaagcttccccnnnnnnnnnncccagcctcaggcattgcgggagttgtcagagatctgatggatccgaagggggcagggccaggggattaggtttgggnnnnnnnnnnnnnnnnnnnnnnggaggggtgagataggcctggatcacgccctctgccataccctccagctaggaggatcttgagtcagagagggttggaagcgttttctcctccacccaggtgaggtcaggggaggttaggtcttaggcagatggcaagttgaggtgtgaagggaagctggggcttttaaatctgccgaacaactgagggacccagtgccccttctgccccgcactagtgaatagcgccccctcttccccccgaaaacgaggtgagagaggaacagttcccacgctggggaaggacttgtctccttttctgtgaaaatgctttgtaaaaagttgttactgtttgcatagagcagattc

SEQ ID NO: 2329 - DNA, 760 bp, Macaca Fascicularis
  misc_feature (1)...(760): n = A,T,C or G
aagnnnnnnnnnnnnnnnnnnnnnnnnnnnngctgctggtggtcggaggcgttggggtcctgtcnnncttttttttctccggtcgcatccagggactgggtagagactttaagagcccccatctcaactattactggctgcccatcatgacctccatcatgggggcctacgtcatcgccagcggcttcttcagcgttttcggcatgtgtgtggatacgctcttcctctgcttccttgaagacctggagcggaacgacggctccctggaccggccctactacatgtccaagagccttctaaagattctgggcaagaagaacgaggctcccccggacaacaagaagaggaagaagtgagagttccggcccagatccaagactgcaccccacccccaccgtccagcagnnnnnnnnnnnnnnnnnttacaggtctccattttgtagtannnnnnnnnnnnnnnnnnnnnnnnnnnnnnnnnnnnnnnnnnnnnnnnnnnnnnnnnnnnnnnnnnnncggatcacctgagtcagnnnnnnnnnnnnnnnnnnnnnnnnnnnnnnnnnnnnnnnnnnnnnnnnnnnnnnnnnnnnnnnnnnnnnnnnnnnnnnnnnnnnnnnnnnnnnnnnnnnnnnnnnnnnnnnnnnnnnnnnnnnnnnnnnnnnnnnnnnnnnnnnnnnnnnnnnnnnnnnnnnnnnnnnnnnnnnnnnnnnnnnnnnnnnnnnnaccccgtctccaaaacaaaacaaacaaacaaaaaatt

SEQ ID NO: 2330 - DNA, 2430 bp, Macaca Fascicularis
  misc_feature (1)...(2430): n = A,T,C or G
tgctaaactcttagtgcttagatgataatagggggtgtgggaattcatgtgttatttgttcacatacgtctgaaagctcaaaagaacaggctcgtatatatttacaaaaaaaacctttatcttgaccctttttatttttattattttcccctccacttgtgccaaatggttaaaataacattaggagaaagggcagacgtagagaattatataaagagtttgcaaataaataatgattattatcaggatatgagccatggcaaaagaacaggtgaattttctggtgttaaggtatttgaacagttttatagttttgcaacacttaattttgagtgtgctcttgcttgttagacattaacacatgtccatattctataccaagtaaccttttacgaaatgttaatagctaagaggatttacagactcaaactgtattttcttcaaagatacacacaacatccagcaggtaaattgtcactctttggagaaataatgttattacctactgatagaaactcaagcttaagaaattcaccttaggaaacttttaatttggaaaaaacatcccttagctccttaatgttcttatgttcttagtttattaattgttttccctaggaatttttttttgtagaaagcagtctacaatttttctttcattattatatgggatatcatatttatatcagagaaagacatccaagggctaacacttaaagccacaaagtctgtctagatttgttgaatgttatcacctgaaacgaacaaacaaacaaacaaacaaaaaaacaataaacaacaatttgttttggtaaggggaatctgtttagattggagaaaactagatagatcaggtaattatcatctaggttctagatttcccttggggttggtttgaaaacatttttggaaaaacattaagataagagagcaatgacactaaagcttgcatatagttttatattctttctggtaaacactttcccttgacaggaaaggatcatggattgtggagatcaccttaccttgatatcaggaatggccctggggtctccttcattttctgtgatttggtgaatgtctgcattatatctctgagccctaaacaggggcagaaactgtgtccatatagatggcctgaagaaatgtttctggaggcactcttggttatcttgggaaagctggggcatgttttcacaataaaggccccaaatgagtcctgttgcctggttttcccaatattagcacaggatccactctgtttgtctttgtttggttaatgctgggctggctctgagtctgtggggagcctcctcggaaagttacactaatgaaagcaaaaggattatctgctttgtggatcagtagcttatccacagatctttcatgttctattcctggtagagctgcttattttggatgtctaggtgctgtatgttatgagtgccctctaaaggtagaaatgtattcttaattaaaatgtaatcctaaatcaaaacggaaagaaacgatccaagtgatatatagcttagcatatagtgataaattaaatagactggcaaaaattcttgtgttagttgtgtttgatagccaatagtacttgacaatcttgggctgtgcaattggcaggcagatggttggcctaatctttccaggtttcttaaaaggtaattttaataacagtcatatttgtaggtagtaacatatgcaaaactcatacccaaacttaaactcaatgattattacactttttacatacatcatgtggagtatgttaaattgattttcttatgagatgactaggtacccaatgagtaagccaagaattggcttctaacaccatacttcatatttataaactgctttataaatataagattattaagcagactggaaaaggtagaatacctttctatcaagaggcaactaatgcccaagtagcttctgttgggtttgagggtgcacaaaggtaagggatgtgtattactggggtcgatgaactggaaaagtttccttttgtaaaattgctttatagattcaacacaatgcctatcatacgtcggctcctttcttttgcagtggttgacagttgattctaaaattcatataaaattataaggggccaggcatgatggcttacannnnnnnnnnnnnnnnnnnnnnnnnnnnnnnnnnnnnnnnnnnnnnnnnnnnnnnnnnnnnnnnnnnnnnnnnnnnnnnnnnnnnnnnnnnnnnnnnnnnnnnnnnnnnnnnnnnnnnnnnnnnnnnnnnnnnnnnnnnnnnnncagctactcaggaggctgaggcagtagaatcgctggaatccaggaggcagaggttgcagtaagctgagatcgtgtcactgcactacaacctgggtgacagagtgagactctgtctcaaaaaaaaaaaaaaaaaaaaaaaaaaaaa

SEQ ID NO: 2331 - DNA, 689 bp, Macaca Fascicularis
  misc_feature (1)...(689): n = A,T,C or G
gtttcttttcnnncnacccttgtcggttgaggtattgtttcttgactaataaaccctttgatgcttntnnnnnnnnnnnnnnntcataaagctatttttgagtatagtttgtgtaaaataaaaatgtttagctttggtaataacttttccaagctgaactccctctagcaagatatttttcagtgcttttatttactatgcacttagactannnnnnnnttctgaaatatttttgtaacacttttttgtatttttgccatttgaaaaggttgtggtgtagttggtctgtgattaagttgcagatttaaaactgctattagctttgtaaatcaaaatataggtgttttttgtctggtatatcgtcattcnnnnnnnnnnnnnnnnnnnnnnnnnnnnnnnnnnnnnnnnnnnnntcattttcttcactgttcacaaaagaagaatgtgaaattcagtgaatgctgttactaatcctgtcgcgagatgaatctcatttcaccaaaattaaatnnnnnnnnnnnnnnnnnnnnnnnnnnnnnnnnnnnnnnnnnnnnctctgaaatgggaagacctcaccacttaaggctccacagtgnnnnnnnnnnnnnnnctctaggctactactctttactttnnnnnnnnnattggggggtgcagtttttttaaaatgttgggagatggccattcta

SEQ ID NO: 2332 - DNA, 755 bp, Macaca Fascicularis
  misc_feature (1)...(755): n = A,T,C or G
catctgtccagttaatatttcccncttaaaaatctccaagacgctgtgtctcatccagatcccatttagaacaaccagggngctnnnnnnncatgtagataatggccaccatcctaagcccaaagtagaaagtggtagaaggtagtgggtagaagtcactatataagggaggggatgggattttccgttctaagttttggagaggnnnnnnnnnnnnnnnnnagtcactaatttccaagtatgtccatttaccatctcagcttcaagggaggtgtcagcagtattatctccactttcaatctccctccaagctctactctttggaggggtctgacccactctgtcaagtggaatccttccctttccaactctacctccctcattcgaactcctttcccctgatcagagaaaggcatcaagggggcgggggcgggggcagggccggggggaaagagaccagccttggtccctaagcctccagaaacgtcctctgaatccccatcttttcttatcccccaaaaagaacaagcatccctgactgnnnnnnnnnnnnnnnnnnnnnnagtgtttgagtcaatccccagaggagaggggaaccctccatcttnnnnnnnnnnnnnnnnnttcttcattttgctgttgcttccccccacacacacttagttttgttctttcctacatttgagatttctattttgtgttgaacttgctgctttttttcatatgaaaagatgacatcgccccaagagccaaaa

SEQ ID NO: 2333 - DNA, 816 bp, Macaca Fascicularis
cacagtgatagtatagctgtcatgtacaagcccaacagatcatcaaggcaaagttagtcaagcactgaagtgattaacctgtgtgcgaagatgagaagtagaaaatggagatgcactatttaccaacaacccctgactagtgaaatagctaataaatattttctaggatattatgataaagaatgtcaatgcttactgactgcattaacagagtatacactcctttggtttaaaaggggggaggggggctcgtctgatggtatatgtgcttaagttgtttagtacaacagctgaaaaatcaccaggtttacagctaagagttttaggattctatcattttaaaaattagcattaggaaaatccagttttcctttacataatcactatttcatttttaacagtttgtaaacatttgacttacagttaacacagaatatctatctggaataaaaactatttttcccaattatcaaccacatgggagacttaaaaataaatttgtaagtggaatatccaaagctagtgttacactgaaagaaagtggctgcagcctgagtgaggtagatcatgactgtaatcaatcccataactgtgggaggctgaggcacgcagactacttgagcccaggaggtcaacaccagcttgggcaacctagtgaggctactctctacaaagtgttatttttttttaaattagccaggtgtggtggcatgcactgtagtcccagctacttgggaggctgaggtgagaggatcacttgagcctgaaagtcaaggctgccataagccgaaattctaccactgcactccagcctgg

SEQ ID NO: 2334 - DNA, 773 bp, Macaca Fascicularis
  misc_feature (1)...(773): n = A,T,C or G
gaccagcggggcnnnnnnnnnnnnnnnnnnnnnnnnnnnnnnnnnnnnnnnnnnnngagagcagaggcnnnntccctcttgctctgacctcagagaggtnnctgagggaggtgggcaggttggcagatggccccagggttctggccttctgaggtcnnnnnnnnnnngccccgactactatgccccccaacccctgaacacnnnnnnnnnnnnnnnnnnnnnnnnnttnnnnnnnnnnnnnnnnnnnnnnnnnnnnnnnnnnnnnnnnnnnnnnnnnnnnnnnnnnnngctgggccagaaccccacccctgaggagctgcaggagatgattgacgaggtggacgaggacggcagcggcacggtggnnnnnnnnnnnnnnntgnnnnnnnnnnnnnnnnnnnnnnnnnnnnnnnncaaagggaaatctgaggaggagctgtctgacctcttccgcatgttnnnnnnnnnnnnngatggctacatnnnnnnnnnnnnnnnnnnnnnnatgctgcaggctacaggcgagaccatcacggaggacgacannnnnnnnnnnnnnnaggacggagacaagnnnnnnnnnnnnnnnnnnnactatgatgannnnnnnnnnnnnnnnnnnnnnnnnnnnnnnnnnnnnnnnnnnnnnnnnnnnnnnnnnnnnnnnnnnnnnnnnnnnnnntgagtcctggggttggggagggggttggggtcccaggacctgagcctggccatatcctcaaccccaaatcccctgactccctccccaactc

SEQ ID NO: 2335 - DNA, 1230 bp, Macaca Fascicularis
acatttgcatagtgagggaagtgacatgaaatggattcgaaatatcagtgtgtggagctgaatgatggtcacttcatgcccgtattgggatttggcacctatgcgcctgcagaggttcctaggaatagagttgtggaggtcaccaaattggcaatagaagctgggttccgccatattgattctgcttatttatacaataatgaggagtaagttggattggccatccgaagcaagattgcagatggcagtgtgaagagagaagacatattctacacttcaaagctttggtgcaatttctttcgaccagagttggtccgaccagccttggaaaggtcactgaaaaatcttcaattggactatgttgacctttatcttattcattttccagtgtctctaaagccaggtgaggagctgataccaaaagatgaaaatgggaaattaatgtttgacacagtggatctctgtgctatatgggaggccatggagaagtgtaaggatgcaggattggccaagtccatcggggtgtcaaacttcaaccgcaggcagctggagatgatcctcaacaagccagggctcaagtacaagcctgtctgcaaccaggtggaatgtcatccttacctcaaccagagaaaactgctggatttctgcaagtcaaaagacattgttctggttgcctttagtgctctgggatcccatcgagataaactatgggtggaccagaactccccggttcttttggaggacccagttctttgtgccttggcaaagaagcacaagcgatccccagccctgattgccctgcgctaccagctgcagcgtggggttgtggtcctggccaagagctacaatgagcagcggatcagagagaatgtgaaggtttttgaattccagttgacttcagaggatatgaaagttatagatggcctagacagaaattttcgatatgttgtcacttgatttttttgctggaccaccctgattatccattttctgatgaatattagcatggagggtgttgcatgaggtctagcagaaggccctgcgtgtggatggtgatgcagaggatttctctatgctggtggactggacacgtcatctctggttaaatctctcctgtttggcaacttcagttagctacatatatgcccattgtccagaaaagacagacaataacttttttttgattttgaaaaaattaaatgatatctcctaaaaaaaaaaaaaaaaaaa

SEQ ID NO: 2336 - DNA, 707 bp, Macaca Fascicularis
  misc_feature (1)...(707): n = A,T,C or G
caggtgagtcnnngcagggtgctgacctttccggctgcgtggctctgctctgcccagtgacagaggccgctcagccatcttctggggcatccgcttgtgaacagggctgacgggacccttgagacagagacgtctaacgccctgctcacctgcgagagctccgtgctgggaaatacgtggcgggggaatgggcccaggaggccccggaggccctggaagccggccctgcgtgcaggcagctcttctgggtggacaagggctctttccagagaattaggagtgttttccaatttataaaaatgcttttaannnnnnnnnnnnnnnnnnnnnnnnnnnnnnnnnnnnnnnnnnnnnnnnncaaactctgctagcgcagaactaagaaaacatccctagagacggcccctgaaaggacacctctgagtgccgcagcccccactcccacgccctcccggcccctcctgcaccgcgcggcccctcggctccctgcattttgctcacagaagctcctttctcatcagtggaaaggggccacaacgtgggtgtcccctcccggcacaagcgtgggtcagcctcctcgccgcctccctccatccctcacgctctctctccggttgtatttctgcctcctcctcctctctgccgttcctcactctctctctccggttgtatttctgcctcctcctcctcttgcagcttctcctacc

SEQ ID NO: 2337 - DNA, 756 bp, Macaca Fascicularis
  misc_feature (1)...(756): n = A,T,C or G
aaccactgtagatgaagatgttttacctggcaagtnnnnngnnnnnnnnnncnnnnnnnnnnnnnnnncttcatataaggtaatgtgtcagtggatggaaaagtttagaaaagatctgtgtaggttctggagcagtgttttccnnnnnnnnnnnnnnnnnnnnnnnnnnnnnntggttggaattacaggagcagctgtggtaataaccatcttaaaggtgcttctcccagtttctgaatacaaaggaattcttcagttggataaagtggatgtcatacctgtgacagctatcaacttatatccagatggtcctgagaaaannnnnnnnnnnnnnnaagataaaacatgtatttaaaacgctgtttcatatcatggactccaaagtagcttattgcctccaaatttgccacttgaatataattttctttaaatcgttaagaatcagtttatacactagagaaactgctaaactctaagactgcctgaaaactgacctttacagtgccaagttaaactttaccttattctcggcnnnnnnnnnnnnnnnnnnnnnnnnnnnnnnnnnnnnnnnnnnnnnnnnnnnnnnnnnnnnnnnnnnnnnnnnnnnnnnnnnnnnnnnnnnnnnnnnnnnnnnnnnnnnnnnnnnnnnnnnnnnnnnnnnnnnnnnnnnnnnnnnnnnnnnnnnnnnnnnnnnnnnnnnnnnnnnnnnnnnnnnnnnnnnnnnnnnnnnnnnnnnnnnnnnnnnnnnnnnnnnna

SEQ ID NO: 2338 - DNA, 744 bp, Macaca Fascicularis
  misc_feature (1)...(744): n = A,T,C or G
agaggatgttatgagaaacatagatttggatttaatagaaaaactaagaaacaatggaatgggcggacttgagagtgtcctctgcttctgaaaatgatcaagaaaaatggtaagaatgtacacctcaagggtggatggtaaagttcagcctttaagcctcaannnnnnnnnnnnnnnnnntggggtgggggtggagggcccgaagacaggcagactaccacagcagccccaatggaagcagtgagaatnnnnnnnnnnnnnnnnnnnnnnnnnnnnnnnnnnnnngagaataaacccggcttggctctgccctgtgcnnnnnnnnnnnnnntgtttgctcccgggcgtgtcagctggtatatgtgtctctcagaaggcagctggggagcacattagctcagagactgggaggcagnnnnnnnnnnnnnnnnnnnngccttggtcaggcatggggtttgctgcattttcccaagcccaggaaatggaacccagttctttttctttctgtgtaaaataatgagcnnnnnnnnnnnnnnnnnnnnngagaannnnnnnnnnnnnnnnagaaatgttttttctcactctgacctgattttgannnnnnnnnnnnnnnnnnnnnnnnnnnnnnagattttaaaataaggtgacttgttttccccaactccacagttcaccaaaagtatttcatctgtttgttctgaaaatgcagctgctttctagatttatgtgtgctctgataagaaa

SEQ ID NO: 2339 - DNA, 1790 bp, Macaca Fascicularis
ttgtttttgatggatacataaagaatttatatacggttttctaggttagcctagttaaaacctcttcttccagttaagaaataattgctaattgagaccaagacattataattgttttccttttgtatcatagtaatgaaaaatatcaagaattatatcttatcactttttacacaggtccaagtgatgttttttgaacttccatgccacatttttttagccaagttttcaccagtttggaactcttaagggttatttttcagtgaaagacaatcttttaaggagtttatgtcctaaatattttctggttttgcagtagcatacatcagacatagtcattgtgtttggattgggattttcacttttaacatgttctcaaattctctaggcgtttaatgtttccatctggtcctcataaaagatttcacatttgtaatgcagctcaggctcctactcagagagcatcattataattctatccatgactctagtttgatagagcagatacttttaaaactttggatttgttttttgcttttgtgttctgtcttaaatctaggaataacacttgagtttaatggtgcatttctttctgaaaataatcatagtgtgcacaccatgacaccaggctcacaccctgcttccttctgtgcagtttgaagttcctagggcaggaggagtaaccacattgtgagcccagtacgaggaaacttagcagtcatcttactttctcttcattaaacaatctgttctcagtcatcacagatggagaggatattttcaaggacttgaacattttcttgaaatagccaaacaactaggaatctccttttgccatgttaaataataggttctagggcacagtttgagcaaagttcacagcttctagcaaggtcttttctatgtagttaggtgtgcagtgcatgtggatttgtttagtgagtatgtgcttaagtagcacttactatatgtcaagtaattctctaacaacttcacaaatattaactcatttaatcctcacagtaactttatgaataaggtactattagtaaccctatccaaggatgtagaaactgaggcataaagcaaaaagaccacagctagcaagtggaagagccggaattaaaacctaggtggtctggttcaagaatccatggtcttaactgtgaaactatgctatgactgaatgtgttcagtatcagattcccaaagatctattattacttcccagaattgaattgcacactttgtgtaactctcctgaacaccatccttgactcatcattggcactcagtgaatgtttgcttaccttagggtttaattaagagtgaaatgataactgattttgcaatcgtttgaaaaaaaggcagaaccaaaggcgaatcataatggtagccagtggacaggctgtttttcattcagaagagtcagtggatcccgttatctaaggataacctatatttaaggcccagatacttctaagatgatgctttggattctacatattcaaatctggaagaactatcttcatttcactaatagttctttactgatacagtttatttttatttaagtgtggtgaaatacatataacacaaaatttaccatcttcgctatgtctaggtgtacagttcagtaggtgttacataattcacattcttgtgcaaccagcctccagaactcttttcatctttcaaaactgaaagtctataccacttaagcaacaactcctcattttttcttccctctaagctcccagaaaccatcacttaaaaaaaaaaaaaaaaaa

SEQ ID NO: 2340 - DNA, 751 bp, Macaca Fascicularis
  misc_feature (1)...(751): n = A,T,C or G
cgagccagacaagagttattctggaaaattcagtactgaaatgtacctgccttactgcataccaatttacttggggtggggagggggggaagttagagatgccggctccagatctccacttcattcccaggtgatgttggaaatcctgtaaagttacacttcctgtgctggttttgttttgttttttgtttcctttggctgattcctgctgagtgaggccagttcctcatcaggctcagggcaggtgccattttcaggcgtggcctcctttccatctagcacagcatctttgtctctgttctgtctcctccaaatccaagatgattttaattagtacagacatgtacagtctacaattaaagagtgatttgtactaatatgattttgattcttcctcctctttgctgtcctttcaagacacttgctgnnnnnnnnnnnnnnnnnnnnnnnnnnnnnnnnnnnnttctatgactccgatgtaaaggactttctctgtacagtatattacccaatgcatgtttgttctctcccgatacagtgaacaccacacagttgtgaagccgtgcagtggggatgccccacaccctgcagaggcatcgacccctgtgtataaggaaagacattttcctttgctgtacttgcttgagcttcccccctgtctgtacatgtgagctgtgtgagatagatgtgaaaagttcaaatgaatgcattttcctgccccatgtatacagattgtcatctgtacaatgac

SEQ ID NO: 2341 - DNA, 746 bp, Macaca Fascicularis
  misc_feature (1)...(746): n = A,T,C or G
acagcatacacacnnnnnnccactgtgcacttgtgagatcatgagaatgaaaactatataatgtctcagtagtacaatgaaaatagtttgacctttcacaccctttcaaagaaagtgttataggggcccttaagggtgtccagactctttgagaaccactatactttaaatttgtgtatttctagaacagtatttacttgtagggcaaacatactactccctgggttttttgtttgtttgtttgctagtgagaaaaactgaaattgcagactttttaacactacttgaaggtaataatagcagtggtattatagggtgtgtatgagatagttatttgcaaacgattttcatattttatctcttacaatccctgcagtggacccgtacttttaggatgaaagaagcaaagcatagggaggtgaagctagtggcagcttttgctctggggaacagatttggattcaaatgctgtcacatttatgtacaaatgcattcttaatattttgaaattctgaacaagttctatatcttgtatatctaaaacaaactttaatcacttgaattcctttcataatttgatgaaatcagtacagtttattctttttttttttttaaactttagaagtaaattaatatggtaactagtggagcgtgctttaaattgaagacttatctgacagtatcacagactccgattttgtaaagcattccacctttattgataccagtttgtggcctatacactt

SEQ ID NO: 2342 - DNA, 717 bp, Macaca Fascicularis
  misc_feature (1)...(717): n = A,T,C or G
ttagttaatatttgaataaaagatcaaactctatgtggaaatagagagttatgtttaaacatttctaattattaagtactgacaagcaagatacatggcttaccagacttttgaaatgacttnnnnnnnnnnnnnnnntcatagtcagtgcccttctcatcttccctgtgggggtgaatagcaatgctacatggtagaactggatgattattaaattataacagnnnnnnnnnnnnnnnnnnnnnnnnnnnnnnnnnnnnnnnnnnnnnnnnnnnnnnnnnnnnnnnnnnnnnnnnnnnnnnnnnnnaacttctttctcccttcttattgtaaaatattaattaaagtaaaacattaaattgaggactaaaggaagataagtcctaaacaacaagaagtagtcttaccacactgttcaaaaaaccaagagctctgttctctattttatatcttcatttctttccttttactggtaatatctgcagtgttcaatttttgtcttttgtaaaaattgtactaggcttagtgtgtggtaatgcaggcttgaagttcttgctctgagttcaccacgtgtttttgtaattttgtggttggtgagtaatattttgagacatctttttattttcacctagaaacaagagtaaaatattatttattgtaaaatatgtgggaatcatatatgtatatatatatacttagaattttctgtgtatagag

SEQ ID NO: 2343 - DNA, 946 bp, Macaca Fascicularis
  misc_feature (1)...(946): n = A,T,C or G
cagcagaatttnnnnnnnnnnnnnnnnnnnnnnnnnnnnnnnnnnncaaaggagaccaatcctgtggtgttttttgatgtttgtgcggacggtgaacctctagggcggataactatggagttattttcgaacattgttcctcggactgctgagaacttcagagcactatgcactggagagaaaggctttggtttcaagaattccatttttcacagagtattccggattttgtttgccaannnnnnnnnnnnnnnnnnnnnnnnnnnnnnnnnnnnnnnnnnnnnnntggagataaatttgaagatgaaaattttgatgtgaaacatactggtcctggtttactatccatggccaatcgaggccagaataccaataattctnnnnnnnnnnnnnnnnnnnnnnnnnnnnnnnnnnnnnnnnnnnagcatgtagtatttgggtttgttaaggatggcatggatactgtgaaaaagattgaatcatttggttctcccaaagggtctgtttgtcgaagaataactatcacagaatgtggacagatataaaatcattgtgtttcatagaaaattttatctgtataagcagttgaattgaagcttagttattacaatttgataattatgttcagcttttgaaannnnnnnnnnnnnnnntannnnnnnnnnnnnnnngcttnnnnnnnnnnnnnnnntttaatatgttataattgaccttgcatggtgtgaaataaaagtttannnnnnnnnnnnnnncannnnnnnnnntgtttatgtactcctgacatatttgtattaaaatggaataatactaatcttgttaaaagcaatagaccttctcaaactattgaaggaatatgatatatgcaatttaattttaattccttttaagatatttggacttccnnnnnnnnnntacttaccatttgaataaagggaccacaacttgg

SEQ ID NO: 2344 - DNA, 718 bp, Macaca Fascicularis
  misc_feature (1)...(718): n = A,T,C or G
agtaaggaagcctgtctaaacatagcaatggcccagaggaaacaggannngccnnnngaaggctgcagcaaggacgctttaaagaagagactcctagaaatcccagcaatggnnnaggccatgagcacagcagccatgcttgggcagaggtgccagaaggtacctctcaggacactggcaatagcgnnnnnnnnnnnnacccttttgaaaccaagaagctcaatggaaaggccctgagtagtcgggctgaggagccgccttctccttctgtccccaaggcatctggctccactctcaacatggggtctggcaactgtcccaggacccagnnngatgacagtgaggagaggagcctcgaaaccatctgtgccaaccacaacaatggacgcttacaccctcgtcccattcaccctcacaataacgggcagaacttgggggagctggaggcggtggcctactcttccccaggacactcagacactgaccgtgataacttgtccctgacagggacacttctacacaaagattgttgcgggtctgnnnnnnnnnnnnnnnnnnnnnnnnnnnnnnnnngagaggaccccactgacaccccagccatagatagcagcagggctgttcatggccacagtggcctcaaaaggcaccgaattgaattggaagatacagattcagagaattcctcctcagagaagaaattaaaaacatgataaataca

SEQ ID NO: 2345 - DNA, 2118 bp, Macaca Fascicularis
  misc_feature (1)...(2118): n = A,T,C or G
ttacctttttttttttttttttgaggtgaagtcttgctctatcactccagcctgggcaacagagcaagattaaaaacaaaaaggtatctgcctctattgttacccgtattacagggcacctgcagggctgccctgctccaacagacacccctgccctcccatggtgtgcaccccctcttctggaacagcccatctccaaagggactgctgatgttcgaggtcaagatggcccctagcagaaagctgcagaccacttctgaggctggaagggtgtaccctgtttacagcttctagtcccatctgtggctgaaagaggaagatgctcgtggcactcagcattaaggcttccacgaggctgtgaagccctttgggaagtatgagctcaagcttctgctccgaggcaggctccagaatgggcctattggtgagaattgcaaatggaggtaacttctgcaattagacagtggtgacagtgatgctactgtgtgaatatactaaaaaactgaattgtacacttttaaagggtgacttttatggtgcttcattatatcgcaatgtaaataaatagtaagtggaagttgctgctgtgggagcactgtgttccaattgatgatcaacggaagccatggaacatggggacaggcttgggctccttggtggtttcctgcttggggatattcacagcctagtgctgttctgttgtaattcactttagattgttggggctccagctgtcctgagagcagggaaggaagggaaagtcagtgacttctcatgtccagagcctttgtctgccctgctgagcctgccaaggaaaagctttgaggtgccggtggctctcactccctgagcgctcctgggagagctcactcttcctctgcagtttgggggtctttgctaacgccagtcctctctaactgcccgccctctgccgtctccctgctcccgcaatccagttgtcaaaacagattctgccatctgggtggggaaggagtggttttgctgcctgggttttccttgggttatgaaagatggggtaaccacttggcctttggcagtgcacttagtcccgtgaactactgatggagggaccagggcactctcttgtggccctcagcagcactgcttcttcccgccctccagtcttgaattttttccagctggaattctagtgttaaactctggtggtggaggcagctgtcgttctccccaggagatgcctaacatatcagtaacaagaaagaaaataaatcagccacagaaactaggaggtaaaatgttagtgtttttgctctgtagctttattttcaaagaggtagtatggcctcatggaagatgcgtgccctgtggagtccagcaagttccccagctgtgtgtgtgactttggcaggctgacctctgagcctcagactcttcacgtgtagaatggaaatataagacctacctgtaggattgttgtgggctaaaatttaacgaatgcagttacatacttcaatagcctgccatgcggtacgtagggtttaaaaacaattaaaaactcaggaaatggtacctgcttctattgttatccgtattacaataaagactaggcaggaactgctgtctctcttcagggagatggcagcaaggggagtggcaccacaatatcacagtctctgtggagccccttccccagcagtgagcaatcctggctttctctggggctgatccagttgccagtctggggaacctctgactcagggaagtggagagagatttagaaaaatataagggagagcaaaagaaaacaattttttttttttttcttgacagggtctnnnnnnnnnnnnnnnnnnnnnnnnnnnnnnnnnnnnnnnnnnnnnnnnnnnnnnnnnnnnnnnnnnnnnnnnnnnnnnnnnnnnnnnnnnnnnnnnnnnnnnnnnnnnnnnnnnnnnnnnnnnnnnnnnnnnnnnnnnnnnnnnnnnnnnnnnnnnnnnnnnnnnnnnnnnnnnnnnnnnnnnnntacactcctgacttcagatgattcacccacctcgacctcccaaagtgctaggattacaggcatgagccactgcacccggccaaaaacaattaaaaaaaaaaaaaaaaaaaaaaaaa

SEQ ID NO: 2346 - DNA, 704 bp, Macaca Fascicularis
  misc_feature (1)...(704): n = A,T,C or G
aggacgaactcaccgaggcgagaagtgtaacattccctccacccagcttataaaaggattnnnnnnnnnnnnnnnnnnnnnnnnnnnnnnnnnnnnnntggctactggggtttggcccccgagtggccgtccctgtgggagatgtaccccattcttgggcccccctcattccctttccgaaaaaggaaaacttccgtttgagccgttgagctaattctgcaattttctaccaaacacagcgctggtggccccggagcagggctgtgacattggctggggagcccccttcctgtgttctccctttgttccagcgccgcgatggtgagatcactgttccaagcagggggacggctcccgataggacaaagagagcaggacctccagactctggggagccctgcagaccttgacaatttgcctgactcattcctgacctcttgtcannnnnnnnnnnnnnntacaaattcagggccagctgtatgcactaagtcaaatataatgaatttcttcttcctcccactcccaaccgaccaaaattttgacaatgatgatgttcaccagaaggaacaaaaaaaatcagttttatgcactttattttgtttttattttaattttttattaagaaaaacttttttattttacagaatttaccttctctgtatatatgtgcataaagtatgcannnnnnannncgaaggtaattc

SEQ ID NO: 2347 - DNA, 772 bp, Macaca Fascicularis
  misc_feature (1)...(772): n = A,T,C or G
cagacaactgtgcacagacaggctctggaggcctggaccgcacgtnggcagggccagaaacaannnnnnnnnnnnnnnnaggccaaggaaannnnnnnnnnnnnnnnnnnnnnnnnnnnnnnnnnnnnnnnnnnnnnnncagcacttggagcgagcacaggccaaggacgatgagtaacagaggtggcggcaaaggctctttccaggaaatgtgtatggccttgaaggccaaggaggaaaagctgtgggggacagggggcgggaggagcaaagcgggtggaggaaggaagggggagaggagaggtgccagtcacaaaggaaaacagnnnnnnnnnnnnnnnnnnnnnnnnnnnnncctgtcccacctcgagtgctctcacagagctcagctcattccctaaaggtgcgggagggccccgctcattgggcagggctatgtgaagtgcttggcaccgttctgggagaattaagcatttagtannnnnnnnnnnnnnnnnnnnnnaatccaaacgaggcctgagagcccggggttggggggtgggtgcctgccgggctgtccccgtgagaggagcaggctctaggaaccttttggctcctctggtgggacannnnnnnnnnnntccaagatgagaggcaggggaagagtgaattccttggaggggaatcctggcactgtcaggactgggaaagtggctgtgcggttcaaggacgacacctggactgagatgaaaggatgtgaccatcatgcttatatcctggaaagttatttgtc

SEQ ID NO: 2348 - DNA, 689 bp, Macaca Fascicularis
gcgggcgggtgctcggctggcggcagagggagacccgcggctaccccgcgctcggcgtcgctgccaccatgacgggaagcaacatgtcggacgccttggccaatgccgtgtgccagcgttgccaggcccgcttcgcccccgctgaacgcattgtcaacagcaatggggagctgtaccatgagcactgcttcgtgtgtgcccagtgcttccggcccttccccgaggggctcttctatgagtttgaaggccggaaatactgtgaacacgacttccaaatgctgtttgctccgtgctgcggatcctgcggcgagttcatcattggccgcgtcatcaaggctatgaacaacaactggcacccgggctgcttccgctgcgagctgtgcgatgtggagctggctgacctgggcttcgtgaagaatgccggcaggcatctctgccggccttgccacaaccgtgagaaggccaagggcctgggcaagtacatctgccagcggtgccacctggtcatcgacgagcagcccctcatgttcaggagcgacgcctaccaccctgaccacttcaactgcacgcactgtgggaaggagctgacggctgaggcccgtgagctgaagggcgagctctactgcctgccctgccatgacaagatgggcgtccccatctgcggtgcctgccgccggcccattgagggc

SEQ ID NO: 2349 - DNA, 632 bp, Macaca Fascicularis
  misc_feature (1)...(632): n = A,T,C or G
gtggactggccgctcnnngntgtcatcactgagggctgnnngagcaagtnnnnnnnnnnnnnnnnnnnnnnnnnnnnnnnnaagctnnnnnnnngggcgctcaaggatatctgcttccacctcaagcgcacagccctgcnnnnnnnnnnnnnnnnctccgtnnnnnnnnnnnnnnnnnnnnnnnnnnnnnnnnnnnnnnnnnnnnnnnnnnnnnnnnnncagggctnnnnnnnnnaccagatcnnnnnnnnnnnnnnnnnnnngttcagggccaggctgnnnnnnnnnnnnnnnnnnnnnnnnnnnnnnnnnnnnnnnnnnnnnnnnnnnnnnnnnnnnnnnnnnnnnnnnnnnnnnacggagaaggcggcgcctgtcatnnnnnnnnnnnnnnnnnnnnnnnnnnnnnnnnnnnnnnnnnnnnnnnnnnnnnnnnnnnnnnnnnnnnnnnnnnnnnnnnnnnnnnnnnnnnnnnnnnnnnnnnnnnnnnnnnnnnnnnnnnnnnnnnnnnnnnnnnnnnnnnnnnnnnnnnnnnnnnnnnnnnnnnnnnnnnnnnnnnnnnnnnnnnnnnnnnnnnnnnnnnnnnnnnggaggactttctgcnnnnnnncaacttcaacaactactaccag

SEQ ID NO: 2350 - DNA, 719 bp, Macaca Fascicularis
  misc_feature (1)...(719): n = A,T,C or G
cattcnttnnnntaaatnnnaggctaaatcagttttatttttctctgatttttttttataccacagaatcacctgtcagttaaaagttgtcaattaaaaggtaaccttttaatctcataggaggaatctcataaagacatttttcctgatatgtagagcagtctgttggcaaaaatgcatatattttnnnnnnnnnnnnnnnnnnnnnnnnnnnnnnnnnnnnnnnnnnnnnnnnnnnnnnnnnnnnnnnnnnnnnnntgctatttcttgtgcctacgaatgtttccgaaagtcgcatcactaattatatttgcgaggttgagtgtacacaaagtttctcatatcctgttcaagttaatcaacatcaagcacatggggatgctttagggtgaggctatagtacaaaatgcataaaccatgtccccaggaaatttgaaaggaagcaggtgctggatggatttttttttttccttttccatgagctgtgttaactctatctccagtaggcctaatgcttgaataagcaagatgtctaatcaataaattattttcatgctcagaatttcaggnnnnnnnnnnnnnnnntagcttggtcttatttcttactgtatgannnnnnnnnnnnnnnnnnntttaaggttttgttttgttttttaagtgggcgatgtaagtgatttaattcatgggtacttttagaacnnnnnnnnnnnnnccattgc

SEQ ID NO: 2351 - DNA, 904 bp, Macaca Fascicularis
gatggttcctatgcggcttggttgtcacgggacagcagcacctggtgaggtttggggaggggttcccgggctctgagggggtcaggtcctgggcaggggcgggacagagctggtacaatgggagggggaataaccaggcacctggggcgtggccgtagccatagcaagtccttatccccaaccctccttcctcccctccaggctcacagcctttgtgctgaaggtcctgagtttggcccaggagcaggtaggaggctcgcctgagaaactgcaggagacgtctaagtggcttctgtcccagcaacaggctgatggctcgttccaagacccctgtccagtgttagacaggaacatgcaggtgcgggcatgctggggtggcccgaggggcacctgtaggaggagtctctttgcctcttccccctcctgtttgacatcttcttttctcccctcactaggggggtttggtgggcagtgatgagactgtggcactcacagcctttgtgaccatcgcccttcatcatgggctggccgtcttccaggacgagggtgcagaggaattgaagcagagaccggtaaggacagtggcgtttctgtcctccgctggcccccagttatccccctttttccgcaggaacccaggagtccaggccccagaacttcatcctgttttcttccaggaagcctccatctcaaaggcaaactcatttttgggggagaaagcgagtgccgggctcctgggtgcccacgcagctgccatcacggcctatgccctgacactgaccaaggcttccggggacctgcggggtgttgcccacaacaacctcatggcaatggcccaggagactggaggtgagggacgaggggctcctggcagtgaatctgaggcccaggggaccttaggatc

SEQ ID NO: 2352 - DNA, 601 bp, Macaca Fascicularis
aatattcagggatttctgtcctgcagggtggggaggtggcggctgcatgccctgccaaggatcttggtgtggatgaaatatctgggggctagggggacagctgtagcatctgctggcattcgcgtgcctcccaggacctgggagctgactctacagagaggtctgggtgccaagccaggcaccttcctgagttctcaggactcccaccccggccccaagggctttaggcagggacctaaaggggaaagagtcctggatccatctctagccaaatcacaccccagagccagaggcctggggacctccttgccttccccttcccctacagcaaggtcaacactactacgccttagccacccctcaccctgctgaccgcgccttccctctgcagcacagggcaggcagccacctatcccccacaagacagaacccaggaggggagtagagggcaccagggaatgctgtgagggactttagggtgagcaaacgcagaagggagccagtgtcgccccaaccccatcccacagccatttttctctcgggttctacccaccactgtgtcggatttttcttaaataaatggatgtggtcagactggagg

SEQ ID NO: 2353 - DNA, 742 bp, Macaca Fascicularis
  misc_feature (1)...(742): n = A,T,C or G
ggccgctnnnnnnnnnnnnnnnnnnnnnnnnnnnnnnnnaggggaacttgggggtgccaagaaaacctggaaggtgcagtagnnnnnnnnnnnnnnnnnnnnnnnnnccagannnnnnnnnnnnnnnnnnnnnnggctgtgaccaccagaccttttcatgagtggtggcagtggtggaaatgagggaggcaagtaggcttggagaacgtttttagccagggggtgctgagagatggcagaagggggtcttaatgtggggactatggacagtgaggcatccgtgggaagcagagggattttggacaagtccagatggaacgcgcagggcataggtagagggaaaacaaaatccctttctgggagaaccatttcttgtttattgaaacagtgggggacatcatcaaagtccgggcggacacattcaattatctaaaaattacaaaggtaggcacagcaaagaataatgaaattataagaaaaccaagggccaggtgcagtggctcatgcctgtaatcccagcactctgggaggctggggtgggtggatcacccgaggtcaggagttcgagaccagcctggccaacgtggagaaaccccatctctcctaaaaatacaaaaattagctaggcgtgggagcgggtgcctgtaatcccagctacttgggaggctgaggcaggagaatcatttgaacctaggaagcagaggttgcagtgagctgagatcgcaccattgcactccagcct

SEQ ID NO: 2354 - DNA, 732 bp, Macaca Fascicularis
  misc_feature (1)...(732): n = A,T,C or G
cttttttttctctttggtcttgaatagcttannnnctttaataacaagtcagactttattacaacaataaactgaagttattcttttaggttctcgtgaaattcnnnnnnnnnnnnnnnnnnnnngcctannnnnnnnnnnnnnntatgatataaaatgatggctatcaaatgattttccatacattgtactgatcaagttatacacccaggggtatatacactttcttcatgtttcttctttgtatatttggtgactgtatcgtcatagatgtacatattgtgtcggtagggctatgaggcatgttacaggaatgtaattttctcagaatttacactcacttgcagtcatttatttaaaaagataaaacaagataatgggttctttgtattggcactttgcaccagaaacatatcattatttattgatgtgattacttatttgttatccaccttgtactagtaagttttagcactgaattccttcttcactgtcgtttgtatttatgaaattatggggaatcagcatagtgattaagtnnnnnnnnnnnnnnntgtaaagcaatatcttgagtttgtagcttagaattnnnnnnnnnnnnnnnnnnnngaagacaagtccatttcatcttgagatcatggtgaaatatctttggatatataaattccttaagctattgtaaccatgctttatcgcaaaagatgtaaaatatgccagatgtgtgtgagtgga

SEQ ID NO: 2355 - DNA, 2110 bp, Macaca Fascicularis
ttttggcagaaaatggaaccacttcagatagttcaggagacttttatgatgggactctagagcagtatggatgggtttcagggaaccaataaaagatgttgaggagccccaagacaaacaactgctgggagtggctactgcccctagtctaaaggggccaggggaggaaacagtattaccacatttcagtgatagctggaactgtggaggaagggcttcccaacataagtcatagtcttggatagatgcaggcaatatcagaaatgtggcccctagattgggggtgaggggcaccctctgatctggtatcttccattggacaaacccaaccagaagccagcaaagggagtctaggtgatacaatttgagtcaacctggtgaacagatctgcactcccagggaagagcagataatcaaaaaggttgattaaatcagtattttgataaataatttgattggtttctgttaggttctctttcagcctttgaaggctatatcccattcttgttaggtacatattataatttttatttcattgaatatttacaacagttctgaaggtaaagtatctctacagacgaggaactgagcttgggcaggttgagtcagttgtccaaggtgacacagtaattgaatggtggcactgggatttaaatccagatctgtctgattgcaaagcgcatacttgactctgaggccaccttcctgctgcagtgaaagtcattgtcttccatttcctcagcagggatccagacatcaaggcgggagagaatctttgcttcctctacctccttttctttctccttttctctgaaagtttgtggggaaacaggaagggaaagagaaagttcttttttttttttttttttttaagttctagggtacatgtgcacaacgtggaggtttgttacatatgtatacatgtgccatgttggtgtgctgcacacattaactcgtcatttacattaggtatatcttctaatgctatccttcccccctccccacaataggccctggtgtgtgatgcgggaaagagaaagttctaattgacacctcccactcctcaatttatctagagcttaaatagtatatggcatatactgctgaattgttgttttggttgcatttttcccacattgattataagttcctttagaatcctatattgcatttctttatatagcttttgtctcactagtattgtaaattattttctctgtccatactatgcagaacttggagcagacttcagaatttttagaatctaggatttatcctcttttctggcttaactggctagatgtgtgttttcttcatccatgagaagccattgctaacctccctcttagcccaggaattctgaagccttgaagtgcattttactcacctacaaaatacagagtctgaggctttaccacaacattctgaatcagactttctggggctggggcctgagaatggacattatcataaagtgttcggaaatttgggggcagccacgagacattggcccatgggcaagccactaaccagagatataggaatctctgctttctcctgctgacgtcgtatggtttcctgcctctttttgaatgaggctttggagtcagactgagcaggcaccttcaccatttacaataagtgattttacctgcataactgagcctgcttccccttgtgtaaatggggacttaggcaccgggaggtagaatggggttgtgaggaatgttgagataagagatgtcaagcgcttgggctgtgatcaacacggaaaaaaatgttagctccctttcaagtttgtttctccatcagaagtgtgactttgtcctaaaccatccacactagatccccaaccttcatagtgacctcattaaagattcagcctgtggctcttgagaattaacctcttttgatttgaaggaatcgggatctttcaattatcgcaagaaaagggataggccaggtgcagtgactcacacctgtaatcccagccctttgggaggctgaggtgggaggatcacctgaggccaggagttggcggccagtctgggcaacatagcaacaccctatctcaaaaaaaaaaaaaaaaaaaaaaaaaaaaaaaaaaaaa

SEQ ID NO: 2356 - DNA, 753 bp, Macaca Fascicularis
  misc_feature (1)...(753): n = A,T,C or G
tcatataatttacttacataacctgggactctatagcctattttgcttgaagggcacaaaccagtacaacaaattactgtattnnnnnnnnnnnnnnntggtaacacaatggtagttgtgtatctaaacatacctaaacatagaaaagatatagtgaaaatatggtattaccttgtgggaccaccattgtaaatatacatggttccttgttaatggaatgtggttatgtgccgaatnnnnnnnnnacnnnnnnnnnnnnnnnnnnnnnntcctgaaaagactaagatgacatttccctcccaccaccaagtccaccataatctccctcactcataaacaggaaagatttacttgcactgccgacacaaagaaatgcannnnnnnnnnnnnnnnaaacaataggttaaaatatatcggactgagtgtaaactataagaaaaaaaggctccgaatgaatacgatcatgactcatattattgtgctttgctttattgtgcttcacacagatgttgtggtttttacaagttgaaggtttgtggcctacatggggcnnnnnnnnnnnnnnnnnnnnnnnnnnnnntgcatttactttgtgtctctatgtcatattttggtaattctcacactatttcaagcatatgcatcattgttatattgatattcatattattatatgtgttctggtaatatgtgattttttgatgttactattgtaattgttttggggtgccaagacgacgcccatataagatg

SEQ ID NO: 2357 - DNA, 705 bp, Macaca Fascicularis
gtatgctactagaaccgaagaaagagaaggagaaatggatgaatcgatggaccatatcaccctggcacctatatcagctcaaaaactgaaggaaatacccctttcctgccctctctttgactaatgctgtagacgctgagtcagtagttcctcctgggacctgagagtccacgttcctaatgagctccaggtgttcccatgcggctgcccctctgaccacacttagaattggaatgcttgaaatgaaatctgagaaatcagcctcttgattccaattttaaacatgcaattgattcttgtaatttttcattcttgtcgaaatgcataccagtaagtttgtaatcagtattggcatgcttaaaagagtttaagacttgctatatttgtcattttaatgtatttaaactttaaagatttgttcagaacttggaaagattttgcttgttaagctcataaatttacccactcaggcatatgagatagggtactttgatttataaatgaagtttaaaattaaaggaatttaattaactaagtttttaaaatgagattggttgttttaaggggaatttactttgtgtaacttgagttgatcaaacactaatccaagttccctgcaaaacctgttctgctttatataacatttactcattttagaaatagatgagaagatttgcaaattgaacctaaagatttagggcaaat

SEQ ID NO: 2358 - DNA, 3436 bp, Macaca Fascicularis
  misc_feature (1)...(3436): n = A,T,C or G
agctccgcccccggggaggggccgtcctgcaggtcccccctctatcctccacggccccatccaagccagggatgaaatttaacagcaagaaggacgcagttgacgcggcgtcaatgaactaagtcaaaagccgggtaaagctaggtcttcgacgtgaagcctcgcgcactgtgctcataggcccctcccctggaacggtgatgaaagacctgcccactccgctcgaaggcccccgcctcctgggtctagtttcagaacaacagactttggtcctatttgtacagctccgcccattccaggactgcagggtctggtggggaaggtcccgcccactctgcacacaggccccgcccgctccgcgctcagggcggtcgctgagttagttgtggagaccccgcccactctgctcaaacacttcaaccctgggtttagacagcgaagggactgcctctggcttgaatttgcatagccccgctcactgtgctcttaggttccgcccaaccgctaagcctgccctcgccttagcaccccatacttacagaccttgctcctaaacagtctgatccttcattttaggccctccaaccctatccccatcaggctggtaatcaccgccttcacccccaaccccgcgccctgcccctaggttcctgtgccagcaagatgctggagcgaggcgcggactccgcggccggggccacagatcctagtcccactggcaaggaaccggtaaccaaagaaggtgagagtggccccgcctgtgagtagggagcattctccaggaataggggccaagataatcacattctgggggaatctcagggtgaaagtttgagggccccagggtgatgactatctgggatccccaaaaatggccacgttctgggaaatcctcccatttggctcagagagagcctcagtaagcatttgctagggctcaggaaattacagaaggggacggggcagggatgacatgcgggatgtcagggtgatcactgggaagacactagaaacggatacgttggtagctttgaggaagccttaggagctttgggatccaggaaagtaaccctttggagtccctcagaatgacgcctggggggagggggagcagaaacatgcaatttggggagtctcaatatgatgcttgaggtgcccaggtacacttggaggagcccctcgaatatcaaagtcgtggcggagcctggcctaggcccagggcgttggctgcttcctggcgcccaccagccctcctgtcccccagctccccaccagggcccactgcagaagcccagccagtcagctccagggcccaccgcgtccgcgagcgcgcctcccaggcctcgccggcggcccccgccccagcgcccgcaccgctgtcccgactgtgacaaggccttctcgtacccgtccaagctggccacgcaccgcttagcacacggcggcgcccgaccccacccatgcccagactgccccaaggccttctcctacccctccaagctggcagcccaccgcctcacgcacagcggcgcccgcccgcacccgtgcccacactgcccgaaggcctttggccaccgctccaagctggcggctcacctctggacccacgcacccacccgcccctacccgtgccccgactgccccaagtccttctgctacccttccaagctggcggcccaccgccacacgcaccacgccaccgatgcccgcccctatccttgcccgcattgccccaaggctttctcatttccctccaagctggctgcccatcgcctatgtcacgaccccccaaccgcacccggcagccaggcgacggcccggcaccgatgctccagctgcggccaggcctttggccagagacgcttactgctccttcatcaacgcagccaccaccaggtggagcacaaaggggagagagactgagccctcccttggctcactgtccccctctgccgccagccctcgccagtaagaggtgggatttctaaaaccgaccgtatgagctccctcttccagatagctggcagagggcaaggcaagggattggccatttatactgggcttgaactcagaagcccgaggaactctttgctcccctgctttggggagatctcaaaccatggacatggagctgtgctttgacagccctggctctgcttctccccacacacttacatggcaaaggtaaagtctgctactatcgtgggttgatgaggattgtgggcaaacaggctctcttgttaaaagtttaaattggtgtctccactttggccatatgactgtatctaagaaactgaaaatatatgcttgtctcaactcttccacttgtggaaatttattctataaactcatgtatgtgaaaaaagcattgtgtataagggtgttcaccgcagtgcgactgttgggccaaagactggaagcaactcaagtgcccaagaacagaggaccgactattgaattatagccatggaatggaataggtagccgtaggaaaaaaaaaaagtgctgtatgtacggatgtggaaagatctccaagatacacatggtgataaaagggtataccactgaccatttaaagccattcaaggctgggcacggtggctcaagcctgtaatcccagcactttgggaggccaagacgggcggatcacgaggtcagnnnnnnnnnnnnnnnnnnnnnnnnnnnnnnnnnnnnnnnnnnnnnnnnnnnnnnnnnnnnnnnnnnnnnnnnnnnnnnnnnnnnnnnnnnnnnnnnnnnnnnnnnnnnnnnnnnnnnnnnnnnnnnnnnnnnnnnnnnnnnnnnnnnnnnnnnnnnnnnnnnnnnnnnnnnnnnnnnnnnnnnnnnnnnnnnnnnnnnnnnnnnnnnnnnnnnnnnnnnnnnnnnaaaaaaaaaagacattcaaaagcccaagcttcaggtnnnnnnnnnnnnnnnnnnnnnnnnnnnnnnnnnnnnnnnnnnnnnnnnnnnnnnnnnnnnnnnnnnnnnnnnnnnnnnnnnnnnnnnnnnnnnnnnnnnnnnnnnnnnnnnnnnnnnnnnnnnnnnnnnnnnnnnnnnnnnnnnnnnnnnnnnnnnnnnncagctacttgggaagctgaggtgggtggatcacttgagctggcaggtcaaggctgccgtgagctgtgatcgtgcgactgccttccagtctggatgacacagcaagacccatctcaaaaagaaaaaggaaaaaaatcccaaggttcagagccatccctgacccacttcttacaagttgccaggccttggacaagctttctcactcctccggactcagatgcctttgctgtaaaatgggtgggttataaggcatttgtaaggggcaagcaacacctcaggcaaagtcagttcccctcttagagcctgtttctcccattgtaaaataaagatgagcaagctaaaaaaaaaaaaaaaaaaa

SEQ ID NO: 2359 - DNA, 751 bp, Macaca Fascicularis
  misc_feature (1)...(751): n = A,T,C or G
attctgtaaatnnnntaaataaaagccagcttaagaggaacccagcattaaatttatgatcttagttggtaatgaaaagtatacgctgctttgtatttatgtnnnnnnnnnnnnnctctccatcttttctcatttcacgtgtcaggtagtttttctgaaccagacgannnnnnnnnnnnnnnnnnnatgcatagcaaggacagtnnnnnnnnnnnnnnnnnnnnnnnnnnnnnnnnnnnnnnnnnnnnnnnnnnnnnnnnnnnnnnnnnnnnnnnnnnnnnnngggctactttttgtagtgcttcaatctgaatttagagctgagttttaaagaagtctttaaatgttaatggtatactgactaacgaatagtgcctcattatcatccttgagtcagatgcttctgttggtgggagaaacagaagaatccttccctttgggggtattgagccccctaaagccannnnnnnnnnnnnnnnnnaatgctagtcctttctctgtgctttggaatnnnnnnnnnnnnnnnnnnnnnnnnnnnnnnnnnnnnnnnnnnnnnnnnnnnnnnnnnnnnnnnnnnnnnnnnnnnnnnnnnnnnnnnnnnnnnnnnnnnnnnnnnnnnnnnnnnnnnnnnnnnnnnnnnnnttaacatttagatgcaatccgtgaaaagaaaaaaaatctgaaaaatatctnnnnnnnnnnnnnnnnnnnnnnnatgtattgtgaatgttttcttaattttattggctgt

SEQ ID NO: 2360 - DNA, 734 bp, Macaca Fascicularis
  misc_feature (1)...(734): n = A,T,C or G
agaaaaaggagccnnncacccaggcagtggggctcagcacacaggcagaagggaccaggacgtaaaagtccctcctgatgtttaccatggaaaactgcttctacctgctcatctctcaggcgatgcggtaccttagggacccagctgtgcatccccgggacannnnnnnnnnnnnnnnnnagctcagctnnnnnnnnnnnnnnnnnnnnnnnnnnnnctcgcgctacttccgccggggagcccccagctcccctgccactggtgtcctcccctcgccgcagggcaagtccacctctctctccaaagccagccctgagagtcaagagcctctgatccagctagtgcaggcatnnnnnnnnncatgtgcaaagatagggcagtgctgtgctgctgtgctgcctacctacccctctccaccagcctacaccgcaccctggctgccagnnnnnnnnnnnnnnagggcaccttctgtcaccccctccccgagtagccacttcaaccacccacccactgatgttatttttatactagatgaagaggtcaacagcaggcatggggagtggagtcttctgtgcttaggccctcacgctgccgacgcccccagaggagcattccttcccttccagcattccccacagcacggccagccaggggaggcgggagcccaggagagggctctatgcacgggtttcagaatctgttttccatgctctgtccctgcagttttggtaatt

SEQ ID NO: 2361 - DNA, 739 bp, Macaca Fascicularis
  misc_feature (1)...(739): n = A,T,C or G
gaacgctagtncnntccgacccagccagctgcaggggatggggacntgggtagttaagggcttttccaaacgtgcatccatttactgacacttactgtccttgttnnnnnnnnnnnnnnnnntccttccagatagctttggagagacgcagggcccaccttggaccctggcgacctcctgtcactcactgaggccatcaggaccctgccccagtcctggacgggccctcctttccccctgtaccccagctgccaggcggccctggggaggggtggtatcatgttgggaaggggtcctgcaaggggaggacttggagggtcgggggcagctnnnnnnnnnnnnnnnaccctgaggaggctgcttagtgctgctttgcttnnnnnnnnnnnnnnnnnnnnnnnnnnnnnnnnnnnnnnnnnnnnnnnnnnncccatggcttctgttcnnnnnnnnnnnnnnnnnnnnnnnnnnnnnnnnnnnnnnnnnnnnnnnnnnnatgtccaccccattatannnnnnnnnnnnnnnnnnnnggctggggactcnnnnnnnnnnnnnnnnnnnnnnnnnnnnnnnnnnnnnnngctgcacacggatggcccgggggtggcgctcagaccccaccctatgctcatctctggaaggggcagccnnnnnnnnnnnnnnnnnnnnnnnnnnnnnnnnnnnnnnnnnnnnnnnnnnnnnnnnnnnnnnnnnnnactcagtgtcagcggggacg

SEQ ID NO: 2362 - DNA, 743 bp, Macaca Fascicularis
  misc_feature (1)...(743): n = A,T,C or G
agagaaagtcctcgctcgtcaccagcaagcttgcgggtggccaagttgaatgatgctgcccggggctccgccagatcttgagacgctgccctccccgcacccgggtcctgtgctggctcctgccccnnnnnnnnnnnnnnnnnnnnnnnnnnnnnnnnnnnnnnnnnnnggctggagaggcagaagcccttgcccgttggtgtcccagcacatggagccccttgggctgagcaccaagaccttgaaccttttttgttttaccttttttccaaataacagttgggagaaatctcaatgaaattctgggggtgggggtggggttgagagggtggggtgggagatatggaggaatatgaattagggcttggagttggtaaaaacattcctgactatcctttttaaccacgtggctggtgtgggatagatgtgaggggaaggaagtggagtagactaatgaaaaggggttctagttgagctctgtagataaatgccttgtttcagtgtggttggagacctggtgtcagataaaagaaactccatccgcacagacagatgcaaacagctcctctggttctgcagagctagttgagaactcaacgttaattattttaaaaagtaatgtccttgaaatagatttgctgtggggagaagagcagtgagtgtgggagaaaggagccgtgagcatggggaaccccacagagcccaaaggactttcccaccatcagaaacaaacaaaacaaaaa

SEQ ID NO: 2363 - DNA, 656 bp, Macaca Fascicularis
cagcctctcctttcctccctccctcttcccttcctctttctttactttttttgaaatcacttattgtaaataagttgtaatccaaacctcatgtatcaatggggaactttcaaatataaatattaccaatgcattttctggttgttgtctgatttttgattgaaatataatgagaatgacatgtctgttgcttttggtttgaggacttcactttagcttcataaatcttttggtattttagtatttcattgttttagcaggggagggcagcaaaagttcattttccctgttagtaatgctgtggttcatgatcggttttaaatttagctgtgtgtgcgtttttttaaacagcatctctttgtgagtagaggtaaaaatgaaacatttttgatatgaaaagttgcatatgaaaattatagactggttcaaccagacagtgaagacttctgatccacctcaaacgtaaaatgccacaaaacaatcttccacctctggctaaaacatgctacttccttttcaaacaccataaaatacaagctgagtcttaaacacttggaatttaaaatgtttttctttggaaatgatttgctttcttcagagtggtaacagaaacaaaaacgaaggtgctccccaaaaagaaatgtaaccttcccctt

SEQ ID NO: 2364 - DNA, 719 bp, Macaca Fascicularis
  misc_feature (1)...(719): n = A,T,C or G
gcatttccattcnnngaaaaggtagtggtgagcatagaactggaacagttatattctgagtcaaagttggggctttgtagagcataattatggaatttttatttactggtagagaggagaagagaggctttttcagtgggtctgggacagtggctgctcttgacctcgtgtgaagggaaatgccaaggatgcttcgggtagacttcaggggaccccagggtttggctgtgggccatgagggcagcaggtggtgggatgcttgtagctcctcacagcaggattcctgcccactgttttttctctgctgggagggaagctcttttctaggagtgtctcagttctgattttggcattagtcatggtggtggtacagttggaattagtgccatgtcatacataaatgttccacaaggcgggagtgtttcactttctggtgataaacttgatggtcactgttatgattaagataatgctgggtaggctgggcacannnnnnnnnnnnnnnnnnnnnnnnnnnnnnnnnnnnnnnnnnnnnnnnnnnnnnnnnnnnnnnnnnnnnnnnnnnnnnnnnnnnnnnnnnnnnnnnnnnnnnnnnnnnnnnnnnnnnnnnnnnnnnnnnnnnnnnnnnnnnnnnnnnnnnnnnnnnnnnnnnnnnnnnnnnnnnnnnnnnnnnnnnnnnnnnnnnnngcagaggttgcagtgagccaagatcgcaccac

SEQ ID NO: 2365 - DNA, 657 bp, Macaca Fascicularis
  misc_feature (1)...(657): n = A,T,C or G
agcccgggcccggggctgtggttaccagctatgcatcaacgagcacgaggagctgggcctcgtgggcccacgannngccactgtcagcagcatatgtgccagatgagaggggctttgggcctggccctggggggatatagacacttcctagagttctttctgggggcgtggagccctcttcgaaggagacaggctgtatttcttgaggacacggagtctttctcaaggacacagaactcttccagggacctggagcccttcccaggacatggagaacttctcgagggcctggagtccccccgcatcacggagtccctcttaaggactggagcctatgcaggcacagagcccctcaggaccaaggagtccctctcgcaggtgtgcagcctttcctgggatacggagccttcccaagacatggattccttcccagggagacaaacccccgtcaggaacacggatcattccagaggaggtggagnnnnnnnnnnnnnnnccaaatttccagattttcccagaggctcagcaactctggcctcaggctccctttccagaggcagcgtctgggctgtgctgtgctgcggaggagggattgcaggatggatgaagctgggactggggctgtctgggtggctggtatcctcgtttgatacaggg

SEQ ID NO: 2366 - DNA, 2668 bp, Macaca Fascicularis
  misc_feature (1)...(2668): n = A,T,C or G
atttttcagaaggctccatccctgctgtgggcatgaattaaacggatcctccggacgctgaggacagcctttgtcttctcggtgcactgcaaaggtgagcgtccctgtgaccttttgctaacaaaagactcctcccaaatcctctcctggacatcagacaccctgggctggcagaggacacagacttgccactgccaggcggaccccctgggcggtgtgacctgccccaggcgccgcagaggaagacggctggtgtgtccctgaaacaggagagatgcattgccacaggctccccagaaacaagatccccaaatgccactgtcggctgctgaggggcagggaagtggttggtgcagaccaccctcgccaggctgccctgcagccaaaaggcagagcgctgagcaggaacgcagcctccgctgagggccacgtggatgaaatcaagcatctgggcctgggaaaggcattcctggagagtctgtgtgcagagggctggcgggaccgatccgctgtgtgcagggggctggcgggaccgagtccgccatgtgcagaggtctggcgggacccatccgccgtgtgcagggggctggcgggaccgatccgctgtgtgcagggggctggtaggattggcctcctgaaaggaggagagagatcagcatgctgggagggagaccgactcccagaaggaacaataaggttggagggggcaaagcagcttcagagcctggctccagccctggagacagaaagaccagtttaaatttccacccggccgcaccctctggggggctgtgggacttttgggagcctctttggtccttagttttatcttctgtggaacagaagcaataattcgtatttagttgggggtaattagaggcgacatatgtggatagctggacacgcagcacacttggtgatgggaccatcttcacccctctctccctggtttccctaagagaggcatctctttccgcccttttcccctgagacttggggcgtgaagtgtaagatgctggatctcacagacagcagcccacagacgacccagaaacattgtggccagctttgaaatcttcagtctcagaggacactcataggctccaagatgctgggtgggtcgtgtgcccaccctgagcaccttcccttgctgctaaagatgggagtgatgtttcctgtctctccgtcacgcgggcattttgaggttgcacgtgacagcagacgcccggttccaggtcggtggtggcgtggaagaactccagctccaacacaggtccgtggcggcgcggaagacctccagctccaacaccaggtcagtggcggcgtggaagaactccagctccaacaccaggtccgtggcggcgtggaagaactccagctccaacaccaggtcagtggcggcgtggaagaactccagctccaacacaggtcagtggcggcgtggaagaactccagctccaacaccaggtcagtggtggcgtggaagacctccagctccaacaccaggtccgtggtggcgtggaagacctccagctccaacaccaggtccgtggcggcgtggaagacctccagctccaacaccaggtcggtggcggcgtggaagaactccagctccaacacaggttggtggcggcgtggaagacctccagcaccaacaccaggtccgtggtggcgtggaagaactccagctccaacacaggttggtggcggcgtggaagacctccagctccaacaccaggtccgtggcggcgtggaagacctccagctccaacaccaggtcagtggcggtgtggaagacctccagctccaagctgcacacacctcgcttgagatgctgttgccctgaacccaccgtgccaggtggagtctgtccgcccccagcccttgccctggggccctgagtgctggtggctctctgaggtcacagccggatggggcctgggctcctgacacacgggggttgggaaatggcctcgggtgtgccgatccgtgaacttctttctgtcgtggatgtgagattcatgagtgagatgcccccagccctgctccagggcagccttgccagtttctggaatgttctccatttccaggctgcagcttccttctgcccacgagtggcttccccgtctgggtgtcatttctgctcaattctgtacttaacttcaaaaggtgcataaaatcctaaaatgggacatttctcagctggcctcctccacctgcggctcctctcgcgtggaagcaggtggaggcctcacggtgctctagagtttgtagggggcagagggcagcatacttgccacagacatcctgttacagggaccatgggattaagagcttgaagtttaatttaagtcacaatgaaaacaagtacggcctggtgtgnnnnnnnnnnnnnnnnnnnnnnnnnnnnnnnnnnnnnnnnnnnnnnnnnnnnnnnnnnnnnnnnnnnnnnnnnnnnnnnnnnnnnnnnnnnnnnnnnnnnnnnnnnnnnnnnnnnnnnnnnnnnnnnnnnnnnnnnnnnnnnnnnnnnnnnnnnnnnnnnnnnnnnnnnnnnnnnnnnnnnnnnnnnnnnnnnnnnnnnnnnnnnnnnnnnnnnnnnnnnnnnnnnnnnnnnnnnnnnnnnnnnnnnnnnnnnnnnnnnnnnnnnnnnnnnnnnnnnaaaaaaaaa

SEQ ID NO: 2367 - DNA, 680 bp, Macaca Fascicularis
aaggaatccccggggggcgccgaggcgtgcaccccgccccgcgcgacgacccccgggggccggaccctggagcgggatgtcggctgcacgcggcatcagagcgtgcagacggaggatggcactggcgggatggccagggctgtagccaaggcggcgctgagcccggtgcaggaacacgagacgggccggcgcagcagctctggcgaggcgggcacgcccctggtacccattgtagtagagcctgcgcggcctggggctaaggctgtggcgcctcagcctctgggcgcggactccaaggggttgcaggaacccgcacccctggcgccttccgtgcccgaggcccccaggggccgggagcgctgggtgttggaagtggtggaggagcgcaccacgctgagcgggcctcgctccaagcctgcctccccaaagctctccccggagccccagacaccctccctagcccaggcgaagtgcagtgcacccagcagtgcagcaaccccagccccaccgtcttccctcttgggctcgggcaccaagcctgaagtggggctgacctcccggtgccctgctgaagctctgcccccagcaggcctgaccaaaaaaggagtgtccagtcccgcacccccgggaccatagctaaggtgggcgttggcccttcgctgtacagcctcctgtataca

SEQ ID NO: 2368 - DNA, 685 bp, Macaca Fascicularis
  misc_feature (1)...(685): n = A,T,C or G
cgccagaggcggccctgccagttgtcctcaaggtnnnnnnnnnnnnnnnnnnnnnnnnnnnnnnnnngactctctgggaccttgccacagcccccactcccctgcttgcagtctgcaaggacgcctttgcagggactttcatcctgctggccaccccactcacacctgtccctggccagcaggctgcctgcgagcgtcaggcacacagggacagccatggcgagcacagagcaggcctggggcccnnnnnnnnnnnnnnnncctgnnnnnnnnnnnnnnnnnnngctcacagtgcctgcggtagccactctaggtctctggccttccttgaccactcgtttaattctctcagctgtttgggtagggtttttccccttagttatttccttttttttttttttttatgttaatatttctattaagaacattttgggcatgtggacccaagcacctgggaaggaggtggcatctgatacagtctgatatgctcccgtctgtgtacccatggagatcgagtcgtgggcccgtggctgtccctggttgtaaattcaagggtctgcatatttgacattcaggtagacacgattacctgggagcaaggccatcagctgccatgcacataacaaagagacaatgcattccttcttattttccctttttaaaaatcgatgaatcatttgtgatg

SEQ ID NO: 2369 - DNA, 362 bp, Macaca Fascicularis
ggaaggattcagagtgcccctccggccccgccatgaggctcttcctgtcgctcccggtcctggtggtggttctgtcgatggtcttggaaggcccagccccagcccagggggccccggatgtctccagcgccttggataagctgaaggagtttggaaacaccctggaggacaaggcttgggaagtgatcaaccgcatcaaacagagtgaatttcctgccaagacacgggattggttttcagagacatttcggaaagtgaaggagaaactcaagattaactcatgagcacctgaagggtgacatcccaggagggggctctgaaatttcccgcacctctagcacctgtgctgaggacgccctcca

SEQ ID NO: 2370 - DNA, 784 bp, Macaca Fascicularis
  misc_feature (1)...(784): n = A,T,C or G
agagaaagagtagaaagagaacgagaaagagacaagaaagataagaaaattggaatctcgctccaaagacaagaaggaaaaagatgagtgtactccgacaaggaaggaaaggaagaggcgacacagtacatcccccagcnnnnnnnnnnnnnnnngtggtagacgagtgaaatccccatcaccaaaatcggagcgatcagagcgttcagaaagatctcataaagagagctcacggtccannnnnnnnnnnnnnnnnnctcctagagatgttagcaaaaaagccaaaagatcaccatctggttcaaggacacctaagaggtctaggcgatcacggtctagatcccctaaaaaatcagggaagaagtccagatcccagtccagatctccacacaggtctcataaaaagtcaaagaaaaacaaacactgacgtaaatttttaagatgctgtcacttattggaaatgcgatttgttnnnnnnnnnnnnnnnctgttttttaaaaaaacaaaaacaaaaaatcaaatgaaagagcattcctggggttttttgtttgtttgtttgtgtatgcatgtgtaaactcatgagcaactgcatctgtagatgtcattgttttatattgtgtaaattactttcattgtggctatttctcaagatgaaatttttattgttctaatggatttcatcagaaatgtgtataatggatctgctgacagtagtagtatttttaggatgttgtgacttagcaaaaataatacagatgtcttccccccttttgtagcttcgaca

SEQ ID NO: 2371 - DNA, 713 bp, Macaca Fascicularis
  misc_feature (1)...(713): n = A,T,C or G
cacagttcacttcattaaattatgggaagaataaatgnnnnngactcagaaacaattttgcctgtatacttnnnnnnnnnnnnnnnnnnnnnttacttttaaatctttattnnnnnnnnnnnnnnnnnnnnntgtgttaaacgtattcttctgtaatgagaatagactggaacatgtgagggaaaaatatcaaaaaaagatggcagtcatctaggcatgtaaaatgccaagaatgtcttagaattgcacaatttagaatttatagagcctttaatcaccttgtctagcaccttgnnnnnnnnnnnnnnnnnnnnnnnnnnnnnnnnatacctgagacnnnnnnnnnnnnnnnnnnnnnnnnnntaatggacttacagttccacatgactggggaggccttnnnnnnnnnnnnnnnnnnnnnnnnnnnnnnnnnnnnnnnnnnnnnnnnnnnnnnnnnnnnnnnnngagagttgtgcagggaaactcccatttttaaaaccatcagatnnnnnnnnnnttactatcccaagaacagcatgggaaaaacctgcccccttgattaaattatttcccaccaggtccctcccacaacatggaattatgggagctacaagatgagatttggtggagacacagaaccaaaccatatcacaccttaaggtcatggtcatgtagctagttatcttgtaaaaccaaatgtttcttagttcata

SEQ ID NO: 2372 - DNA, 734 bp, Macaca Fascicularis
  misc_feature (1)...(734): n = A,T,C or G
aggtatgagtgttgannnngctcagntnntggttttggaagaacnnnnnnnnnnnnnnnnnnnnnnnnnnnnnnnnnnnnnnnnnnnnnnnnnnnnnnnnnnnnnnnnnnnnnnnnnnnnnnnnnnnnnnnnnnnnnnnnnnnnnnnnnnnnnnnnnnnnnnnnnnnnnnnnnnactcttggttgctaaaagtagattaaaactcaatttgtgtatatgtataataatcttatatataattcttaaatagaaagtaattgattttacatagnnnnnnnnnnnnnnnnnnnnnnnnnnnnnnnnncaaatattatcaaaataagcttccttagcttaccaagtattcacaaggaaattctcttatacctctttttggttggctaggggaagcatgctatgaagcagttgttcctgcttcatagttgtctttggcttggctttgacttnnnnnnnnnnnnnnncgggatcccatggtaggtgtgggaagtactggcctcccatctccccatactcaccttcnnnnnnnnnnnnnnnnnnnnnncttttgggggagcctagagattcttttttcaatggtcatgtaagcattcaaggttgagcttcagaaagatgagggaggagtcatagctacagtaaagaacagaacacattttatctgttgcctgtatacagtctcatagaattcttcatattttttataattgtgcattttaattgacagtcatatggtattt

SEQ ID NO: 2373 - DNA, 1133 bp, Macaca Fascicularis
aaaaaaaaaaaaaaaaaaaaaaaaaaatcggtgatagtcttcatgcaggttaatatcaaaggcaacctgaatttcctcagacttcatgaactggcggtgaaggggctgagacctcaaccatgggacctgcgtggtgatcaccacaaaacttcttcctgaaagttcttctccaacaacttctcacattcagttattcattcaacaaacattgagcaacaacctaatattctgggctctggagaccgagttcaaaagaagacagcaggcctctgcccccgcttcctgacaggtcactgcatcttgagtgctaagactgtcatcacagagtgaggaggggaactgagctcagaggggtagaacctcctgaaagaaaatgcaaatggctaacaatataaaatatttcctaggttctatagtaaccagggaaagacatatgggaccttaggtgacaaggaagaagctcccaggcagcatgtgggatggacccaaggagaacgtcagagagaaaggttcagtctggtgtctcctgaagcaggtggcagcatgctgacgaaggagcgtggaactggtgcctccaggactcatgacgagaccttacggagaaagaagtcacccaagggcaaatgactggagtgtggaagagtatggaagagctggaccaaatccacatggtccggtcagttctccaaacatcaagaccctgtgcggtgagggtgagccatctcagcagaaaggttaaaattaagctcggcaggctcgatgtaaatgcgcagacaaagcaaagcaggaagcctcccacactaaaaagggaagataagaatcacagaagccgggatggtttttattgaagggcatttcaaagcaaatacagacatctacggcatatttgtaaatcctccgtatgtgtatggaaacacataccttcacacatcaaaactggatttgttcctgagtaacaaaacgtcctaagaacaaaacgaaaggaaactgaatagcagaaaaatacttccatcgtataccacacaggattatttattaaccacaacacaccaagagttaagaaaataatgcaacaggaacaaagggcaatggatacgtaccgggaagaccacaaaaaaaaaaaaaaaaaaaaa

SEQ ID NO: 2374 - DNA, 672 bp, Macaca Fascicularis
  misc_feature (1)...(672): n = A,T,C or G
gctggagtacagtggtgcaatcatggctaattgcagcctctaactcctggactcaggtgctccnnnnnnnnnnnnnnnnnnnnnnnnnnnnnnnnnnnnnnnnnnnnnnnnnnnnnnnnnnnnnnnnnnnnnnnnnnnnnnnnnnnnnnnnnnnnnnnnnnnnnnnnnnnnnnnnnnnnnnnnnnnnnnnnnnnnnnnnnnnnnnnnnnnnnnnnnnnnnnnnnnnnnnnnnnnncatgcctggccccttcgtctctctaaactcatttcttcacctgtaaaactgggataatggcaccacgtgccttactcaacctgacctgtggactgtgatggtcacatgagagagggagcaggacaggtgtggcagctgtggcatctcccaagtgctccttgaaccactgggcactccttccctgggcccagatggggctgccttctatcttctcggtagcttttggctctgaacaccaggccagggggcagaagtcaggccagtgaccccaactttgagccttctggttaattggggacagtgactgggaggctggtttctgtcatttttattcaactgcagttaccaacctgtgcagcaggaccctctggggagttatgcctgnnncattgcccgtccctgtgccaggctgggcacacaatnnnngacgnnntcct

SEQ ID NO: 2375 - DNA, 487 bp, Macaca Fascicularis
aaatgtaagtcagtaagtcaaagtaccaatgctgttttaatgtggccattaccagctagtatgctggcaccacgcaggcatgttttccctccattttggaagatggaaagaagttctgaggcagatgtacaaagagaccatatgcttcttcatgtctcacttcacctggtatggtcctgggttggaagtggagggtggacactgatgcctctgaagttaaaatagacatccatatgctgaagatgaccttttgaacatgcaaatgaaaattacttatgatggaagcaaaacataatcaagtgtatagagataaaacatgtgaatatagactgtggtggttttagttatatgttatgcaaattattagaaatatgcaattgacaaaaagtataatccattcaaaacatttcaagttacagtgtaaatcaaaacactgtgatagcaataccatatgccacaaaaatgtataccatacaatatatagtaa

SEQ ID NO: 2376 - DNA, 726 bp, Macaca Fascicularis
  misc_feature (1)...(726): n = A,T,C or G
tgactaaagaacttaactgacaaatacataaaagaaacagacttgtggggatattgttttaaggtgtattaattnnnnnnnnnnnnnnnnnctcaatagggcatgccactacttnnnnnnnnnnnnnnnnnnnnnnnnnnnnnnnnaggcattttttaactagcaaattactagatggacttttggggtctgtcactttttaaaagtatttaagacttaaattagcaccacagtctgccttcagtaatacacctaaaatattcttcaggaccnnnnnnnnnnnnnnnnnnnnnnnnnnnnnnnnnnnnnnntattattnnnnnnnnnnnnnnncaaaggttaggtttttaatgttaacagtagtctggtaaatatttnnnnnnnnnnnnntgagaaacaaaagcttgtacctgactagtatttttatttaaaaaaattagttctgttagcttatttaaattgtcttttacatttatttatccgtagaatttatatttatttcattcctttcatctcactgaaaactgtctgcaggccctttgatttggattagatgtgtgaagtactgtcttttgccaaaaacctcaaattacctgttnnnnnnnnnnnnnnnnttttgtgcttgtttggagatcagttcaaaaactatctgtactatctgtactgcctctgatgttaagattttatgtatagcataaggaagctagctctgactatattcctaag

SEQ ID NO: 2377 - DNA, 1506 bp, Macaca Fascicularis
atgtcatcctcaggcacgtcagacttacctgtcctacctaccgatttgaagattcaatatactaagatcttcataaacaatgaatggcatgattcagtgagtggcaagaaattccctgtctttaatcctgcaactgaggaggagctctgccaggtagaagaaggagataaggcagatgttgacaaggcagtgaaggctgcaagacaggctttccagattggatctccatggcgtactatggatgcttctgagaggggacgactattatacaagttggctgatttaatcgaaagagatcgtctgctcctggcgacaatggagtcaatgaatggtggaaaactctattccaatgcatatctgaatgatttagcaggctgcatcaaaacattgcgctactgtgcaggttgggctgacaagatccagggccgtacaataccaattgatggaaacttttttacatatacaagacatgaacctattggtgtatgtggccaaatcattccttggaatttcccgttggttatgctcatttggaagatagggcctgcactgagctgtggaaacacagtggttgtcaaaccagcagagcaaactcctctcactgccctccacgtggcatctttaataaaagaggcagggtttcctcctggagtagtgaatattgttcctggttatgggcctacagcaggggcagccatttcttcccacatggatatagacaaagtagccttcacaggatcgacagaggtcggcaagttgatcaaagaagctgccgggaaaagcaatctgaagagggtgactctggagctgggaggaaagagcccttgcattgtgttagctgatgctgacttggacaatgctgttgaatttgcacaccatggggtgttctaccaccagggccagtgttgtatagccgcatccaggatttttgtggaagaatcaatttatgacgagtttgttcgaaggagtgttgagcgggctaagaagtatatccttggaaatcctctgaccccaggagctactcaaggccctcagattgacaaggaacaatatgataaaatacttgacctcattgagagtgggaagaaagaaggggccaaactggaatgtggaggaggcccgtgggggaataaaggctattttgtccagcccacggtgttctctaatgttacagatgagatgcgcattgccaaagaggagatttttggaccagtgcagcaaatcatgaagtttaaatctttagatgacgtgatcaaaagagcaaacaatactttctatggcttatcggcaggagtctttaccaatgacattgataaagccgtaaccatctcctctgctctgcaggcaggaacagtgtgggtgaattgctatggcgtggtaactgcccagtgtccctttggtggattcaagatgtctggaaatggacgagaactgggagagtacggtttccatgaatacacagaggtcaaaacagtcacggtgaaaatctctcagaagaactcataa

SEQ ID NO: 2378 - DNA, 471 bp, Macaca Fascicularis
ccttttcccaagccttaagaaaaaagaggaacacaggcccttccccaagttggttttttttttattagtttttaaaaaaaaaagggggaaaattaatgattttttgtgaataaattccccccccccttcttccatttgaaaaggttttcttccttcccattcgttttttggcctttttccgggccttcattaagcccgggcatttttagtgttttcacttggaggaaagagggagggggacagaggcctttcgggttccggttccttcttgttttttggagttattgagacagggtgttgatggaaaggaggggagcttttggggggccaccgggggcctggacttatgcagggaggccacttcccaccccactttttgtttttgggtccttgttcccctttgggtgtgtgtgtgtgtgttttaattttttttatggaaaaattgacaaaaaaaatagagagagagaggta

SEQ ID NO: 2379 - DNA, 661 bp, Macaca Fascicularis
  misc_feature (1)...(661): n = A,T,C or G
cnnnnnnnnnnnnnnnnnnnnnnnnnnnnnnnnnnnnnnnnnnnntgacctattgcttttcactgtaaaccttgttataattgtatggttattttttcactatatatgtctttgatataaaaatctgtttaatattactacaggtatattgttctgccactgaagctccatattattgtcaaataaaactgtaaatccaggaaatttttaaaataaaagtttacctgaagcaaccaaatggcacctttaaacaatggaactgtgctccacctgactccgaccaggtagaattcaccaaaagatagtgaaagttttcttaggaaaaaaaagagcaatactcaattcttttctttggaaactgnnnnnnnnnnnnnnnataatttaccatgtactttacttggtaaaagacgaatctggaaaaaatttgttatcaaagcaaattgtctccatctttgannnnnnngttttataagtcaccaaagctctgaaaaacatacttcataattttttgggcttcccataaactcagtggagaaatgtaatgcaataaaagtataatatcatcatttatgaatatctgctgagctcttgtgtgtaannnnnnnnnnnnnnnnnnntattaatgtaaaaaattgtttttaaaaacctccagtgttaaaat

SEQ ID NO: 2380 - DNA, 749 bp, Macaca Fascicularis
  misc_feature (1)...(749): n = A,T,C or G
tgtgtgnttcaccaacatgtccnnnactgtgtcctcggattgcgtcacaaatgtagtcattttttactctctaactgttgagttgattaagagactttgcaaatgacaaagggatgaattccttactttaatctgttatcatttttcctatgtttnnnnnnnnnnnnnnnagcccagatgcatttttataactcagttttaaaaactttaaaatagttaccttgccttttaggatgttcttatcccacccataaagagagtttaaaggggatggatagctgctccccatgccctccccactttttggaataggttgtgagggtgtgaggaagaaggccgtcttttgtatataaggacaaaattgtttgttttacataaattttgttacatatttttgctaatggctttgtatgtaacaagaagccagttgccaaactacttgtacnnnnnnnnnnnnnnnnnnnatgacagactgcgaacaatggctttcagaatgagggacttccatcagacgctaatgatagtagtagcacaaactgaaaacttccccaaagctttcaaagaatattttctcataataaaatccgagtgaatagataattagaagaaacctttttccttcagggaaccaagcaactctattttagtactgacatgcattattttcactgtgaattcacttttttattgcatgttcagatgtccctctttgttttttttttgtaacattaactgcaatgatgttcttc

SEQ ID NO: 2381 - DNA, 576 bp, Macaca Fascicularis
atgaactttctgctgtcttgggtgcattggagccttgccttgctgctgtacctccaccatgccaagtggtcccaggctgcacccatggcagaaggaggagggcagaatcatcacgaagtggtgaagttcatggatgtctatcagcgcagctactgccatccaatcgagaccctggtggacatcttccaggagtaccctgatgagattgagtacatcttcaagccatcctgtgtgcccctgatgcgatgtgggggctgctgcaatgacgagggcctggagtgtgtgcccactgaggagtccaacatcaccatgcagattatgcggatcaaacctcaccaaggccagcacataggagagatgagcttcctacagcacaacaaatgtgaatgcagaccaaagaaagatagagcaagacaagaaaatccctgtgggccttgctcagagcggagaaagcatttgtttgtacaagatccgcagacgtgtaaatgttcctgcaaaaacacagactcgcgttgcaaggcgaggcagcttgagttaaacgaacgtacttgcagatgtgacaagccgaggcggtga

SEQ ID NO: 2382 - DNA, 2287 bp, Macaca Fascicularis
atggacaagagaatgattcaacgaagaatgaaataaaaattgaaacagaatcccagagctcatatatggaaacagaagaacttgcatcaaaccaagaagatgcagtgattgtggagaaaccagaagtgattccattaacagatgaccaagaagaaaaagaaggtgaaaaagctccaggcgaggacacacctagagtgcctgggaaaagtgaaggctccaatgacctagaaaatactccaggtcctgatgtggaaatgaatagtcaggttgacaaggtaaatgacccaacagagagtcaacaagaagatcaactaataggggcacaagatgaagcgaaggaacaaagaaatggaactaaatgacaatcctcggtatcgcaaggcctctcctggctctgggggagttcgggaagatagcagcacacgctgtggaggagggtgggggtggggggaaggcaagtcccacagaaggacggggaatcctttactctaatttctccagctgcattttgttccgtttatctgcagaaaaagaaagaaaaaaagaaaaaaaattcctttaatttggtggagggacccacgttaacgcatctttcaggcattatccttgtaatctctgtcttttctcttacaacttggccccagggtcacagtggcttggttgaacaatcacatgtgtatcctggccccgtctgctttcttggttatttcacaaagctggtcacacagtggtgtattcaaaggaaggggaggaagacagttgtttaatgagctgcaggctacattttaggaatcaatgggcccagcagcagtataatccctagacagaggaggcaggataaaaaatgggcaaaagccttggaaaccacttggaaaaggtctggacagtgaggtgaaaatattttcttcagggattcccaaggcacagtttattccaagtggctaatgagaaatatggaaggtgaattttttccagagcacagtgcagaggcataacagaagggtgggccctggcagccatctgggtctcttccttcctaaccagggtggcaggtgcattcttctttcgcattgactttcagcagagcttacttggttcgcgaggtcttcacatggagaccaccagtgagaggtgactcttcgctggataactgtaaaggatggccctttgctaggtgttgcagttaaaagctaagacaaggggcactgcatttaggacccaaacatacgcctatgaatatcaaaagctccccctgaaatctctgtatgttttccataaaagaacatcctgtcttcacccaaggcttgacagcccacagagtagtctcgagtaaaatattaacaatctaactatagccagatcaaagacacctgaacacaggaaaccttcatttgctggtgctgccattggctggctgtacaatggaatagaattgaaaagctgatcgattttcctgcacataaattctggatgtcaatttccaaccaaactccaatccagctatgtggcatgaagggttacaggaaggagggaggaaaataaccctatgttagtcatgtttgcgtacagaggaccaaagtaggccttcaacataatagttctaattaaaatggtcctcgctgtaggagagacaaaggggcttttcctctagctggtaactattcagatgatggacaagtcttctttcataaaaaattacaaagaaggcatccgaatcactgtctgtgatactgggtcacatattaatcaccgcagctaattgtaaatctttctatgaaacactgaaaagcctctttgtgaattaatacagttctgcttgatgcacttgatttgaaaagacatttctctgtatgtggtgcatgtcggctttgctttgaaaaataacaaagttagcagaatatgttcaatatattttcttggggaatagggtttttattacatgattcattaaggatttgccttaccctgacatttgtgatataaaggaaaatcagaaaaaaagtaattttcttgatcaaggtatgtttttacttaatgcaaataaatgtagtctgttgcttgcaaggaaaaaaaatggcttctgatatctggtataaactgctaaataggataatacgtgcctcttttgttaaaccagcatttaaacgctggactgcttctaaatctgtttgtttcttttcatctgtgccatacactaaaaaacaactgttgccttcatactatatttgttagagcagaatacaaataaaatttgagaggataatgtgaaaaaaaaaaaaaaaaaaaa

SEQ ID NO: 2383 - DNA, 708 bp, Macaca Fascicularis
tcagtcaaagcacgaggagctcagagcagggaagggagatggagagggtggagtgggataccctcagcagaccaactcacggcctgacgctgggctagagggggcccaggcccctctggggatccagctcagaactccccagctgggagttctgctttgcctgtcagccatcctgggcatggccctggctgctggccttcgctacctgcacacccagtattgccaccagcagacagaagtgtccttcggcgagcccgcttcggatgctgttgccaggagcgacagtggcgagactgtgcacatcaggaggactggggagaacagttttgttttggttcaagcagagtacaactggatcactccttctgtgggtagcaagaaaacagtcctctgagaagaccatcaccccagacctctcagtggccctccttgggccctggagagtgtcccagacagagcagacgtaatgagaatacctgatgaagacagggactcgttgtgcctctgtcaatgtgcagttcatggaggaagccgggagaggacagtttcatcaacagagggagttatttctgagctttgttgtcttaacatctgtaattgagcttccttttttctttttgcaattagacgttctgtttgaagacttaaactcaacacaatgaatattgtataacccgctcattaactagacccctgtggccgctaagc

SEQ ID NO: 2384 - DNA, 1188 bp, Macaca Fascicularis
  misc_feature (1)...(1188): n = A,T,C or G
ctacagatgtcatagtgntnnnnnacnnnnnnnnnnnnnnnnnnnnnnnnnnnnnnntttgacctttgtctttatttccnnnntttccccctctctgaatctctgtatatttgattcttaactaaaattgttctcttaaatannnnnnnnnnnnnnnnntaaaagtttgggtatattttctttacctccaagggaagaactaccagctacaaaaaatattttggaataagcactgttttggtataaggtacatattttggttgaagacaccagactgaagtaaacnnnnnnnnnnnnnnnnnnnnnnngttttgtaagtaacaatatgtaatcaaacttccaggtgacttgagtggaacctcctacatccttatttatcaccgtttatgacagtaaacatttcagtgtattgtttattataccacttatatcaacttatttttcaccaggttaaaattttaatttctacaaaataacattctgaatcaagcatactgaatgatcagtaggctgaactatgaacacnnnnnnnnnnnnnnngttcaaaagcctgaaagtttagatctagaagcttgtgaaaatgataatatcaatcacattaggggaaccatcgttgtcttcatttaatccatttagcactatttaaaataagcacaccaagttatatgactaatataacttgaaaattttttatactgaggggttggtgataactcttgaggatgtaatgcattaataaaaatcaactcatcattttctacttgttttcaatgtgttggaaattgtaaaatgatactgtagaacctgtcccctaatttgaaaactgnnnnnnngggctgagtgaaccaaagtctctagacatatttgcataaaggccaaggtattctaataactacttactgaacactaccaccttttccttatactgtatatgtttatggcctacaatgttgtatttgttatttattaagttgtgattgttttattgtttatgccaaatgttaattgccaagcttggagcgatctaaagcattttttaaaagcatggctagatttacttcagtataaattatcttatgaaaaccaaattttaaaagccacaagtgttgttataaaataacatgctgccattcttgattgctagagcttttgttagtactttggatgcaattaaaactatgtgctatc

SEQ ID NO: 2385 - DNA, 722 bp, Macaca Fascicularis
  misc_feature (1)...(722): n = A,T,C or G
gagacgcaagcccgaagagcccaggaaggtcaggcttggggcagcaggaggtgagggccaagtatggagcggggagccccaggagtcacccgcccaaagtcaccctggggtaaagatcggcaagggcagggattgggnnnnnnnnnnnnnnngtggggctgactgacaagaatttggtgggggggagcccagagtcgctggnnnnnnnnnnnnnnnnnnnnnnnnnnnnnnnnnnnnnnnnnnnnnnnnnnnnnnnnnnnnnnncggagaggatctgtggttgggttgggggctatgacctggtgcactttacctttttcttggctgtggtgaattttccctgtcgtattttttctgacatcatggggttcggagggagnnnnnnnnnnnnnnnnnnnnnnnnnnnnnnnnnnnnnncggctgaatgcctccagtcacctaccaggccgctgtgcaactgagccagaggaggcataaccagggccccactagaactcagaagaggggcgtggccttaatgctccaagcccattggtcagtgagaaagatgaaagggaaaggaagcgtggccaggcagcagggtgtccagagggacctgtggcatcacaaggaaagctgcctcaactgctctaaccgctctactcagaaggaggggaggggccgcccactctgggagaggcaagggtctggctttagctttaaaagctttaaaagtgtaaaaa

SEQ ID NO: 2386 - DNA, 713 bp, Macaca Fascicularis
  misc_feature (1)...(713): n = A,T,C or G
gcactgtgctagatacttttacataatctcatttaatttaaccctcacaacaaccctgtgaggtaggtatttgctccattttacaaatggagaaatcgaggcacaaaagattaaacatcttaccaaagtccgnnnnnnnnnnnnnnnnnnnnnnnnnnnnnnnnnnnncaggtgtgcctccactttttaataccagaccaatcttttcacgagggaagtttcctagattaacaccctcacatcttttannnnnnnnnnnnnnnnnnnnnnnnnnnnnnnnnnnnccctcactgtgtttctgctgccctgaaatagtggaggnnnnnnnnnnnnnnnnnnnnnnnnnnnnnnnnnnnnnnnnnnnnnnnnnnnnnnnnnnnnnnnnnnnnnnnnnnnnnnntaacaaaggtagctgggggaaaggagaagaggtnnnnnnnnnnnnnnnnnnnnnnnnnnnnnnnnnnnnnnnnnnggcaaaggggtggtgctgctaggccagcnnnnnnnnagacccctccagctccttcagtccaannnnnnnnnnnttcctacaactattctgccttccatttcgtcttcttccttgcctcactctatgtcatgnnnnnnnnnnnnnnnnnnnnnnnnnnnnnnnnaggtgggccttnnatactctcctgaagannnnnnnnnnnnnnnnnnnnnnnnnnnnnnnnnncagacacacatgg

SEQ ID NO: 2387 - DNA, 720 bp, Macaca Fascicularis
  misc_feature (1)...(720): n = A,T,C or G
cttctgtnnnnngctatcattttctgattaagttttttcaactattaacatatggtctttcatggatgatggagtgttttccccccaaatctgtagtttgtcttataatgttgtatttgaggttttatggtgtacaaatnnnnnnnnnnnnnnnatgtcaaacagatccctagtaaactccttcttcacttttactgtcaaatttacaaaggtcttcccactgcaaagcagcgtttgtcctaatttatataattttttctggttcattttgtgtttccaacttttcatgtaaaattttaattatttttgaatgtacagatgtgagatagaggtgccttttggtatnnnnnnnnnnnnnnnnnnnnnnnnnngtgttacttttgtgatataggaagtccttgtatatgtacttcatcggcccctaggcttcctattttgttacctcgttctctcnnnnnnnnnnnnnnnnnnnnnnnttctacttgtatatgttttcataagtggttaagcaagtgttctcgttacttttgctcttaaatccctgttcattacagcaatgttggtggtcaaagaaaatgacaaacaannnnnnnnnnnnatggtcctgaaattcatgacaacattttagtacaannnnnnnnnnnnnnnnnnnnngaacaagatgaaccaatgtggattagaaagaagtccgagatattaattccaaaatatccagacacc

SEQ ID NO: 2388 - DNA, 601 bp, Macaca Fascicularis
  misc_feature (1)...(601): n = A,T,C or G
agacaggagtnnnnnnaggccaggagttggaggttgcagtgagccaagatcacaccattgccctcgaccctgggccacagagaaataccctgtctcaaaaaaacaaaaaataaagcagaaatgctgaaggggtcggtttacaggaaaaccccagatcagaacacctggctactcccgccccagaccagtggacctgggaatgagggttggtcctgggaggcttttctccaagctgttgccgccagacctgccgggggaaccctggccacagaagcctcccagggagtgagccagagcctggaccgctgtgttgctgatgtgtctggggcagagggtggggaatgtgcaagggtgtgtgtgtgccggggggtgttcacgggcaagcacgtgcgtgcctgtgtgtgtgtgtgcccctcccctgcagccgctggtggtacctccctccagccccttagccaccctctgagcattgcccatccgcatgagactgcccagagacagcagagctccacgtgtttttaaggcgagacctttccctggccccgggggtcttgccatatctcatgaccaggtgncaagacccacaagatgcaaccccgtc

SEQ ID NO: 2389 - DNA, 746 bp, Macaca Fascicularis
  misc_feature (1)...(746): n = A,T,C or G
aggccggcctggaggcggcagccttnnncntnnngntcctgaccgcagatcgctgtggacgccgccnnnnnnnnnnnnnnngcaccatggccacaggccnngnatnnnngntgnnnnncgccggggcccnnnnnnnnncaggctggaccatgctgtccctctctgtcctggggctcctggcttccagggctgtgtctgcactcagcagcctctttgcagctgaggtcttccccacggtgatcaggggggccgggctgggcctggtgctgggggccgggttcctgggccaggcagctgacccnnnnnnnnnnnnnnncggccgacgcggcttctttctgcaacacgtcgtcttcgcctcccttgctgtcctcgccctgctgtgtgtcctgctgctgcctgagagccgaggccgagggctgccgcagtccctgcaggacgccgaccgcctgcgtcgctccccactcctgcggggctgcccccgccaggaccacctgcccctgctgtcgccctccgactcctgctgggccggccacaccccccagcagcgctagtcctgcctggtggccctgggagccagaatgggaccgaggtcaaggcctggagcatgactgagtaccccagacatctggtccaggggagacacatttgcctcagaagcccgtgtctcagtgcaggtggagccatggggacagcatgaaggtgtcctcagccaggccccaggcactgggaggccctgggtctcctcc

SEQ ID NO: 2390 - DNA, 811 bp, Macaca Fascicularis
  misc_feature (1)...(811): n = A,T,C or G
actttaagttttagaacgtccacctttgtgcattttggtagcagtcttgtttcattattttagaaagaggtcttcccattactgggatgttggagccctttcagagaactattaaggctctgtgagggaactattcagtctcacagcaaggaccacagagcgnnnnnnnnnnnnnnncctatctgtcagggacaccaatgtgttttccattctaattacctaaaaatggtctcaattctccatttcattctctgtaaatgacataacagatggtttataaactcagcaaccctcccctttttatcaaaattatatacgtgtgatgtaatgcatatcacctgtcatgtaaagggacggtatggatggtggaaaagttatgctaaaatatggactgcagatatttttgtatgtaatataggcaatataatgaaacaccgagttttttaaaatgaaagcatgcaaaattgtagcttttaaatgtacagacatcccactcaaaaatatctaaactgatagtgggaaaaacatttgagacctaataacatcatgaaatgccctgaatttggaattctggcctagaaaggatgtggcttatgttgggattgatgatggaatctgccagaacattttcatcttattcttcttgacttttggattttttccttttctttnnnnnnnnnnnnnnnnnnnnnnnnnnnnnnnnnnatttttcagcataaaggtatattctaaccacagggtaacacatcgaatttaacatgaaaataaacatttaaacattcaaaaaaaaaaaaaaaaaaaaaaaaaaagg

SEQ ID NO: 2391 - DNA, 747 bp, Macaca Fascicularis
  misc_feature (1)...(747): n = A,T,C or G
gccagcagccagtcaacccttcntttagaccttcaagctctccaaaggctcagattataactgttgccatatatatatatgaggctgttgtcttttccttctgagcctgcctttctcccccaacccaggagtatcctctagccaaatcaaaagactttttctttgggcnnnnnnnnnnnnnnnnnnnnnnnnnnnnnnnnnnnnnnnnnnnnnnnnnnnnnnnnnnnnnnnnnnnnnnnnnnnnnnnaccagttgtgatataataaagaatgtgtctggcttttgtgcctagttcctagcacacagcttcaaaaactctactgtttcctgataggagtgtcttttgcactcataacaagaccttttcacccatcccttggtttatgctaacaaggttacccatggtggacccttagtttcaagggaggagttgaccaagccagaaagaccaagcatgtgattagagcattagaattttcagtcccatcccatccccgatctccaaggaggtgatggggctggaaattgagttcaattttaacatggccaatgatttaagcaatgatgtctatgtaaagaaaccccaataaaaactctggacagtgaggcttggggagcttcctggttggtgaacattccaatgtactaggaaggtagagcatcctgattccacagggacgaaggctcctgagctctggacccttccagtgcttgctaccatacatatcgctttatctggctcttcat

SEQ ID NO: 2392 - DNA, 745 bp, Macaca Fascicularis
  misc_feature (1)...(745): n = A,T,C or G
atagnnncntnngtaccctctcatcatcattttcccaaagcaaagaggaacttgnnntctaggattcgtgccttggtgagaaaggatattttccaatagttcagtgggggaatttttggcttgnnnnnnnnnnnnnnnnnnnnnnnnnnnnnnnnnnnnnaaatgaagtctatgtaggtaagtcatctctatttcacctaatttacagtgttggaatttagacttgcaaaaacatcactctgcaaataccttagataattatagaatcaggagcatttgannnnnnnnnngtctcagaaatcatcacataggggccgtgctccatagatagggatgatagagnnnnnnnnnnnnnnnnnnnntttccatggtcttcctccctcccttagttccatgataaagtatggacagtaaannnnnnnnnnnnnnnnnnnnnnnnnnnnnnnnnnnnnnnnnnnnnnnnnnnnnnnnnnnnnnnnnnnnnnnaaagaaccaatggcacctagaannnnnnnnnnnnnnnnnnnnnnncactagagcatgttttatttcaacaatgtggtttaagtacttnnnnnnnacattttatgactgaggttagagaaaatgtttcttctagcccttgcaggtatgattcttaaacacaatgtccaaggtgtatacaaggatatgtattgnnnnnnnnnnnnnnnngtatatnnnnnnnntgtagtttnnnnnnnnnnaaagtaaaatattttcataa

SEQ ID NO: 2393 - DNA, 1892 bp, Macaca Fascicularis
ctatagccgatcatgcgccttgtctacacagagagattttctccaggagcaggtcaacgcctttgagttgttcaaattggaaattagaactctagcccaggctttgtcaactgtagaggaaaagaagcaagaggaagccaagatgaaaaagaaaatattcaaaggattgatacgtatatttcggaaagttgttattgcaattttggcagcaaacagactcaagattttgggccaatcatgtgcctctctttttacctggatggagagtttcaaagaaggcataggcatgttagtgtgcacaggagagcccaaagacaagcatcaatttccaaaacatcaaaaggagcagttgcgttgtttacaagcgctcagttggctcaccagttctgaccttcttgctgcaataatcagttctatgactgaattacaagatgtcattggtaaaacagatccaaattccagaatttgtggacatttactcataggtgcagccaagaattcttttgcaaaactcatggatgaaattagtctggtaatggaatgtatacctctgcacagtagcaggagtattacatatgtagaaaaagattccctggttcagaggctggcccatggacttcataaagtaaacacactggccctgaaatatggtttgcgtggccatgtgcccattatgaaaagcacagcgtcgttgcagaagcaaatatttggatttacacaaagactgcatgctgcagaagtggagcgccgctcactacgcttggaggtcacagaattcaaacgaagtgtgaatgaaatgaaaaaggagcttgacaaagcccagggtctgcaaatgcaattaaatgaatttaagcaatctaaattgatcacccatgagaagtttgaaagtgcatgtgaagaactaaataatgcattacttcgggaacagcaggcacaaatgctattgaatgaacaggcacaacaactacaggagttgaattatagacttgaattgcactccagtgaggaagctgacaaaaaccaaactcttggagaagctgttaagagtctctccgaggcaaagatggagctgagaagaaaagatcaatctctgcgtcagctcaatagacatcttacccagctggagcaggacaagcgtcgactagaggagaacatccatgatgcagagagtgccctccgcatggcagccaaagacaaagaatgtgttgcaaatcacatgagagcaatagaaaatacgcttcacaaggtcagagatcagatctcgctgtcatggtctgcggcaagcaggaatgacttcaccctgcagctacccaaactgcacctggagacctttgcaatggaggggctcaagggcgggccagaggtggtagcatgccaggctatgattaaaagtttcatggatgtctaccagcttgcaagcactagaatcacaacattagagaaggaaatgacatctcatcgaagtcacatcgcggccttaaaatcagaacttcacacagcttgtttacgtgaaaatgcaagtttacaatcaataggatcacgagaccattcaaatctctccattccttcaagagctcctcttcctgctgacacaactggtattggggatttcttaccattgaaagctgaacttgatacaacttacactttcttaaaggagacatttataaatactgttccccatgctctgacatcatctcactcctctccagtgactatgtctgctaatgccaacagaccaactcagattggattatgacttcatgaaatttaaaaatggaggaagagttaacagtacaattaaaattgttttgaatgggaaaaaaaaaaaaaaaaaaaaaaaaaaaaaaaaaaaaaaaaaaaaaaaaaaaaaaaaaaaaaaaaaaaaaaaa

SEQ ID NO: 2394 - DNA, 2761 bp, Macaca Fascicularis
tttttaaaggattacaacacaagcctcgtggtatttttttcttacacattctgtaccatataaaatgaagggagagaaagtgcccagtgtggagttctgtggtttctcctgcatcccactaggctacctgggagcatcacagagagcataatcttgagttagcagaaatggggagaactaggcaaatttagtgttgtggagaggaaataatgtaaagagctcccatcttccttcacttgagagcacggggctgggttgtgggacaatgtgagggaagacggaagagtagtaaaagcttggagcagctgctttgcaaaatggaatgatagggagcattgaggacaagagaaatgattgctgagcagcgtgctgaccaacctggtgaggttggaggcttatttttagaaggctgccaagcagttgaggacgggagattttcctcgacaacttggtgtagaattgggcccacattaaaggagacagggcagaagcagagagcacagtgagggagcaagaatggccagagttgaagatcctggttgcagagccttgaccctccctcctgtgtggcacttggtgaagtcagggatggttttagtagagaacatgtgctaacttttctcatcccccaggtgtgagaaccgttatgccgtgaacaacagcatcacacattggctgagccaagccttcctgactgggcatcaatggttttctaagctagtatcactgctactttgcctcgtgcatacaaatctaagttcaaaacctatctttcttgttcagtgactccatttttagctacttgatccacatacttgagagcttgaggaatggagaatcttgaggtcaaagaaggctaaagcaaccatgtggagcaggcatcctccacctcctcttttctccaccaatcacaataacatgctaggataaagaaagaaagaaactagaaagtggtctaatacaaccttgagtgaggtactctttgagcctcagttttctttcctacagaatacaaactttagttaagagcaatcgcctattcctagagagggtgattattcaatggcatatcaagcacttggcactattgcagcacacttagttggtgctcaataaatggttgctatgtattaggtaacgaccagacaatgtgcgctatataccattttgtgcaatttatgttgtctttgcctgtgttctgcaaaagcagattctgagacaacagcttatcaatatagctgaaaactcctgtattagggagtacaattccagggaagcagaagtgaaggaaaagagtagggcagagaagacaacagagcaagtatgagttagggcactgtagagatagccgctgcttcataataaaacaaactaactgtactatttcatggatcctgcttctgaaaggccttaagggctactgagtctcaagacagtctgttggcagggtggcaatggaagaggaggagaatttatccactagctttcatctcccactgatcaaaagtctaccccatcaggcattaacttttctgcaccttgccatgcacccctgtgagtgtcaggcaggtcttgatgtatcttaagcctcagtggcaagatggaagacagccctgaattgaagacaagaggatcaagctgtgggcttgagacaaggcactgccaggcagctcctgcacaatgtctgctgtggccctgcagtgatgagaatctacctaaagttggtctccagagtgaaagccaggaagcaagagtcctggagacaggtgagcctgggatgatctgaagagaagctaaaagttcctttcacacctgggctttgagaacctcttttgaatatattgaattatgtatttccacttaaatatctgggaaatgaagatatagctccaaccttcgggagttcctaacattcaagctttcttttacttagcaggtgacctaaagtgtatcaaaaagctattgataaaaaaaatcaagatttaagtactagagggatatttaacaaatcaaatattttgtaagaaaaaatctctgtactatgaataattgccctttaaccattctattgtgatatgttggattttctactgagaaaatgctcttgcacaatatctttcttttttagactactttgattcagttggctattagattctgttgcattgggaattcttagcattttctgctgaaatctgaagcctatttgttacacaatatgtctgactcacatatccagcctcaaactacttgagagaagaggaagttccttatatggttgtactcctccacggcatccctagaggataacaaactctcaatatttgttgagtaggaaacagcctaaatgccaggcattagatgaatgttaaataaatgatggggcaaccatacaatggaatttcacatagcacagttctaaaaaaataagaagttttttctaatacagttataagaagaaggaagacagttattttaggtaaaataaacacattgtagaaaaatatgtataaaaatcctattttgattgcatgtttatacacacatgtaggtggatatgcatatttagaaatctagaaggtaagattacacaataaactgacaaaggctattatctccaggtatgagattggtagaaggggaaagaattttctcctttcacttgtactgtttgtgttttttacaacaaatatttgttacttgtgtaatctaaaaatgaacaagtaaaagaaataatgccttgaaaaaaaaaaaaaaaaaa

SEQ ID NO: 2395 - DNA, 378 bp, Macaca Fascicularis
  misc_feature (1)...(378): n = A,T,C or G
ggaggctgcaggtccaagttcgagggttgggtggagttgttttctctgaggtcaattctcctggctggcagggagtcgcttccagccgtgtcctctgtggcttttcctctatgcacctgcacctctggggtctctctgcctccaaatatcaaatatcaaccttttttttttttttnnnnnnnnnnnnnnnnnnnnnnnnnnnnnnnnnnnnnnnnnnnnnnnnnnnnnnnnnnnnnnnnnnnnnnnnnnnnnnnnnnnnnnnnnnnnnnnnnnnnnnnnnnnnnnnnnnnnnnnnnnnnnnnnnnnnnnnnatgcgtcaccacacttgattaattttgtagttttagtagagagagggatctcatccatgttggcaca

SEQ ID NO: 2396 - DNA, 1814 bp, Macaca Fascicularis
gtaaaaagagaggagatggggatgtactgaaggatcttatgaaaactgcaggcaccgccaaggtcaggcaggcccttggagattacctgaaggcacttaagacgggtaaagaaggcatcccttgtgaaccagagggtcccttttctgtttacccgttatactctgcactgtggtcagaggctccagaagcaagtttatacttcagaataaattgtagtctggaagttgagagctagtcatggttaagaccataattagtgatcatcactattgtacacagcatgaaccattttgcctacagaactgctaattgtagttttctggaatgaaaatcagttgtttgtgtaattacttgtttaatgtctgtcttccttgctagactataagctccatgagggcatggaaggtgtctgtcttgttcactgctgtatctccagcatctagcacaatgcctggcacataaatttacaatgggaatgattttaccagcgaaagctatggcaacccaggaactgactgtcaaaagaaaaccgagtgagaatacgctgcaggttcaggcctcatctccagtggcactgggtgtaaggattcccactgtggctcttcacatgatggaactgtttgacacaactgtagagcagctgtatagcatcttcactgtgaaggatgtgagtaactccttaagctagcatgttaaatgctgatattggaagaaaatacatcacaaagaacaggagctggtttttggttttccttgtgtttttgattgaagggatgtgggatggtggtgacaggaagtctgagcatagtttctgaataattggagaggagatgggcattctttgggactatgtccatattacattgagttttctcttctaggaagagaaagtttgtattttattttccataaaagctacatgtttaggatttttaaaccatagtaattgttatattttgtatctcataattacattaaaatatgtgatagtgtgtgctggaataacatctgttttatttggttagttggtgcaaaagttttctaaatctactgctgtattagaagctgaaaagggagggaaattccagatgtttgatgggaacatcactggtgaatatctagaattggtaagtagactcaaggttaaagaagtaagatgggattaactctattactttttatacgtgctgtttttagcaccaaaatcactagggtctctgttgcctcacccttaatagcagccctctgttctggttactattactgtacttaaaacaatattatatattcctactgtccttgatgtcactgctgttttgagacattttgacactaaagacaattatcagtggtgctgatgtataaactggaagagggactgtatattgttcattgattcttctagtatttaggagtttcagtgaaaggatttgtttttctgtgttgtattgtggggagttttaaaagattttcagtggagtttcccctttcttttcagttaacaaataagaagatcgtcatgaaatggagatgtaagaactggccagaagaacactatgccacggttgcactgaattttgtgcctactctagggcaaacggaattacaattggactgtaaaggagttcctgtctgtaaagaagagaacatgaaattctgttggcagaagcagcattttgaagaaataaaaggtttactgcagctgacccctctaaatggttgaattaaaattttataaggcaaaaaaaaaaaaaaaaaaaaaaaaaaaaaaaaaaaaaaaaaaaaaaaaaaaaaaaaaaaaaaaaaaaaaaaa

SEQ ID NO: 2397 - DNA, 1127 bp, Macaca Fascicularis
  misc_feature (1)...(1127): n = A,T,C or G
tatataaataggaagtaatgatgttaaaactaaattatacttgaggattttgtgatagcatgtgaaataactggagaaagtataacgtaacaaaatctgggctgagaatatttgtaatacataatcttactaatagaactgcaagaatttgctttttgcctacgtcagactttgttaatacaccacagaatcgatcgtgtttgggtgatctcagagttctgcggtcaagccacagctgaggtccaagcaatcaatcagttcatcttctaggagtctcaaagttactcaactggctattttggtactttaatgtaatgttatcttgctgttactatgtggaagagccactctcttaatagaaaatattcacgttctgatgataaattttctatcagactttgaaagcatttctatatttgatacttggagttgaattatagtcatgcttcatttttgtattatcatcatacttgatgctgtgaaaaattgagaaattaaaaatgagtagccaagatcacttcccttaatggtgatgtgaagaggtgattctctttctgaataaaacaagcgtaaaactgggcgagattgtccaaaatggtcgtttctgggccctggaaacctaccaaaaaggcagatgataaattgagaagcgttattgatacactgaatctttggatatgaagaataggggttgtggccttctcgcatggggggcttcttctgtctccttgcccactatctcagtattgtcgagctgctgttttatcagacatgagagactcaatttgaagtgtgggtaaagattgcggttaagaaatcacagcgttcagctgggcacannnnnnnnnnnnnnnnnnnnnnnnnnnnnnnnnnnnnnnnnnnnnnnnnnnnnnnnnnnnnnnnnnnnnnnnnnnnnnnnnnnnnnnnnnnnnnnnnnnnnnnnnnnnnnnnnnnnnnnnnnnnnnnnnnnnnnnnnnnnnnnnnnnnnnnnnnnnnnnnnnnnnnnnnnnnnnnnnnnnnnnnnnnnnnnnnnnnnnnnnnnnnnnnnnnnnnnnnnnnnnnnnnnnnnnnnnnnnnnnnnnnnnnnnnnnnnnnnnnnnnnnnnnnncaaaaaaaaaaaaaaaaaa

SEQ ID NO: 2398 - DNA, 689 bp, Macaca Fascicularis
  misc_feature (1)...(689): n = A,T,C or G
atgtgtcctanannngggagctttgcagnnnnnntagaaagatatgaggcaaaactgaannnnaacgaacaccacggttgcaggtacctttagtngnagggagccagctcgnnnnnnnnnnnnnnnnnnngtgaagttgtttgagnnnanttatggaaattaggtttgctnngagctgtgttgcnnnnnnnnnnnnnnnnnntttctctgcatgttgggactctgatatnnnnnnnnnnnnnnnnatttaannnttnnnngctaaatcaagctccnnnnnnnnnnnnnnnnnnnncgcttgccnnnnnnccctctttttggcctccccctatttcctaggatccgcattcgggtggactctgccccaggagcttgacagggtgcagggcctcttctggcctctctcctctctctgtccatccactgtgccccttgggccacgccgacgcgctnnnnnnnnnnnnnnnnnnnnnnnnnnnnnnnnnnnnnnnnnnnnnnnnnnnnnnnnnnnnnactttgcgctcccggttgtcgcgccctgtgctcccgaccagcagccccaccgaccacctccttgcccctgcttctcttacgcccccgccccgggcgtgctcctcgcgcccttggcctctctgtccttgctcttttgtaaggggcgggcccggctcagtgacctgtgctgctctgta

SEQ ID NO: 2399 - DNA, 497 bp, Macaca Fascicularis
caaattgtgactgtaaacattgtactgtaaatgttttgtagttttcccccaataaaatttttgggaaaaaaaggtatttccatgtaagagctttatttttaaacaggaatgtctagctttctagcttcccagctaaccatgtctgccattccccaggtcttggcacggtcgggaaggacttggagctggcagagccaagagttccgaagaacctgcgtcctctcagccagtatatattttataagcaagttcttctagctgaaagaaaagtaattatttggatctcaagggcattagttagctgttccctttggtaatatgatgcatcccagagttggttggctgggtggctggtggcagggcctggccgggaggcctgaaggggtgtggtctgcctctgagtctccgggtggatcatgtggttgcggtagcagctgagggtttgattttttgctgggaaacagaactgcttgggtggggaaggggaggaggatctt

SEQ ID NO: 2400 - DNA, 710 bp, Macaca Fascicularis
  misc_feature (1)...(710): n = A,T,C or G
ggagtgaggatgnnnagcatgtggagaacaccaccaggaccacatggaattagggagagattgtccccctaagagaaacacaggacccctggagggcccaaccacctctccccttagaagtttttcagtcaggcacaatttcaaaagtcagctcagggtggaaagaaagtttgcaggacaggtatcccagaaacgtccacttaccacctacatatnnnnnnnnnnnnnnnnnntgtcataatcaagggcctnnnnnnnnnnnnnnnnnnnnnnnnnnnnntttctgatgctccaagcacaggactctcattaaaatccnnnnnnnnnnnnnnngatgccttgggattttccagctttcgtggattttcaggccagatgagaaacatttacaacatccagttgttcctagagaggttagcaaatgaaacaaagctggggatgactgctgattctcagttgtgaagctgtgtttggtactgaaatgctcctaaaactcacctgctccgaactacattgggttagggtcccctcctgtcacccatccctcaccactcccctagcactnnnnnnnnnnnnnnnnnnnnnnnnnnnnnnnnnnnnnnnnnnnnnnnnnnnnnnnnngagagaggctgtttttcctaatcatgatccctagtaatgactatcggcttnnnnnnnnnnnnnattgcttctcgagatttaagaattac

SEQ ID NO: 2401 - DNA, 906 bp, Macaca Fascicularis
  misc_feature (1)...(906): n = A,T,C or G
gactggggggatagggggatggggatgnnnnnnnnnnagtgcattacatttatcattagattcnnnnnaggagcatgcaacctagatcccttgcatgtgcggttcacaatatgattcgagctcctttgagaatctaatgccatggctaatctaacaggaagctgannnnnnnnnnnnnnnnnnnnnnnnnnccccccgccccccactttctgtgcaggccaatcatggcctggggttggggacccctgctctagtcagtaatgagataannnnnnnnnnnnnnnnnnnnnntcaacacattgcttcctttattaaagacatcttgttatttttaaaaagtcaactgagccagtatgattagtgatgtaattgattttcattctggcacaagcctctttcattctggacagctcacaaatagttaatgggccannnnnnnnnnnnnnnnnnnnnnngcaacatttataaatattgatattttataactgtttacatttcttctgtttatttttgaattttcagtttgatatcttgtccttattcattgttgtataaacaactgtactttaatttcaagtagtagtaaaattatttgacttcagtttgtggggattattatcagtttataattttataaaagtagtttaaagaataattgtaaattttacataaattacaacttccctgccatggtttattaaataataatatnnnnnnnnnnnnnnagacagnnnnnnnnnnnnnnnnnnnnnnaagaaaactacatcaacttgatcattctggctaaaaattaaaaagcacttttttatnnnnnnnnnnnnnntttatttcaaagcatttctaaatctattgttcttgaaagtatgtctggatgttctatcctttgacataggtcatctatgaacc

SEQ ID NO: 2402 - DNA, 762 bp, Macaca Fascicularis
  misc_feature (1)...(762): n = A,T,C or G
cagtcagtcgtgggtctgtnngggttattttgtgggactgatgattaatgcagggtggatgttggtgtccatttgccagaactacattgcttagcttgcttggaagctggtaaggggaaagagcaaaaagttagttacctgtggcagaattctaggtgttagtgattctgcctcttttaaagtgtctctgaacaattctaaatataacttttttcctttatagactgactttaagacggctgattcagaggtaaacacagatcaagatattgaaaagaatttggtaagtatttaaactgtcattgttgttatatgaagtcattatcaaacacaagatctagaggcatatcatctcagttggaaaaggtgcaggagtccccttcataaaatccctgacagatggtcagctaacttttccttgatcacttccagagatgggaagcttactacctcacaacgcaaccagttacgtttaaaaaaaaaatagctcttattggccaggcacannnnnnnnnnnnnnnnnnnnnnnnnnnnnnnnnnnnnnnnnnnnnnnnnnnnnnnnnnnnnnnnnnnnnnnnnnnnnnnnnnnnnnnnnnnnnnnnnnnnnnnnnnnnnnnnnnnnnnnnnnnnnnnnnnnnnnnnnnnnnnnnnnnnnnnnnnnnnnnnnnnnnnnnnnnnnnnnnnnnnnnnncacctgttcacctgagcccaggaggtcgaggctgtgtgagccatgattgtgtgattgtactgcagcctggg

SEQ ID NO: 2403 - DNA, 407 bp, Macaca Fascicularis
  misc_feature (1)...(407): n = A,T,C or G
aggannnnnagnnnnnagtgaactaggaagnnnnnnnnnnnnnnnncttaacccaccagggcctcccctgtccctgtcccagcagcattgtcttagaattttctttatgtgctaagctaccaccaaagaacctgtctaattacctggaaatttcctctcatcacacataaatacacatgactcctgccccaaattactcctttattaaaatagataaaagagcttaaactgacttgaatctgggacccctttcaggtttgctgagtactctgggatcctcacacacaccagagccttcccacaggagcccgactctgtcattccccccacagcttccgggactcgtttcttctgtcannnnnnnnnnnnnnnnnnnnnnnnnnnngcaatttaggcgtctccaggct

SEQ ID NO: 2404 - DNA, 746 bp, Macaca Fascicularis
  misc_feature (1)...(746): n = A,T,C or G
gactgacatnnnnnnnnnnnnnnnnnnnnnnntgnantataggaaagaaaatgatattttctaagtaagtttattcagaaaaatatatattaatttaattctgcaagaaaatgatttaacagatgggtaactttatttttttcatgcttatttgtgttttttgaaaatgaagaagttagagctttataactataatattaaagatcatatctaacctacagaaatctacctaattatgtgaaagaagcaaaactnnnnnnnnnnnngcccctctttcatgtattaaaataacactgagattttttaaaaagctggaagattgtacagcataaagctaaagtgaagacaaaaaacattgtcctgaagaataggttacaaaaaataaactccatttnnnnnnnnnnnnnnnnaatagatggtggaaactactttcccttaatttgtatatttctaannnnnnnnnnnnnnnnnnnnnnnnnnnnnnnnnnnnnnnnnnnnnnnnnnnntgtatttttttaaagagaacttttttagtttattaaattataacacgttcccttttgttttgtaaataaatgtgcccccaagttgttaatgttatattaaaagagagggtccttcaaaaaaattattttttaaaacacagaggtgttctgacctgcaacttgactggnnnnnnnnnnnnnnnnnnnnnnnctgctgtggccttnnncttggtgnnnnnnnnnnnnnnnnnnnnnattttt

SEQ ID NO: 2405 - DNA, 716 bp, Macaca Fascicularis
  misc_feature (1)...(716): n = A,T,C or G
ggtactgcctgacattactcaggatgcaagagatgctctgcattccttattaggaaaaattggcctgtaaggagaatggtatactgtgtattactactgtgagactgtaaaattgttaatgaacagtgtaaagaattatattcattttattagcaaaaaaaatattgcatgcaagaactactgccctgaaacatccgtcactccaataaactgttgtgcctgatctaacataaagttatatttcattgctcattttttatttgcctcactaaaatgaataacttaagggaatgtgcatttctacaagacattaattggataaactcattagaagaaaatgtttcgattgcattcaagaacaaagaagcataacctttgttgattctagtaatttactatatgcttcatttaaacccattttgtaaagaaatcagggcaaagagcaaagagtgaagggggaaagatgggtaaggtaatattaccaagaatgatagcatatttggccttgtttattatgcaaaccaaatgtattattttgttaatacagtcatttaatctgatataattagaaacagctgagagagtaaaaaagcattctgaatgtcctatgtatggcatatcctgtacactgattgaaggtcagagctttggtatttttgtataattctatcctatctggtgcatcagctgtgtattttacgtcnnnggtaaatgag

SEQ ID NO: 2406 - DNA, 749 bp, Macaca Fascicularis
  misc_feature (1)...(749): n = A,T,C or G
catcatgatcagtgtggtacannttttaaaataactatcatgcccnntcatgccattatttgtctttatttctatgatttgtannnnngatatgtgatgtgttataacacagggtgtgcacttgagcctggttttgctgttttaattaggcagagttgttgatgtgctgtaactgtaatgcagcgagactggttctacagccatgcggtgtgacctcgttccccatccaagctgttgtatatgaaggtacctacccagtttgtgcccagaatgagggaacgcatttgaaagcgaaacgtaaagccagtgcatgaatattatagtgattgagattttcccaggcttcactgatacagttgttttgcatttattcacaataatacagcagattcttacatgccgatatttaattgtcttaaattttgctgctgttctcataactaaggacttgaaaaatatttgagtctgtcaagtatgtaaagtttgtgtataaacttttaaatgtcattcttaagttcattgccatagccattttccatttatgtcttcattttctaaaaatcaaatgccatgtctggtacctttaaatccataagcattcagttttctcatttccaatttcatctttggttaacagaataagtaaaacagggttttatttatttgtagtctagaaatgttgaatattgttttatttccttcaaaatgttatgattagtgcagatcagccatgtttatcttttaaaaaa

SEQ ID NO: 2407 - DNA, 607 bp, Macaca Fascicularis
gtaggcgacactgttcgtgttgtcaacatgaccaacaagtgtctcctccaaattgctctcctgttgtgcttctccactacggctctttccatgagctacaacttgcttggattcctacaaagaagcagcagttttcagtgtcagaagctcctgtggcaattgaatggaaggcttgaatattgcctcaaggacaggatgaactttgacatccctgaggaaattaagcagccgcagcagttccagaaggaggacgctgcattgaccatctatgagatgctccagaacatctacgctattttcagacaagatttatctagcactggctggaatgagactattgtggagaacctccttgctaatgtctatcatcagatagaccatctgaagacaatcctagaagaaaaactggagaaagaagatttcaccaggggaaaattcgtgagcagtttgcacctgaaaagatactatggaaggattctgcattacctgaaggccaaggagtacagtcactgtgcctggaccatagtcagagtggaaatcctcaggaactttttcttcattaacaaacttacaggttacctccgaaactgaagatctcctagcctgt

SEQ ID NO: 2408 - DNA, 716 bp, Macaca Fascicularis
  misc_feature (1)...(716): n = A,T,C or G
aaggctgggcnnnnnataaacgtgatggtgaaggaggtgtggggcacgaacgcgctggtggagtggcaggcccccaaagatgatgggaacagtgagatcacggggtatttcgtccagaaagcagacaaaaagaccatggagtggttcaacnnnnnnnnnnnnnnnnnnnnnnnnnnnnnnnnnnnnnnnnnnnnnnnnnnnnnnnnnnnnnnntatttcnnnnnnnnnnnnnnnnnnnnnnnnnnnnnnnnnnnnnnnnnnnnnnnnnnnnnnaatacggcccgcatcctcaagacaggaatcaccttaaaaccgttcgagtatannnnnnnnnnnnnnnnnnnnnnnnnnnnnnnnnnnnnnnctctcatagaccgggtggtcgtnnnnnnnnnnnnnnnnnnnnnnnnnnnnnnnnnnnnnnnnnnnnnnnnnnnnnaggtggtctggatgaagaacaagatggaaatccgtgaagatcccaagttcctgatgaacaattaccagggggtcnnnnnnnnnnnnnnnnnnngcccctcgcccttcgacgctgggacttacaccnnnnnnnnnnnnnnnnnnnnnnnnnnnnnnnnnnnnnagtgcaagctggaggtccgagtgccgcagtgagacctatccccnnnnnnnnnnnnnnnnnnnnnnnnnnnnnnnnnnnncaatccccagcctcgcgggactgtnnctttctggag

SEQ ID NO: 2409 - DNA, 729 bp, Macaca Fascicularis
  misc_feature (1)...(729): n = A,T,C or G
tgtaaaagcacagnnnnnngcactgcacttagacataaagcaaatctattaggaaaaaaaagcatttttctaaatgctcaaatgttatcaaaatactatatttatagaagtaatcttctctgttaacagccaggatttgctgttagaaataactcttgtgagttttatattgtgctttttggaggttctaatcatttcagcagtagtgtcttttaaacagcagtattactataagcagtatgcttcaaaatgtgaattaacttgttgaaattgtggctttaacatccatgtgactcgtgtatatggtatttgctctccattagcaaaataattcattgttaggtaaacttcactagtgcaaattgcagttctgtgagcaatgtttcctattggatataaactactggctaaaatatacatatcagcagcccagcctttatcaggaaattacacttggcaagttgctgaaaatgcacaaagttatgaaannnnnnnnnnnnnnnnaaataactagccattattctgtgtattattaaatatttactagttctgttaaaagcagagcagaagttagacactaagatctctttgtgaactctgtgttctctatattagattgctgtttatatgtaagattttannnnnnnnnnnnnnnnnnnnnnttataatgataaactttatagaagtacagtattaaagtcagtggtacacagacattctgtacatatc

SEQ ID NO: 2410 - DNA, 728 bp, Macaca Fascicularis
  misc_feature (1)...(728): n = A,T,C or G
gctgtctgtatattttacttggnnnnnnnnnnnnnnnnnnnnnnnnnnctgtcaaataagctcagtaatatgttaccatgggataaaaatatgtatccctgcctaagaataacttgtgcatttgttatggaaatttaattcatatggtgtttacagtactacttttgtaacttccagactttctaaaacattctgcttaaaaaccatataaaatataattccaaagtctctgctgtcaagatagattcgagagaaagcaagtggccatgtatgctttaacctcaaactgcgtacacannnnnnnnnnnnnaggctgcatttagatcaccatgtgctcaggccaggtgttaatcctgaggtccatggaggtgcagagatgagattactcctannnnnnnnnnnnnnntttgctttgttaacaaaaaattgcagctattgtctagctttcatttttttactgagaactttaaattagtcccctattagaatagggttgctactcagtctttttttaaaaaccgaatttcatcatttatctaaacagaaaatatgcaaaataactggtcttgttaagagtgcaatattatatttttatgtacaaataaaaattaatttggggggattatttattcagcatgaaacctaatatgtatatgtttgaaatacttcataatgtgcatgttgtagcaaacatttctgtaaattatcacaagctctgttacctttat

SEQ ID NO: 2411 - DNA, 757 bp, Macaca Fascicularis
  misc_feature (1)...(757): n = A,T,C or G
tgtacagagacgtgatgctggagaactacagccannncatctcagtgggatattgcattactaaacccaaggtgatctccaggttggagcaaggagaagagccatggtccttggaagatgaattcctgaaccagaagcaccaaggatattttaaagttgatcacatcaaagggatctgggaaaaacaagaaaaacctctgtggcaagaaatattcatcagtgatgctgacaaaacattaagtaaagaacgagagaaagttttagaaaaaccatctaatctggaaatagctccagagttttcagaaaaactaccctgtaaatgtgactcacatagaattaatttgccaattgcttctgaattaattataagtgaaagaaaatattcaagaaagaaggctgaatacatgaatgtgtgtgagaaattgcagcttgatattaatcatgagaaagctcatcctggacagaaatcttatgaacatggtaaaaatgcgaaagcttataagaaagatcagcattggaaatttcaaactttggaggaatcttttgaatgtgatggatctggacaatgtttacatgataagacaatttgtattacacctgagagttttccaacagtagaaaagtcctgtaaggatgatgaatttagaaaaaactttgataaaaccactttatttaacgacatgagaactgacacaagggggaaatgctctgatcttaatgaatatgggacatcctgtgacaaaaccaccactgttga

SEQ ID NO: 2412 - DNA, 690 bp, Macaca Fascicularis
  misc_feature (1)...(690): n = A,T,C or G
caaccactnnnnnnnnnnnntcactattnnnannnnnnnnnnnnnnncctttgaaaagaaacggacttaaagtatctctattttggcaaaattcggnnnnnnnnnnnngatggtatgtgtttctgctgccttatttaatctaccacttctctgtgaaacactctaccttgtttttnnnnnnnnnnnnnnnnnntcaaggtttagccagtagaaggtagagttaaatttgtcaattcagaagaaactgtgctggtcagtcacatcttaaggcgaagggagagggaccttaggggaacagagaagacaggcaaagctgtggactgtttgatcttgtattacccacaggaatgagagcagctaaacccatagaaggaattggaccaaggtgaattatgagtcctggccccagcagtatgtgtgctgactcctgggtgccccagaaatagagctctcccatggagnnnnnnnnnnnnnnntgagtttcagtttgcattgcagctaggattgaaaggaatcagtcatgagcaggcaggcagaaggtcctgttagccctgccttccaggaaggtcggggtgggagttttgagtgggaaagagatgacatgcacgaagagagttcccctgagcctgtttgccagggacagtgagtgagtgctcttgggcactgctcaggccctgcttctgctgactg

SEQ ID NO: 2413 - DNA, 773 bp, Macaca Fascicularis
  misc_feature (1)...(773): n = A,T,C or G
gannnnnnnnnnnnnnnnnnnnnnnnnnnnnnnnnnnnnnnnnnnnncacaaagtttaaagatgagaannnnnnnnnnnnnnnngataatgaccaagcaatcaagattttacaagatgnnnnnnnnnnnnnnnnnnnnnnnnnnnnnnnnnnnnnnnnnaagttacaacacaaagaattggagtcacaggaacagataacttacatacgacaagaatnnnnnnnnnnnnnnnnnnnnnnnnnnnnnnnnnnnnnnnnacaagaacttgaagacaccatttcctccctaaaatcacaggttaattttctgcaaaagnnnnnnnccatcctnnnnnnnnnnnnnactacataccaaggcagaaggtaactgcacaagagaatgcaatggatacaatttnnnnnnnnnnnnnnnnnnnnnnnnnnnnnnnnnnnnnnnnnnnnnnnnnnnnnnntgtgagatcagtggcatttttaaaatccttaaatgtaattaagatcataaaaacatgcatcattcatatgctagtggggtggttnnnnnnnnnnnnnnnnnnnnnatctttttaacattcctttatttctgattttcatgtttgtgtgcatttgagtatgtgctgagannnnnnnnnnnnnnnnnnnnnnnnnnnnnnnnnnnnnnnnnnnnnnnaatccttttgcgtagaattttaccnnnnnnnnnnnnnnnnnnnnnnnnntatagtatcatatcaaaaattctgacctgtttacattgttttcatgttcatgttcata

SEQ ID NO: 2414 - DNA, 758 bp, Macaca Fascicularis
aaagtgtgcactttcctcttcacgctctctgtctctcctaccaccatgtaagatgtgcctgcttcccctttgccttcttctatgattttaagtttcctgaggcctcccagccatgtggaagtgtgagtcaattgaaccactttaatttacaaattacctagtctcaggtagtatctttatggcagtgagaagtgactaacacatgtgtcattattgagttgttagttctttaggctctgactgccatatgactgttttagcacatgggtgttgaatattgacctcacaagtgcgggagagtgcaggaagtccacactacttctgctggaaggcccatgtggcctggcctcttgccttgtctctccactgcctctgtgccccagccacagtgagctgcttacatgttttcaaatgggttgtgttcctttccctcccagcgggtttgtccacactgctccctttgcttagaatgttttctccaaggctctctagaacctgtttttgcctgatttacaccagaaaaccttagcccccagcccagaaccattctttctcatggaagctcttccagatccttcaagctatactgggttcttctaaattgctgtgatcttgcagttttcctttttagcttattatctgtgataatgtggatgtgggtatctctgtcttccttagattgtaagctctttgagggcagggactgcatctgttttgttattgatgattgtatcgatagtgcctagcaaatgtaggca

SEQ ID NO: 2415 - DNA, 708 bp, Macaca Fascicularis
  misc_feature (1)...(708): n = A,T,C or G
cgcagccccagcgaggctcccgacctcacccagacgaggccgggagccccgccgccctcccnnnnnnnnnnnaccctcagaccccgttctgtctgttcgtccttccttgaccagtctgtaaaccttcactgtttggggatcgtcctgtccattcatgtaaatgtaaaatgttggccgagtcggtannnattctnatttttattttattctattttattttctccaagggatgagggtggggggtgtnnnnnnnnnnnnnnngatcaggcctgggcagctgtaggggcgggggcccagacagccaggccgccaccacagcagccccatggggtgtcccagacgcgggcctccaagaagccaagtcccagtctgttttcnnnnnnnnnnnnnnnnnnnnnnnnnnnnncagacagactctcaagcctgcccggggagtcgtgtccgtcagctgcagggcactgtgtnnnnnnnnnnnnnnnnnnncctttgaggacgcagatcaggagaaagacgactttcctctgttcggaacactcgcatggaagggctggccgcctccctgagccggctgggagcgggcgacgggacctacctccccggagcaggggcctggggcttccccccaaagctgccgcggaaccccgctaacgcgaccaccctccctccgtcggtgtgtcctgctttccagctgaacccaaactacaagtg

SEQ ID NO: 2416 - DNA, 675 bp, Macaca Fascicularis
  misc_feature (1)...(675): n = A,T,C or G
atacatacacatngngtgcatgtaagagttgggtttccttttnnnacnnnntgagatgtactaacttctgccaaacccttaaatgattttgttatgttttacatttttgaggccaaccttattttgtaactgaaagaaagtccagttttgcatacacagaaatttggtcattttagaagcctcataacctgaatagtttgataataattgaatatgctattaacagcttttaaaaataaggttctattagtcagttttttccttgtctgtcatattatgttggttaatgtctcttatggccaatcttgggagacagacctaacactcactgcatccttttgtgccttactttttactttccttttgcctttttggtatgtgcacatgtaagatggtaagtttaaggctaatgaatatatgtttgtaatttcctactcactactctgcagttaaagctaaggccttaggcaaaatctagaaatgtttatattgttttgttttttatcaagtggtgtcaacttgagaaatacaaagaaaagctatgcttaactgtataattgtgggggnnnnnnnnnnnnnnnnnnnnnnnnnnnnnnnnnnnnnctaacctgttttaccaaaaggaaaagatgtttccaaaaatgttttcggtgtagactgtttaaagataaaaat

SEQ ID NO: 2417 - DNA, 605 bp, Macaca Fascicularis
aaataaaaagaacaaccaaaaaaagctcagcaaagaaaacttaaaagcccaaagagaatccggccgccaagcagtgtccagagctggaccccacgctgggggcgccctctccacatcggtggctgggcagacagcccccttcactcagaggtgggccccaagcccccaagggccaaaggaagaatgaacttgaactgaaccaactccagcagccttgggccaggggtcacgggcagcggccgtggggacagcggcctctgacgtgcggggcctctgtcacgttaccccatcggggtacggtgagtcctgaaggggggcagggggctcaggcggtagagctggccccaggctgggcagcagaggccatcggcaggcgagggcaatggtgagagccagcagcgcggggactcctcagcagcaggcacggcgagcctgggtacagcagtgctcagggctgggccccgtggcccactccatgaaccccaggtgggtccgcagcacacagcatccgcgccgcaggcgtcctgccgcctccatacgcgccagccgggcggtgcccacggtgctgggcccgggtcggggcgccgcccctccgccgcggagcc

SEQ ID NO: 2418 - DNA, 2215 bp, Macaca Fascicularis
  misc_feature (1)...(2215): n = A,T,C or G
ttcaagctgagttgtggaatttgtgttatcattaatctccagagtttggaagcccctcaaactctgtgcagagaccctaggatgtggtgaaccaggtcttggaaggagagcttgttggggtgcctcctctggcaatggaaactgcgtatcaactcatgaccaaaaagcaaatgatatattactgtaatagagcctggccccagtattccctaggagatcagaagagatggtctgaacgtgggtcacttactacaattctccaattggacttactttgcaagaaatacggtaaatgggaagaaagaccctatatgcaatgttttatggccctctatcaaaaccctgccctgcagatgaaatgcagaatatgtaaataggccaagggaactatattgccaattctagaagcctctggagaggaagcaccagtcgtgtgggggcctgtagggaagggaacaagaagagtccctttatttccctctccaagagaagtgaggccctctaactctactcggggcctggtaccttgaccaatacaggggcatagtccaccttcttccttgggaatggtgctctcagcacctccaggggaaagcaagggcccgttatgtacttgccgggccctccaaactctgcagagccagcaatggctcctgctatggcaatagcaggcccccgcccccgcccccgctgtactcttctttgccagggagcaccactcatagtgggaatgcatataaccctggagggtgactgttcccactcaagagcgtgcctgttggagaaagaggttttgctcgggtctgtgttttttaaaacttttgacttgtataactggaaatcccatagtaagggcttacgggtgagcccacaagagttcataactcgcatatggagaatattctccacacataaccctacctggccaggtgtgcagaccttaacagcaaccctgctcacagcagaagataaatctgccaccatggccaaaactgaggaggaggcagacaatatgtgtgctgataacctggtgacctgtcctgttgaggtgttggtcccaatagctaacccaaactgggaccccaatgatgacaagaatcaagagtggcttcatcattataggaatatgcttctcagaggtatgagggaagcaagccagcccctggtcaattggggaaatctcagagaaacagaacaaggccctaatgaaaatcagcattcctaaattgataataagaatgcctccagaattacagcccttgggacccaaatgacccaaaagccgagtagtactttaatcccacttcatctctcagccccagatattcagagaaaactctaaaaattggcaataagtccacacactccccctttccaactggtagacatctcctttaaggtctacagtaaagagatgtggcatctgatgaaaaagaggacaagaagatgcagcagccctacagactacttcaggaaaaccaggaagaagatggcatgagtgagtgaccagggcccccgccatggaaatcagggcctgcctacactgaggcccaaacaatgtgcttactggaagcagaaaggatgctgggaaagggaatgtccaaatcatctccagagagggaagaaagaggacaagcctgagctaccagttccctgtaactggacaagaaactgatggatggggccatggggctccctgcctggctcctcaaaacaagatccacatctcccctccaggttacacagaataaggggggcagccagttgggttgttaaattttttttatttttttgagacagggtctgttacccaggctggagtgcagcaccgtgatcatggcatactgcagcctccaactaggctcaagcagtcctcctaccttagcctctcaagtagctgggactaaggnnnnnnnnnnnnnnnnnnnnnnnnnnnnnnnnnnnnnnnnnnnnnnnnnnnnnnnnnnnnnnnnnnnnnnnnnnnnnnnnnnnnnnnnnnnnnnnnnnnnnnnnnnnnnnnnnnnnnnnnnnnnnnnnnnnnnnnnnnnnnggccaccagctaagtttttgatcaacactgtagccatgttttctgtgttgatcactaaaagtggaccctatccaggagggaatgtatataagggatgtgtctcataaaggaaataaaagattcttggagcctctggtccatgaaaaaaaaaaaaaaaaaaaaaaa

SEQ ID NO: 2419 - DNA, 806 bp, Macaca Fascicularis
  misc_feature (1)...(806): n = A,T,C or G
agggcagaaacgatggncncnaagtannnnnntgctgtctcactgcagagaggggccagagtgatgtaggactcnnnnacctccatctgttaaagtnnnnnnnnnnnnnnnnnnnnnnnnnctgctcggaggcgtcggtggagctgtccagcagcacgctcacgcagggcgagttccgcacgtcctccaggatctccctnnncaggnnnnncgagatgtactcgatgaactgagtgcatgctgtgcgattgcggtacttgcctaatatcatggtcccggtgctttggaggagctgcaggatcttctcaaagtcattcaggggccttgagtggtatgcgatggagtagnnnnnnnnnnnnnnnnnnnnnnnnttggccatgaggtcgctggagatctctggaatgagggcagtgtgaggagtgtcttccttgatttcaaccgtgttcacacacagcctgtgggctttgctgacttcatggtattttaaagtctccactttaaaaggccccgtataacctctgactaaccgagatgatttgtcgtggagattaggtctttctttgcaggctgagcagaagagtttggtctctttggggtcaatgactaaccatgggaactgcccaaaccatgacctctgaatggaacggggcctatatgtcctcttgattctcctaggtccatctccttctccttcacaaatgctgggannnnnnnnnnnnncacgggcctccacgggagaggctggaagcaacgcagagtctgcacccaaggcctgtgtgtctgtctctctcactgccaccatcttc

SEQ ID NO: 2420 - DNA, 766 bp, Macaca Fascicularis
  misc_feature (1)...(766): n = A,T,C or G
atttgtagcaacacatnannnnccatttaaaaacannnnnnnnnnnnnnncaaactttcccntagnnnncagtttttcaagtgtccaggtttccacagagctccctcattctttgtctatttcattgtttctagactcctttaccagtctgctcacagttttctggaggaactnnnnnnnnnnnnnnnnnnttttagaatcttgtgctagaatgactcataatcctttannnnnnnnnnnnnnnnnnnnnnnnnnnnnnnnnnnnnnnnnnnnnnnnnnnnnnnntggacgcctatgaccattagtgattccaatgtccttagattgnnnnnnnnnnnnnnncactgcttttaaagcttttgattaaccaaaacttctaactcttcnnnnnnnnnnnnnnnnnnnnnnnnnntctccaccatacttggtatgtgcaatttatttttaaaatttacatataggcctttacacttacttaaattttaccttgttttaccttgtcagttggagcccaacatgtgagnnnnnnnnnnnnnnnnnnnnnnnnnnnnttttgtttcctatgatatcagtatgtctcttttcacatctgataaaaattctttgtatgttttaatccaagtcactaataaaaannnnnnnnnnnnnagaacttnnnnnnnnnnnnnnnnnnnnnnnnnnnngagtatgtgttcaggcagcttcaattttcctaatgacccactgtataacattattcataatgttgaagatttagtaaacagtc

SEQ ID NO: 2421 - DNA, 688 bp, Macaca Fascicularis
  misc_feature (1)...(688): n = A,T,C or G
ctgccaggtgtgggccagcagnnnnnnnnnnnnnnnnnnnnnnnnnnnnnnnnnnnnnnnnnnnnnnnnnnnnnnnnnnnnnnnnnnnnnnnnnnnnnnnnnnnnnnnnnnnnnnnnnnnnnnnnnnnnnnnnnnnnnnnnnnnnnnnnnnnnnnnnnnnnnnntactggtccccttctggnnnnnnnnnnnnnnnnnnnnnnnnnnnnnnnnccgtcggcatgtgcagcggctacctgagctgacccctgctgagcgtgatgatctagcctccatnnnnnnnnnnnnnnnnnnnnnnnnnnnnnncctctttnnnnnnnnnnnnnnnnnnnnnnnnnnnnnnnnnnnggctcccacaggatccgaggctggggccaactgggacnnnnnnnnnnnnnnnnnnnnnnnnnnnnnnnnnnnnnnnnnnnnnnnnnnnnnnnnnnnnnnnnnnnnnnnnnnnnnnnnnnnnnnnnnnnnnnnnnnnnnnnnnnnnnnnnnnnnnnnnnnnnnnannnnnnnnnnnnnnnctnnnnnnnnnnnnnnnnnnnnnnnnaaggacagggagacannnnnnnnnnnnnnnnnnnnnnnnnnnnnnnnnnnnnnnnnnnnnnnntttttttttttcccnnnnnnnnnnnnnnnnnnnncagaaagggcctgaatcctggcnnnnnnnnnnnnnnnt

SEQ ID NO: 2422 - DNA, 677 bp, Macaca Fascicularis
  misc_feature (1)...(677): n = A,T,C or G
ggtgctggtcaaggacaatggcgagnnnccgcgctcggcnanngccacgctgcacgtgctnnnggtggacggcttctcccagccctacctgccgctcccggaggcggtcccggtccaggaccaggacgactcgctcaccgtctacctggtggtggcgttggcctcggtgtcgtcgctcttcctcttgtcggtgctcctgttcgtggcggtgcggctgtgcaggaggagcagggcggcctcggtgggtcgctgctcggtgcccgagggcccctttccaggacatctggtggacgtgagccacactgggaccctttcccagagctaccagtatgaggtgtgtctgactggaggctccaggacaaatgagttcaagtttctgaagccaattatccccaacctgctaccccagagcacaggtagggaagttgaagaaaatcgcccatttcagaataatttgggtttctgataaaaaatgaaaataaatccgcgtctgtgaatacatttttgattaggaatttattgtgaggtgcctgtaaaggaatgtctttagatcatttcaaatatgtactcttgaagacaagaaataaatatctatacatagaataggatcctgatttagtaccaagaacccttcataaagcatcaaatgtatatgtgtaacgttttatgtcaaacaa

SEQ ID NO: 2423 - DNA, 768 bp, Macaca Fascicularis
  misc_feature (1)...(768): n = A,T,C or G
cttattcccttcnnntcagcccctgccattgtaggtctttcttttnnggccatctgctcctggatctnnnngaaatgggcttnnnaagggctgccggggcagccccatcacagtattgctcacccagtgccctctcccctcagcctctcccctgcctgcactggtgacatcaggtttttcccggacttagaaaaccagctcagcactccctgctcccagcctgtgtgttgagctctgctattgggccagcaagcggggacgtccctgggagggacatgcttagcagtccccttccctccaagaaggatttggtccgtcataacccaaggtaccatcctaggctgacacctaactcttctttcatttcttctacaactcatacactcgtatgatactttgacactgttcttagctcaatgagcatgtttagactttaacataagctatttttctaactacaaaggtttaaatgaacaagagaagcattctcattggaaatttagcattgtagtgctttgagagagaaaggactcctgaaaaaaaaccctgagatttattaaagaaaaaaatgtattttatgttatatataaatatattattacttgtaaatataaagacgttttataagcatcattatttatgtattgtgcaatgtgtataaaccagaaaaataaagaaaagatgcactttgctttaatataaatgcaaataacaaatgccaaattaaaaaagataaacncgaaaatgggtgtttttttgtatgggtgt

SEQ ID NO: 2424 - DNA, 705 bp, Macaca Fascicularis
  misc_feature (1)...(705): n = A,T,C or G
ctgatggtagcccccggcccccgccctgnnnnnnnnnnnnnnnnagtagcttctcttgtcctagccccttctcatttcaaaaataatatgtcttttgttttcctttttctttccgttgttgttttacagcttttgtagaaaccaacccaagtagatgccggtgggtgttagataaaaacacacatccccagggcacaagccatccagcggtgaggaatctctgccatgctctcttccctactgtccacaaatgttacagagactcccttagcctccccctcctctcccccactgaggggcggcttnnnnnnnnnnnnnnnnnnnnnnnnnnnnnnnagaccccctgcatctatgcaaatctagcaatagctctcaccnnnnnnnnnnnnnnnnnnnnnnnnnngatgacctaccaatgacatacagtaagggacataacctcacagcctttttagaagcattttgaatatctacagttgcctcaattcactgggcatttcactcctctgaaccaggttagaattttgctatatctgtagcatcctgagtagcacactaattttaactacattagttgaatgtagttgatacatctgtggcctcgtcgtgtctgtaaagaccacactagattgtactcagcagtgttaggatatgacatgctaattagatgtatttattcccaggaaagtgtatgataaatgactg

SEQ ID NO: 2425 - DNA, 710 bp, Macaca Fascicularis
  misc_feature (1)...(710): n = A,T,C or G
ataaaaagaaaccaaaccccaacttccaaatgggtnnnntggtgcaggggcgtgagtggccatgcactgggtgtgctgcctgtctgagcaagctcccctagctgcgggacccctgggcccctgctgcgggctcggccgtggtgtcatgcctgctgcacccccgtttccactgacgtgccgtctgtgactattggggggtggtcacnnnnnnnnnnnnnnnnnnnnnnnnnnnnnnnnagggatgcagcaggctggccgcgcaccaggatcaggcaccctggccccnnnnnnnnnnnnnnnnnnnnncttgccatgtccacgctgttggtcaaacccctctgtcatgcctctttaaagagaaaagagaaaggttttgttttgttttgttttttaatggcagaacgaagtggagatcttgtagcctagataggatagtctgacctagcgtnnnnnnnnnnnnnnnnnnnnnnnnnnnnnnnnnnnnnnnnnnnnnnnnntgggggcttgggtgacagatagcacataggctgtttctggggttgcaggagcttccttgagctggatgttgtgggtgttgcagnnnnnnnngaagtgtggcgaccagaaagcgtagacccggggcccagggcctgcctgcccctgcagcctggcctccccgcacaggccgtggcttgcgctccagccgctctagtctctcaggaatttgcttg

SEQ ID NO: 2426 - DNA, 950 bp, Macaca Fascicularis
tactggaaaggcgcctctgccgccacagaccttgcagttaactccgccctgacccaggcttctcaatgcagtccctgatgcaggctcccgtcctgatcgccctgggcttgcttttcgcggcccctgcgcaagcccacctgaaaaagcttggtagcttctcctgggataactgtgatgaaggaaaggaccctgcggtgatcagaagcctgactctggagcctgaccccatcctcattcctgggaacgtgactgtcagtgtcgtgggcagcaccagtgttcctctgagttctcctctgaaggtggagttagttctggagaaggaagtggctggcctctggatcaagatcccatgcacagactacattggcagctgtacctttgaagactcctgtgatgtacttgacatgttaattcctactggggagggctgcccagagcccctgcgtacctatgggcttccttgccactgtcccttcaaagaaggaacctactcactgcccaagagcgaattcgttgtgcctcacctggagctgcccagttggctcaccactgggaactaccgcatagagagcatcctgagcaaccgtgggaagcgtctgggctgcatcaagatcgctgcctctctaaagggcgtataacgtggcatctgccacagcagaatggagcagtgtgaggaaggtcacttttcctctgttttgtgtttgccaaggccaaactccccctctctgcccccctttaatcctctttctacaatgagtccgctacgctcactgaaaatcattttgtgccacttacattttaggctcggacaagcagccctgacctaagggaggatgagttgggcagttcttgatagcccggggcatctgctgggctgaccacgttactcatcccggttaacattcgctctttctctctaaagagcctcgttcatttccaaagcagttaag

SEQ ID NO: 2427 - DNA, 699 bp, Macaca Fascicularis
  misc_feature (1)...(699): n = A,T,C or G
cacagcattgttttgtcaatcannnnnnnnnnnnnnnnnnnnnnntgcatagactatgtctgtgcaaagtgcccgggnnnnnnnnnnnnnnnnnnnnnnnatggttggaaatgaaaattcataattaatagtaaaatctaaggcaaactaaggctgctgggttgnnnnnnnnnnnnnnnnnntggtactggcnnnnnnnnnnnnnagatgaacctaaatgagatnnnnnnnnnnnnnnnnnnnnnnnnnnnnnnnnntactttcctggaatctaatgcaacaaacttatcacacacaccacattcacatcccactgttacttcaaaattaatcaggtttaaattttagatnnnnnnnnnnnnnnnnnnnnnnnatttagaaattgtacaaaagaccatagannnnnnnnnnnnnnnnnnnnnnttttacagttcctacgttagcctctcaaggccacaagttgccgccacgnnnnnnnnnnnnnnnnnnnnnnnnnnnnnnnnnnnnnnnnnnnnnnnnnnnnnnnnnnnnnnnnnnnnnnnnnnnnnncagaccagactgttcatgcagcaaggtnnnnnnnnnnnnnnnnnnnnnnnnnnnnnnnnnnnnnnnnnnnnnnnnnnnnnnnnnnnnnnnnnnnnnnnnnnnnnnnnnnnnnnnnnnnnnnnnnnnncggcacacatcctagcattctaa

SEQ ID NO: 2428 - DNA, 730 bp, Macaca Fascicularis
  misc_feature (1)...(730): n = A,T,C or G
aacagtaaccntnnnnngaaaannnnnnnnnnnnnnnnnnnnnnnnnnnnnnagagcactggagtccaaggggtgaggccgnnnnngagacaggnnnntgagttgagtctgggagaggctccctccctggagtgttgcttttcttgtttcacccctgcctctggagatgggtggaggannnnnnnnnnnnnnnnnnnnnnnntaggttggcgaggagttgctgaggcactgccggnnnnnnnnnnnnngagaggaatgtataacattttaagaggctgagagcacccctggctgggctcatgcccatggcagcttccttctgcagatcatgggagaaatcaagcactttcacctaatggctagatgattgatttggggatgaaattctccactcctctcctttaccacatcaccactatccttcctgcaatccatccacgagactcactgagtggaaaagggataggaatgaatgttcacccagggccggctacatgcnnnnnnnnnnnnnnnnnnnnnnnnnnntgccacctcttaggttcctcacattaatcttacagagtaggtacaggcatacctatggatattgnnnnnnnnnncccagaccacagcaataaagcaagtcacatgaactttttctttccttagtgtatataaaattacatttccactatattagtttattaagtgtgcaatagtgttctgtatttaaaaagcatgtacatacctt

SEQ ID NO: 2429 - DNA, 718 bp, Macaca Fascicularis
  misc_feature (1)...(718): n = A,T,C or G
gagatggactgtnnnnacacagcagtagatgattgctaagtgaggaaactgagacttagagaggttgaagaccaacaagctaataaataaaaagttgaggctgggcacggtggctcacgcctgtaatcccagcactttggaaggccaaggcaggtggatcacgaggtcaggagatcgagaccatcctggctaacacggtgaaaccccgtctctacaaaaaatattagccgggtgtggtagcacgcgcctgtagtcccagctacttgggaggctgaagcaggagaatcgcttgaacctgggaggtggaggttgcagtgagccaagattgtgacattgcactgggcaacagagcaaaactccatctcacaaaaaagagagagagagagaaaacagctctctctgtctctagggagagggaggggacttccgagaggaaaaggcctgcaaagagcctttgggttgactgagaaagcacagccaggccaatgcttgggaagaaaggcaggcaagcactggagacaggagatactagggtgaagagagagccttgcctttcacagcacagtgagcatgacattgcaccagggacagaggttgtgttatatgacaaggctgggggctccttctttcctagacaatcaaagcatcggtgatgggttttggttggtgattttgaaaaaaaaaaaaaagtatgttatactaatatatactgtactga

SEQ ID NO: 2430 - DNA, 745 bp, Macaca Fascicularis
  misc_feature (1)...(745): n = A,T,C or G
gaatatgatccatgaaacaaatgaacatactcttcccaaatgtagagacacaatgcgggacaacctcagccaagttctccagagattgcaagcannnnnnnattcagtctgtagactccaacagagggaacaggaacgaannnnnnnnnnnnnnnnnnnnnnnnnnnctagtgagaaacagcatacgctccagtgggacgacttcatgaagcagcaacccaacaaaagggctgaagtggatgaagagcacagaaaagccatggggaggcttaaagcacaatatgctgagatggagaaggacctnnnnnnnnnnncaactttttaagaacttgaaccacaacaatcacaaactaatgtgaatatattcacctatctcctgaaaaatattcccaccaaaccatttagcctctgcttcaagcttagcaatatattcagtagcactcttgtatcagaagaaggaagcttcnnnnnnnnnnntgattggacgtttaaagnnnnnnnnnnnnnnnttccagctttaagtgcctatatgattatttgaatgaagagaagtaggaaggacaatggaataaatgtactctttgttagtcagaattgatcatctttnnnnnnnnnnnnnnnnnnnnnnnnnnngtatagacttcttaaaaagatcatttaattcatttctatatagggttaacaattgtttattgttgtggcttaatgggcaggtatagaagctagctgtcacagcctccttggc

SEQ ID NO: 2431 - DNA, 766 bp, Macaca Fascicularis
  misc_feature (1)...(766): n = A,T,C or G
ttatggagaaaaatgtcagaagttaggataatgaaaattatgcatagttttacataaattgttaaggaaatactgtcaacatcattttatctgnnnnnnnnnnnnnnnnnnnnnnnnntcgtgctagaaatcaaaggaacatttttgtgacgagaaagatataaatcattcactagaaaataatctatttgggattatttggggagaaaaagtccatcaacagaatatgtcttcctagtatttcaccatgatcatcccaaccccataatgattagatgaaaatatcacttatcacccagaacaggcagcagagannnnnnnnnnnnnnnnnnnncatcaaaaaaatgaaagatcaaaaaaaggacaggttctactccctaaagaaacaaagagacaggactacatttgaacannnnnnnnnnnnnnnnnnnncaatagccaataaaggttgataggtaaaagagagattctgattttggaattcaagtgcataaaaatgatgtaaaatccttaaacaaggaaaagacacaccactatttcaatggtaggcgttttcagaactgcctcagtaatcagaatgaaaatataaggataatccaaaaccagttccacaatccaccggaattctaacagcccttgtgactttatttacctctatctgggaggcattagctcacatcacacaacacagtggctgcttttctggtgatggttatggannnnnntnnnatgagtctcagccttcattattccaactgacaatctt

SEQ ID NO: 2432 - DNA, 763 bp, Macaca Fascicularis
  misc_feature (1)...(763): n = A,T,C or G
cgacgtannnnnnnnnnnncagtagttgctctcatcagtaacgtgcatgggaagtttccagactgcannnactaggagctcgcattcatttcccaagtgtgacccttagatgcttagttgactcnnnnnnnattnnnnnnnnnnnnnnnnnnngaaaggaagaannnnnnnnnnnacgaaatgtttccagaaaagtgtaatataaactttcattccaaaaatggtgtcataagcaaacaactcacttgtcaaatttcaaatggtattgaacaaaaaaagaaagctgttgtgtttttgttttgttttgttttcatgaaactgtgattttcaacttatgaatgctataatgtcccagcgcgggaagctcacgctgtgtgaacacgaagttgtataaaacaaaccaaccaacctacacacannnnnnnnnnnnnnnactgtataaagaaaaatgtatgtttattaactcaaatcagtttttcagagaggaaacttcactgagatgaagaggcgggtaaattggtttgttattttttaaaaaacttgcatgtttaaaaaaactgttgattnnnnnnnnnnnnnnntactaacttcaagctatgggagtttggcagtagtcacttgaggattttttttccaattcttttctttttgttgttaaagctatacttcagtgaacagaaaaattgccaagcaaactaatggctataaaagggtaaattgcatgtgtgggcataaattacagagcctcattgccatgaggtat

SEQ ID NO: 2433 - DNA, 554 bp, Macaca Fascicularis
ccccacagcaacactacaaggggtgcaggagctacagggagcggccctccccgtgcgactcaggcacttctgtttatgagcccaccactggaagactcggggtgaatgggaggagggggagcaggaggagttcttcaaggacatcaggcgcctgttctggaggggccaggcttgccctgcagagggcaggggtcctgggtggtggtgggatggtcccctgtggccctgggcacagggccgagcaggcagcctggtgccagaggagcggtgcgtgctggtggtggttgacacgcgcagaacagccccaggcagtgcaggccgggcagggtggggggatgggagcagaggatcagagcttgctttctcaagtgcaataaatctatcagggagctggggcaggagcagccggcactccgggaccctgctgtccaggccactggaggctgcgccctgagaggcactacaacccgttgggggcgggtggcatgggtgtgggagtgggtgagggtgggcagagggctggggctactcctgtcggtgcaactctgttcaca

SEQ ID NO: 2434 - DNA, 716 bp, Macaca Fascicularis
  misc_feature (1)...(716): n = A,T,C or G
gttcccatggctggggaggcctcagaatcatggcagaggtgaaaggcacttcttacgtggtggcagcaagagaaaattagaagcaaaagcagaaacccctgataaacccatcagatcttgtgaaactggttcactatcacgagaatcacatgggaaagattggcccctgtgattcaattacctccccctgggtccctcccacaactcatgggannnnnnnnnnnnnnnnnnnnnnnnnnnnnttgggaggggacacagccaaaccaaatcatatctaatnnnnnnnnnnnnnnnnnaacctattagaaaaaannnnnnnnnnnnnnnntccaacccagtccctctctcctcctgggagttggggctgattttgtcagttttcccataaatgtagattgaggacccctttccctgtcggtgcatgaggtctgcaggccggccacacggtggcgaggtgctcnnnnnnnnnnnnnnnnnnnnnnnnnnnnnnnnnnnnnnnnngaggtggtttctagttttgggcnnnnnnnnnaggactggagcgagcacccgtgtgcacgtggggtctcctttttctccaattgttggataataatgaatgagggactttccccctcccacagatggcagcttccgagcctgtaaaaataggcannnnnnnnnnnnnnnnctctccttcacttctaggtctgtcttcttcactttcccttctctcc

SEQ ID NO: 2435 - DNA, 778 bp, Macaca Fascicularis
  misc_feature (1)...(778): n = A,T,C or G
tttgtagaatattgtaaaaatgaccataaattcctgttgataatgtgattttgcagctgctcctatgaaaagatgaagtctatatctgtatcccttaaatttttttgtttgtttatctgtgggttttttttgttttgttttgttttnnnnnnnnnnnnnnnnnnnnnnnnnnnnnnnnnnnnnnnnnnnnnnnnnnnnnnnnnnnnnnnnnnnnnnnnnnnnnnnnnnnnnnnnnnnnnnnnnnnnnnnnnnnnnnnnnnnnnnnnnnnnnnnnnnnnnnnnnnnnnnnnnnnnnnnnnnnnnnnnnnnnnnnnnnnnnnnnnnnnnnnnnnnnnnnnnnnnnnnnnnnnnnnnnnnnnnnnnncaaactcctgacctcaggtgatccacccgcctcagcctcccaaagtgctgagataacaagtgtgagccaccgtgcctggcctctcccctttaaatttgatcttggccttgtaacttgctttgaccaatggaacattagtaaatgtgatgcagtcagaggtttgttaataacctatgcatcagaannnnnnnnnnnnnnnnnnnnnnnnnnnnnnnnnnnnnnnnnnnnnnnnggctagcctaccggaggatcagagaccaagtggaacataaatgannnnnnnnnnnnnnnccctgttcgcagatcaaccagcctgccaacttccagacacatgagtaaagccatcctagactatatccaaccccagtcaggatgacacagaccataagaattnnnnnnnnnnnnnnnnnnnnt

SEQ ID NO: 2436 - DNA, 739 bp, Macaca Fascicularis
  misc_feature (1)...(739): n = A,T,C or G
tggggtgcaggcaggctgagtccaaaaagagagtcagcaaagggnnnnnnnnnnnnnnnnnnnnnnnntaggttttgggatagacagtggagttaggagcaatgttttgtgggcagggggcggatctcacaaagttcattttccaggtggggagaattacaaagaaccttcttaagggtgggggagattacaaagtatactgatcagttagggtggggcagaaacaaatcacaatggtggannnnnnnnnnnnnnnnttattttcacttctcttgtggatcttcagttgcttcaggccatttggatgtatatgtgcaggtcacaggggataccatcgcttagtttgggctcagaggcctgacaccaattctttctctctccaggcccctaggccctggaacagctgcctgtgtggttgatggcggctcctctggttggccttgaggcatgcgggaatgtcactgcctggtgagctcctcagttgaccagcactgtctgggggtgggggatgagggtggctctcaggggtacccatctgaatgctgctgttgtgaaggttgaatatgagtaggccagagctcttccagactgtgggtgataggcaccatgctgaggggtgggcaatacactgatnnnnnnnnnnnnnnnnnnnnnnnnnnataaaactaagctgtgtcccgaccaccttgggcacatgtcgtgaggacttcctgaggctgtcacgcgcgtgtcgtcacct

SEQ ID NO: 2437 - DNA, 530 bp, Macaca Fascicularis
  misc_feature (1)...(530): n = A,T,C or G
tacccatttcatcacctacaacggaagtagttaactggaagagattaccaagaaaataaaaagagactcattcagtggaagcaactttgtctcagcttatttaacatagagccaaatctgttgggatgaatgttaaactccctggtaactacagcacagnnnnnnnnnnnnnnnnctgtctgaccacctgttttgtacactttaaggtggttggttgcctttttaaatggttgaggggaaaagaatactttgtgggatatggaattnnnnnnnnnnnnnnnnnnnnnnnnnnnnnnnnnnnnnnnnnnncgtttgtggattgaccgtggctgttgtcgctgcatgagcagagttgtgtctaagactagagcctgtgagtttgccagcccctgatttaagagatgaannnnnnnnnnnnnnnnnnnnnnnnnnnnnnnnaggggtaaaaatgttctctatattnnnnnnnnaaagactgggtgtgtgaatgaataagaaaatgcatctatttgacagacctggagcagtct

SEQ ID NO: 2438 - DNA, 704 bp, Macaca Fascicularis
  misc_feature (1)...(704): n = A,T,C or G
tgggtgtagcaattttgaaactatcatgtgttttacagaactgagcaaagtagcaaatacagagatattattaggaaccagggtcttggctgggagagaaagatgtaactatgacctgggacaatgcaannnnnnnnnnnnnnnnnnnngaataggacttcaagtttcccagcctgtgtaacatggcaagaccccatttctccaaaaaataaaaatgaaataacccaggtgnnnnnnnnnntannnnnnnnnnnnnnnnnnnnnnnnnnnnnnnnnnnnnnnnnnnnnnnnnnnnnnnnnnnnnnnnnnnnnnnnnnnnnnnnnnnnnnnnnnnnnnnnnnnnnnnnnnnnnnnnnnnnnnnnnnnnncttaaaaaaaaaaaaaaaaggaggagcggggctgggtgtggtgactcacgcctggaatcccaccactttgggaggcaaaggcgggtggatcacgaggtcaggagttcgagacctgcctggccaagatggtgaaaccctgtctccactaaaaatacaaaaattagactgggcacannnnnnnnnnnnnnnnnnnnnnnnnnnnnnnnnnnnnnnnnnnnnnnnnnnnnnnnnnnnnnnnnnnnnnnnnnnnnnnnnnnnnnnnnnnnnnnnnnnnnnnnnnnnnnnnnnnnnnnnnnnnnnnnnnnnnnnnnnnnnnccgctgtaatcccagctact

SEQ ID NO: 2439 - DNA, 688 bp, Macaca Fascicularis
  misc_feature (1)...(688): n = A,T,C or G
acaagagacatatgaggccaagaggaaggaatnnnngagtgagctgcagaggaaggaggaagagatgaggcagatgntngtcaacaaagtgaaggagacagagctggagctgaaggagaaggaaagggagctccatgagaagtttgagcacctgaagcgggtccaccaggaggagaagcgcaaggtggaggaaaaacgccgggaactggaggaggagaccaacgccttcaatcgccggaaggctgcggtggaggccctgcagtcgcaggccttgcacgccacctcgcagcagcccctgaggaaggacaaggacaagaagaacagatcagatataggagcacaccaaccgggcannnnnnnnnnnnnntctaaggtgatgatgaccaaggccagtgtggagcccttnnnnnnnnnnnnnnnnnnnnccgccatacagtgctgcagctgcctggtcagggatgcgacgtggagggaaggattcctctgaggcagcagctccaacacatggggccagctcaggaccaccagggcatggaactggagaccatggtttttaatgttagaacagaaaaccccatacttttcatatannnnnnnnnagaagcgcaaacaatttgaatttccatcagggnnnnnnnnnnnnnnnnnaacccttttcattcctatccatggctccataaggggcttg

SEQ ID NO: 2440 - DNA, 740 bp, Macaca Fascicularis
  misc_feature (1)...(740): n = A,T,C or G
acccactcacagataagggaannnnnnnngccatannnnnnnnnnnnnnnnattgaagnnnnnnnnnnnnnnnnnnnnnnnnnnnnnnnnnnnnnnnnnnnnnnnnnnnnnnnnntgacattcttactgtcatgggtttgggatttgnnnnnnnnnnnnnnnnncaaagacagggtgtcttgtgcaaaggctgacttgcctgaactctaagaacatgnnnnnnnnnnnnnnnnagctggcacccatcccagggctcctctggagctaatcctttaagcaaaatgtgcttgccttttaaagatctttgaaagatccctgaccccagctttagctttctccaccagataacnnnnnnnnnnnnnnnnnnnnnnnnnccccgcccccgcccccagtggcttctagggaaannnnnnnnnnnnnnnnnnnnnnnnnnnnnnnnnnnnnnnnnnnnnnnnntcatcctcctttcatttttggatggtgacagcattcttcccctttgtgctggatacagacttctcccaggatcccttttttgggagcaaagccagacaatcnnnnnnnnnnnnnnnnnnnnnggtggaattaatttctgccagctctttgttgtctgtctccttaaatccttctcctggtgtgcttatcccttttgcagtgagtacggtttattaagttatcagccctttaatattggggaaacttaatgagtataaatggcagggagcaccctgtaacagcag

SEQ ID NO: 2441 - DNA, 721 bp, Macaca Fascicularis
  misc_feature (1)...(721): n = A,T,C or G
tgttcacaggtgttagagggtcggggctagcttcagatttgattcataggtaggagggcttagattttaaggcacttctgaacgtcaatccctggacaaggcagtcatcccataagaacagctaccttctccacttcgtggcacaagaggtaaggaggggagtatgggttcatttggcttnnnnnnnnncaagttgaaaccgtttgtttcccctttccattttccctaactgaatgaaaaggacacattctgaaatcccttttgtnnnnnnnnnnnnnnnnnnnnnnngaaatgggaggccagagatgagaaccctttgagaagattgtaaaatactgattttcattctttcaagcttatttgtaaatacctatttgaatgctgtgtatttgtacaggaatttgagcaaaaaatgtatagagtgtgatgtccaattggtattcagcactataaatgtgtttttaacctcacgcattctgtgcttatttaaaacaagaaaacttctaaccattcttttgtgtattcatgtttaaagaaaacaagtgatttaaaaatgatcttacctgtatcagaaaagcaaagttaaaggaaacaaaatttgtaccattgtcccaagaggtattttactgtatatattgtggtagcatgttcaaaatccaacaagtaatgtgaattttagatgtaaatatctgccacttgatttttccccctttccccactt

SEQ ID NO: 2442 - DNA, 406 bp, Macaca Fascicularis
  misc_feature (1)...(406): n = A,T,C or G
taggnnntttcagaattatctcacnaaaagaaaaagtctcnttttttataataannnnnnnnnnnnnnaccccccccacacacacacacatacacannnnaggccaccagaagacacttacatccctcgggtcctgcagtacactcttggtttctggagctcgccatggccgtgtcagagaccacactttccagcatctgagaccaaactgcagagggaagccttctggagaagctgctgcggattggactagctagtgtggcagatgggagccaagctgtgaggactgctggtgacctgnnnnnnnnnnntcttcccatcccgttnnnnnnnnnnnnnnnnnnnnnnnnnnnnnnnnnnnnnnnngttactcttccatgatacgtatcagggctaacctgactct

SEQ ID NO: 2443 - DNA, 1656 bp, Macaca Fascicularis
cttgattgtcctgggctccaaacaggtccacttccacactctttccttgcaacccacagatggccctattgactgtttttgtccaaggagaaagaggaacctcccagtggaatcttgtcaggaaaggcctccctctggggagctttctttggagatgaaaactctgggacaaagttcctcaggatgctctcaggctggtttttgtcttgaagattttatagtgattataccaatgtttattaactctcctaggaacatctctgtcattggttttctgacagcactccagcagggcccagggctttagctgaacagtgcaattgttttaggaatagtcaacaagttagagaccaatttaatgtttaaatcattaaaagaatcatcaacagcaaattacatgtgaaatattcaatgaataatctcaaacttatataccatgtaagaactatctgtcattaaaattactaaaaatatgattcctttaagatcagttcaacacggaagaaagagcaggaatttggcctggagttaggacatttattgtctgttagattttagacaagtcagctcttctaaattggcttctcatctgtgaaatggggataatagatctgcctaattaggttgatttgagataacggatgtaaaacacctaataaaataagcatccagcaaataactattgttcactctctgaatacagacttctggtcatgtagttgtgtcacactcctgatagcttctagaacatcaaggttttaggggagagaggataaaatgaacattaagagtagcagaagactactttccttaatatttgagtgccagctatatgccagacagttctagttgctggcagtcagcagtaaacaaaaactttatctgatgcagcacacacattccaggtgggggaacaagtgaaatacatggaatattagtgataagtgcagagggaaaaaaaaatagagcagggaagggggatggtttgatgtttttcaggttaaagtgacacaaatgcaaaaaattaataaatgcataaaggtgcataatggcaaaactaatcatgtcccatcataccccttcattcctacctccctgataggtatttttctaattatacaaatatgtatacctaattattacatatggggttttattctacatgttacactgtacttgctttttctaatataatgtgtatcatgagcaccttacaaatctataaaggtatctcagatttctctaagtacacgcatacagtctaacattaatgagaaggtattttggtaggcagtttgctttaaataaatgggatcatgtacattctctgcatcttgcgtttgtcatttaacaatatatgatgggaatttctctaagtctatcatagctcttatttcctttttattattacaataaacattcctgtgtatatgtttgtcactatgatggttttacatctgcagaatagattccctggagtaggattgctgcattgaggaatatgtatatttaaatttttaactaaatattgacagattgtttccaaaagtggctggaacagtttgtatttccatcagtaaatgtataaaaacacttttcccttaatactcatggcaataactattgtaacattaaaaaatacatagaaaaaaaaaa

SEQ ID NO: 2444 - DNA, 2328 bp, Macaca Fascicularis
cggacagatgagattctcctgaatcccaacaacaagtggttcaaacctggcataattgagaagtttaggattgagctcccggatgttggcaggttttataagattcgagtatggcatgataaaaggagttctggttctggatggcatttagaaaggatgaccctgatgaacactctgaacaaggacaagtataactttaattgcaaccgctggctggatgccaatgaggatgacaatgagatagtgagggaaatgactgcagaaggcccaacagtgcgcaggatcatgggcatggcccggtaccgtgtgactgtgtgcacaggtgaacttgaaggtgctgggaccgatgccaacgtctatctctgcctttttggtgacgtgggggacacaggggaacggctgctctacaactgcaggaataacacagacctgtttgaaaagggcaatgctgacgagttcactatcgagtccgttaccatgcggaatgtgaggcgggtgaggatcagacacgatggcaaaggctctggcagtggctggtacctggacagagtgctggtgagagaggaagggcagcctgagagcgacaacgtggagttcccctgtctcaggtggttggacaaggataaggacgatgggcagctggtccgagagttgctacccagtgacagcaatgcgacactgaagaactttcgctatcacatcagcttgaagactggggatgtctctggggccagcacggattctagagtctacatcaagctctatggggataaatctgacaccatcaagcaagttcttcttgtctctgacaacaacctcaaagactactttgaatgtggccgggtggacgaattcacccttgagaccctgaacattggaactatcaaccggctggtgattgggcatgatagcaccggcatgcatgccagctggttcctgggcagcgttcagatccgtgtgccccgtcaaggcaagcagtacacctttcccgccaaccgctggctggacaagaaccaggctgatgggcgtctggaggtggagctgtatcccagtgaggtggtggagatccagaaattggtccactatgaggttgagatttggacaggagatgtgggtggcgccggcaccagtgcccgagtctacatgcagatctatggagagaaaggcaagacagaagtgctcttcctctccagccgctcaaaagtttttgaacgggcatccaaggacacattccagctggaggcagccgacgtgggcgaggtctacaagctccggctcgggcacacaggcgagggcttcgggcccagctggttcgtggacaccgtgtggctgcggcacctggtggtgcgggaggtggacctcacgccggaggagcaggcccggaagaagaaggagaaagacaagctgcggcagctgctcaagaaggagcgactgaaggctaagctgcagaggaagaagaagaagaagaggaagggcagcgatgaagaggaggagggggaggaggagtcgtcctcatcagaggagtcctcatcggaggaggaggaggaggaggagaccgaagaagaggaggaagaggaggagtttgggccggggatgcaggaggtgattgagcagcacaagttcgaagcccaccgctggctggcccggggcaaggaggacaacgaacttgtcgtggagttggtgccagctggcaagccgggtcctgagccgaacatctatgaggtccaggtgatcaccgggaatgtgcccaaggctggcactgatgccaacgtctacctaactatctacggcgaggagtatggggacacaggtgaacgacccctgaagaagtcagacaagtccaacaaatttgagcaggggcagacagacaccttcaccgtctatgccattgacctgggggccctgaccaagattcggattcgccacgacaacacaggcaacagagcaggctggttcctggacagaatagatattactgacatgaacaacgagatcacgtactactttccatgccaacgttggctggcggtggaggaggatgatggtcagctgtccagggagctgttgccagtggatgagtcctatgtgctgccacagagcgaggagggtgggggaggcggtgacaacaaccccctcgacaacctggccctggagcagaaaggttttctaaactagagctgatttctttctccagtaccccttccctctgcctctccctaaccctaagtctccatcttccttcccttcccagtgggctctgggcacttcctccctgacaaggcagtataaagcacacagcttaggaaaaaaaaaaaaaaaaaaaaaaaa

SEQ ID NO: 2445 - DNA, 1243 bp, Macaca Fascicularis
  misc_feature (1)...(1243): n = A,T,C or G
agtcttaatttggcagtcaggaagtgatataacttagctgctatttacaacactagaaatatagtactttaagtaatttcacctctgtgataacatttgttactttatttttaatgattttttacaatagttatgacagtaggatggttatggaattggaatttaaaccccaactaatgagcttagctgctgggaataataattaggttttacattccattttaaaacaaaaacttagaaaaggtgctggcattctgaggcctaaaattaggctgcttatcagaagcttgctcctttgttatctgggtgaaatattttatttttgcactttgagtcatatttccacccctgtataagctacatagaagcccaaatgaattgggtaggaaaggaaattatgcaaacaagtctcagctagtgctgaaggaccccaatttgtgtctgctgtgaacattatttatttctcacttgagaaatgctgcgaggcagttcaagttttatgcttttaaatctcacacctcagaatctgatatcttaaattgctgattctgttacatgctaggaacaaaatgccaacatgtaaaggagttgcataatcatgaaaagtaaaggacgtttcctatgccagttagagtggtttgacccttgaggtcaaaagatgtgttactattatttttctagtgacagaacagactgaatttagctagggaggcactgatgttggcttttgggaaagggttcaaaaaactctatgacaacattaatgttaaaatgttaagccaagtgcagtggtgcaaggctgtagtgtcctggcttctgaggaggctgaggcaggaggattgcttgaggccaggagttaggctggagtgtgttgaggctatgactaactactgcattccagcctgggcaacacagcaagacccattctcttaagaacatggccnnnnnnnnnnnnnnnnnnnnnnnnnnnnnnnnnnnnnnnnnnnnnnnnnnnnnnnnnnnnnnnnnnnnnnnnnnntgagaccagactggccaatatgacaaaacctcatctccactagaactacaannnnnnnnnnnnnnnnnnnnnnnnnnnnnnnnnnnnnnnnnnnnnnnnnnnnnnnnnnnnnnnnnnnnnnnnnnnnnnnnnnnnnnnnnnnnnnnnnnnnnnnnnnnnnnnnnnnnnnnnnnnnnnnnnnnnnnnnnnnnnnnnnnnncaaaaaaacaaaaaaaaaaaaaaaaa

SEQ ID NO: 2446 - DNA, 665 bp, Macaca Fascicularis
tcataccgctgttctgcaaattttctgtctgctatcattgaaagccactcaacaactctttatgtgacagatgtaaaaagtgcctcagaacgaccctccaaggatgaaatggcaagcagactatggctcccgtatagtttacttcctttggggggattgcctctactcgtcactacctgtttctgcctcttctgcttcctgagaaggcaccaaggaaagcaaaatgaactctctgacacaacaggaagggaaattaccctggttgatgttccctttaagagtgagcaaacggaagcaagcaccaggcaaaattcccaagtattgctatcagaaactggaatttatgataatgagcccgacttttgtttcaggatgcaggaagggtctgaagtttattctaatccatgcctagaagaaaacaaaccgggcattatttatgcttccctgaaccattccatcattggactgaacgcaagacaggcaagaaatgtaaaagaagcaccgacagaatatgcatccatatgtgtgaggagttaagtctgtttctgactctcacaggaaccactgaatgatcaatgtgttgacatcattgtctgggcccaataggatgtcaaataatatttctcaatttgagaatttttactttagaaatgttcatgttagtg

SEQ ID NO: 2447 - DNA, 745 bp, Macaca Fascicularis
  misc_feature (1)...(745): n = A,T,C or G
gtcannnnnancnttaagcttcagttacctttacaagggaaagaagaaagagcgggagaaccaagtgaggcaagccactgctgcccttgcatgctgctaccaagggcccctgggccttctgagcccaggtgactcctctctcaagatagtccttctggaatttgtcctgttttaacctttcttctaggcaccaagggaggtacacaagaaactataagacttagtctcatcgtcaacatgttcagaaacaaatgcataaccttctcaccaaaaccaggtcattggcttctctccctgcttgagtcccgggcttaactgtcatttcagaatgtgagaatcagtcaggtatggtannnnnnnnnnnnnnnnnnnnnnnnnnnnnnnnnnnnnnnnnnnnnnnnnnnnnnnnnnnnnnnnnnnnnnnnnnnnnnnnnnnnnnnnnnnnnnnnnnnnnnnnnnnnnnnnnnnnnnnnnnnnnnnnnnnnnnnnnnnnnnnnnnnnnnnnnagatacttgggagnnngaggcaggagaatatcttgaacatgggagnnnngannnnnnnnnnnnnnnnnnnnatgccaatgcaatccagcatggnagagannngaagnnnagaacatacatagatatcaaaaaaaaatgtgaggattggttagagagacaatggtggatcatgcatataatcccagcactttgagagannnaagaacaggaggatcactttnnnnnnnnaaattcaagac

SEQ ID NO: 2448 - DNA, 3640 bp, Macaca Fascicularis
cgatgatgcattcaaagcagactcccttgtggagggaacttcttctcgctattccatgtataatagcgtctcccagaagcttatggccaagatgggcttcagggaaggtgaaggattgggtaaatacagccagggtcggaaggacatcgttgaggcttccagtcagaaaggtcgaagaggcttgggtctgacactccggggctttgaccaggagctgaacgtggactggcgagatgagccagagcccagtgcctgtgagcaggtgtcatggtttccagaatgtaccactgaaattcctgacactcaggaaatgagcgattggatggtcgtgggaaagagaaggatgattattgaagatgaaacagagttttgtggggaagagctgcttcatagtgtgttgcagtgtaagagcgtgtttgatgtcctggatggggaagagatgcggcgagctcggactcgggccaatccctacgagatgatccgaggagtcttctttctaaacagggcagcaatgaagatggctaacatggattttgtgtttgatcgcatgttcacaaatccgcgggactcttatgggaagccactggtgaaggaccgggaagctgagcttctgtactttgccgacgtctgtgcaggcccaggtggcttctcagagtatgtgctgtggaggaagaagtggcatgcaaagggctttggaatgactttgaagggccctaatgacttcaagctggaggacttctactctgcttccagtgaactcttcgaaccctactatggtgagggtgggattgatggagatggagatatcacccgcccagagaacatctctgcttttcggaattttgtcctggataacacagatcgcaagggtgtccactttctgatggctgatgggggtttctcggtggaggggcaggagaacctgcaggagatcctcagcaagcagctgcttctgtgtcagttcctcatggcgctgtccattgtccggacaggaggccacttcatctgtaaaacctttgacctgttcacaccgtttagtgtggggcttgtctacctgctctactgctgctttgaacgagtttgtctcttcaagcctattaccagccgtcctgccaactcagagaggtatgtggtgtgcaagggcctgaaggtgggcatagatgacgttcgggattacctcttcgcagtgaatattaaactcaatcagctgcggaacactgattccgacgtcaacttggtggtccccctggaggtgatcaagggagaccatgaatttactgactacatgatacggtccaatgagagccactgtggtctgcagatcaaagctctggcgaaaatccatgcctttgttcaagacacgacactgagtgagcctcgacaggcagagatccggaaggagtgcctccgactctgggggatcccagaccaggctcgtgtggctccttcttcctctgaccccaagtcaaagttctttgagctaatccagggcactgaaattgacatcttcagctacaagcccacactgctcacctctaaaaccctggagaagatccgccctgtgtttgactaccgctgcatggtgtctggcagtgagcagaagttcctcatcggcctggggaaatcccagatctacacgtgggatggccgccagtcagaccgctggatcaagctagacctgaagacagagctgccccgggacactctgctatctgtggaaattgtgcatgagctgaaaggggaggggaaggcccagcggaagatcagtgccatccacatcctcgatgtccctgtgctgaatggcaccgatgttcgggagcagcactttaaccagcgaattcagcttgccgagaaatttgtgaaagccgtttccaagcccagtcggcctgacatgaatcccatcagggtgaaggaggtgtacagactggaagagatggagaagatttttgtcaggttggagatgaagatcatcaagggctccagtggcaccccaaagctcagctacacagggcgtgatgaccggcactttgtacccatgggcctctacatcgtcaggacagtgaatgagccctggactatgggattcagcaaaagcttcaagaagaagttcttctacaacaagaaaaccaaggactctacttttgacctccccgcagactccattgccccatttcacatctgctactatggccggctcttctgggagtggggggatggcattcgtgcgcatgactcccagaagccccaggaccaggacaagctgtccaaggaggatgtcctctccttcatccagatgcacagggcctaagagcctcaggatgcgccacccctgcagaatgccctatcattcctgagacggggccacctggggcccatagtgctggcttcttccccctcttgaaaagggactggggagcactgcacctggcatgaggagtgggtggcctcctccccatccccctgaagagctcaggcagggccctgcagagaacactcccacgttccttctgggacacctgcctgggaactttcccctgccaggactcagcctgaaggaagctgctcctgaggcaggtatgaggtcagtgcctagggcacatggggccgatggaggacatgtcagagtggcagagctgtgggctctgctgttctctcctgcatcctgtagactcacttttctgagttccacgcactgccctgagggtagccatgcccttgctttgcccaactttttattgggccatccctgagtgggtggagacttgctgtcgtgagctggccaggagaacctgctataaaaaatcacggttttgtttctttgaacttactgtttggatgccaagttggagacgattttcttgtctcctacccccattcatcctggccttccctgaagttcttcctagctcagaggtctgacagtccaacagggtgggaaggagggagtgtgggtcatccgtccctgataccacattgagatcctgggagccctctctttcgtactgagtatggagttgtagagccatcctaggtcccatcccctcttggtctaaacattgggcagcgctagatggcaggaagcagccttgaagacccgtctttctctcccccacagcagcagtggccccaccagtaaccaagggtacctccaggggtttgggtagcgctgccctctggcagtcatgcaccactgtctgccatagctgctctagggtcttgacagaattctgagctggaagtgcagctcccttgctaccttttcccttcctttttcttccctaataggaggtacagtctgcttttgtttgtcattatgtggtcattcccatttcctttatcttgtccgacagcgcagagaggagggggagctgggccgtagcttggggtgggggagggcacctgtggttgtttttaatgggaagtacctctcagagatgttcatgcaggctccctagggccccatcccagtgccaggctggtttccatggagatagggcactgaggctcccatgaggttggaatcgacttcaccatgggggtccttcagccagcatccagctccccacccccaggctggcagcagcacagctgagatgctgtatttccacccaattctgggtatatcagtgtgtcttgcaga

SEQ ID NO: 2449 - DNA, 676 bp, Macaca Fascicularis
tgcctctccctaggttcattcctaaccctctcagacctcaggatgggacagtatttggagacacggtctttattgagctaatacaggttaaatagtttactcgggggatcctcatccaatacaactggtgtccttataggaggaaattgggacacacgttggtgtgcagtgggaagaccatgtgaggacagacagagaagcttggccatctgcatgcccaggagagagacttagaacaaatcaatctgcggacaacttgatcttggacttctagcctccagaactgtgagaaaatacatttctgttgtgtaagcggcccagcctgtggtcctttgtcatggcagccctggcagatgagtgcagaccgcacttcccaccgccatggtgccactgtctgtggacagcatgccagcctcatcgcacgagtcacccctgaagatgctcaaattagcaggctgttcttagaaccaaatttcctggacaggcttcagaaagcattctctctggtgatacagacatctgaaagacacacacacacacacacacacacacacacacaccccaaaaacaaacaaaaacccatggccaaaaaaaggacctttctccctttcatttctttagtaatgaacagcgcccagaagagcaggatagatggctcctcggagaaaacagaatc

SEQ ID NO: 2450 - DNA, 692 bp, Macaca Fascicularis
  misc_feature (1)...(692): n = A,T,C or G
gcatatgtttgaaaacccnnncatctcagatctgtatagctggtctgcgtttgtgtccgtagtgcacgtgcactgccgtcgtgcccatttaagaacgggggagtaagtaaaagaggaatcactcagatctttccttgggtgaacagcggtggtgtggttggtgtgttgactgtgaacaggctgacttagctgttgatgcatactcagaacccccatctcctcccagactctgcacttttccttctctgcagtctgattctnnnnnnnnnnnnnnnnnnnnnnnnnnnnnnnnatgcttgcttagtaaaaataagtttaaacatttcatggtggttgacagagctttgtcccannnnnnnnnnnnnnnnattctttaaaactcgttgaacatttataccaaaggtcccgccctgcaggtgtgtatgtggtgcacagagagtggggtttggagcatcgggcactgtgtgcattgctaaggggacatagtgagacaacgtgggactttaactaaaaacacatcagtcgtgggccacgctaccagtgttgtcaggtatttgttcttcattgttgttgtaatatattttctgttgtttttctaatttaattctctccctctgttgtctgactgtgaactgctaacagtgttaaacttgatgtaaataaatgaggcccttgaaagggactgctctctc

SEQ ID NO: 2451 - DNA, 393 bp, Macaca Fascicularis
aagaaactggggaagcatgagagacgtgttcatatgctccagggggagaaaggtttttgcatcttgagatggaaagaaatcattacaagacacgggttgtccggggatgacagaagtcagttgtctatttataatttttttcaagttagtgacagtgatattttaattttgtatcaggccaataataatctttctccattacagggctaagttctgtggctggtggtcagtttgtaaatttgtacttaaagagacttaatagtaacttcatttatttgtctagttgttattgtatatataaatatttacatgttttcatatattgcatatgaaaatttgttacatgttactctcaaaactgagattgctgtaagacaatgtaaaaaacatgtc

SEQ ID NO: 2452 - DNA, 687 bp, Macaca Fascicularis
  misc_feature (1)...(687): n = A,T,C or G
tcccttgttagatggtgtgttaggccattcttgtgttgctataaagaaaatnntgagtctgggtattttataaagaaaagaggtttaattggctcatnnnnnnnnnnnnnnnnnaggaagcatggcannnnnnnnnnnnnnnnnnnnnnnnnnnnnnnnnnnnnnnnnnnnnnnnnnnagaaagcaaagcaggagcagtcacatcacgtggcaagaaagcgagagagagaggtggaggaggtaccacatgctgttttaaagaaccaggtctctcaagaactcattcttgttggaacaggcattaaaagagattagagtctgtaagcagaaactcagttgtacgtaagaaaactcaattccccctgagaaagataaagagctggagtcctttaaaaattannnnnnnnnnnnnnnnnggctagtgagccttatctctcctcccttcccaggcattgtgaannnnnnntttccctagctgtgcagctgcaaggtcactagacagataaacccaagttgtaaaacatgtttttccttgaaaagtaagaaatgatgtaatgcatatctcgattgaataactgtctttgtttcttgcttctgtattatgcttcccctgcacagatctcccccaaccccacgaaatgcttaaaaggtagcttaactctttgttcagggctcagtcctttggat

SEQ ID NO: 2453 - DNA, 696 bp, Macaca Fascicularis
  misc_feature (1)...(696): n = A,T,C or G
gtccatttttatgtaatatnnnnatgnnnnnnnnnnnnnnnnnnnnnnnntcattaacttactctatcttctgtcctatgaatgttgagaaaagcttaggctaacatgaattgtttgtgaagtgtggttgatggtgctttgtttttttctgactacttctatggaaggccagtggagaagcaaaggaagatgtgaaaattgacgctcattcttcttcttgttcnnnnnnnnnnnnnnnnnnnnnnatttgaaaaatgatgaccacaattttcagaagggctgacaaattcatattggtatgcaaaagctcatcacccattagggtttgttgttgaatcgacagtacttagcatatnnnnnnnnnnnnnnnnaactcatgccaagagtctttatgaatgggattaaggtggacaagatctcctaagatctgaaaagaaaccttaatacactcatatggttggagtcttaagtaaacctctgattttgtcagagtttttctacgtataggcttgaatagggggcatcccttcaaaactgtacaaagacgacttttccatttaaaaatttttagccacttcatttctatttattgcacaggtcaaatttgtcttgttatttgtgagtacagtacatttaaaaaacatcctcatcggttaatttttttttttttcagccggagattgannntataaattg

SEQ ID NO: 2454 - DNA, 741 bp, Macaca Fascicularis
  misc_feature (1)...(741): n = A,T,C or G
gttttttacatgtttttgtgtgtgtgtgtatccataaaatgcatatgtaaatttttctttgttnntaagcattcacccaaacaaaaaatcacaggtaaacccatgtttctgagatgccattattctgaccaaaataagagataatcacttcaagttaaattgaaatttttcctgaagccannnnnnnnnnnnnnnataagtaattctaaataggacaatttaaattggataattttaaagtatctataattgcagtggtttatttgcaaaattcctaaaaggaaaaattttatcactgccgtcacagcaggtttcttcatccagatgaggacactagacaaatgctagtgtgttttaactagctaaacaaaacttaaacgaaaatttnnnnnnnnnnnnnnnnngccattccttaacaaaatgttgaaatccctgttgctacattgannnnnnnnnnnnnnnnnatggaatatgtaagatttggctcataaaaacctaatcagatggttagagatgttggcagttgaggacctgctgnnnnnnnnnnnnnnnnnnncttttgtaatctaatctattgacctgcatgttttttctttaccccaactgattccttacatgtaggctcaatcttcagttatttgctttactgnnnnnnnnnnnnnnnnnnagaacaactttgtagtaatcagagtgttatccaactgtatattgtttactttattgtaaatactggtgaacagt

SEQ ID NO: 2455 - DNA, 723 bp, Macaca Fascicularis
  misc_feature (1)...(723): n = A,T,C or G
ggaagtaatgaccaagttaagtcattttcgagaatgtatcaatcatggagatcttaatgaccataatatnnnaatagagtccagcaagtcagcctctggaaatgctgaatatcaagtgtctgggattttagactttgatgacatgagctatgnnnnnnnnnnnnnngaactggcaattaccatcatgtacatgatgattgaaagcaaaaatcctatacaagtaggaggccatgtccttgcagggtttgaaagcatcaccccactgacagctgtagagaagggtgctttgtttttacttgtatgcagtcgtttttgccagtcacttgtcatggctgcatactcttgccagctatacccagagaacaaagattatttcatggttactgcaaaaacnnnnnnnnnnnnnnnnnnnnaaatgtttgacatgggtcagaaagctgnnnnnnnnnnnnngtttgaaactgccaaatcctatgaatctgggatctccatgtgactgagatctccatgtgattttaacgtgggtaattaaaatagggcccaatcaaattttaggaaggattttcctgtatagttaaaaatcaattgatggnnnnnnnnnnnnnnnnnnnnnnnagagcacatgaaatccctaaggtcttcaagcaatctcatgacaattttttaaaattcacaaaagtaccacgagcaagcatatttttctgtgagtctcacttgccatgt

SEQ ID NO: 2456 - DNA, 759 bp, Macaca Fascicularis
  misc_feature (1)...(759): n = A,T,C or G
gatttaggagtcagacagcccccagaaccacgataggtacagagcgactctggcactgccacgtggtcagagaggatttctaaacagaaaaaggaaagtgaacagaaaacagaagtgaggtacagaaatagccaggttagttacagctcggtgtttgccttatttgaacatggtgtgaacagttgactgcctgtgattgactgaaactcggctgctataattggctaagattcagctgtttgttacaagagtaggttatagtctgtttacacatccagttagattacagttcactatgtacgaagaaacttttagaccaaatttaaatatgtaaggaggtagctttaggtcaaacttaatctaacaaatcgtctctttaggctgtttatgtcactctgttcctatcataaatgttcttatttggactcaaatcccactgggaaatagcagaacggtggattttgtaaggtgggaacaaggacttcaggttacttttctgtaagggttacaccagaaagggctctctctctctctttctttttgataannnnnnnnnnnnnnnnnnnnnnnnnnnnnnnnnnnnnnnnnnnnnnnnnnnnnnnnnnnnnnnnnnnnnnnnnnnnnnnnnnnnnnnnnnnnnnnnnnnnnnnnnnnnnnnnnattaaccacgcccagctaatttttgtatttttagtagagatggggtttttgcctgttgcttatgctggtctgaaactcctgggctcaagcaaaagtgct

SEQ ID NO: 2457 - DNA, 699 bp, Macaca Fascicularis
  misc_feature (1)...(699): n = A,T,C or G
acagctggctgtgggggcttttgaggactccagatcatatccctctaggcagggaacaaatcctcttgagctgggctttctgagtgaagattacagcagcactctgacttccatggccccttgaaagtcctgagcctcagaacccacccaggccctagcaatgtgttcctcacagctccatctgtgacctgagcttcacaagacatctgcagagcacagagactttgccatgcttctcccatgataattattggcttgctttttttgtttttgtttttcttttttagnnnnnnnnnnnnnnnnnnnnnnnnnnnnnnnnnnnnnnnnnnnnnnnnnnnnnnnnnnnnnnnnnnnnnnnnnnnnnnnnnnnnnnnnnnnnnnnnnnnnnnnnnnnnnnnnnnnnnnnnnnnnnnnnnnnnnnnnnnnnnnnnnnnnnnnnnnnnnnnnnnnnnnnnnnnnnnnnncgaattcctgggctcaagtgatccaccctcctcgacctcccaaagtggtgggattacaggtgtgagccaccatgcctggccttggcttgcttttgatgctgacaggaactttcggtaaagctagaaacttctagaaaagccttggggaagctgttggggcaactacaacccaagttcctcatctaccctcgacatcatctacttcgcaattggttactgtcttcctccttccatc

SEQ ID NO: 2458 - DNA, 739 bp, Macaca Fascicularis
  misc_feature (1)...(739): n = A,T,C or G
acacacacacacagatacggcgggaggaacacacctnnnnngcctcacgaggcnnnagtagcttgattccagattcttacgaggatcccaggaaggaaaataacatgctagtctctcttacgaacatagagacaaaaatcctaaatattagtaacttcaatcagtcaacgtgtaaaaggatgatacatcattataaagtggggttgattgtagggatgcagggctgatttgcattcagagtctgggtatgattcaccacggaatacagaagaagtgaggaaatctgtacaggttatttcaacagataggaaaagcacttgataaaattcaacactcaaggaggctaaaaaaaatcctggcaaactaggaatagataagaatgcctttaatctgccaaaaggtatcttcaaaaaccctacagttaacgttatacttactgaggagatgttaaaatcttttctcctaagatagaggataaaacgagggcatctagtactattgtttctgttccccattgtgccagaagtcgtatccaacgcagtatggcatgaaaaaaaaagtaggattgagaaggaactgtttcatagacagcacgattatgtccatggaaaatccggacgcatctgcagcgtgctgttagaattcatcagtgaatgcggcaggacaggtcagtagacaagaagacattgtgtgtgctggcaaaagacagttggagaggaaattaaaaactgatatcata

SEQ ID NO: 2459 - DNA, 739 bp, Macaca Fascicularis
gacaggacccatttctgtgtgatgttaggagggaatgaagtcttatgctggggaagtgggcaagtgtcaatttccttaatatcttgaatcctgtgggtccaaaatgcagcttgggaatctaagtagcatgtggcttaattactaatcccaccctttgctgttgcattctagccctattcctggtgcatttatgcctagaaaggtgatgttatttcctggggtggcattcagctcctcttgattttggtgccacagcatttgtggactttgaagtgaaggtataggaaatgtcaagggtgccaccccagcaaccttgagccagtcacccctcctcttatttgtaaaacgaggaaggaaaggtaatgaactgtggagtcagagagaagtaggttggaatcttgtctttgtcatttagtagctgtttgacctaaggtgactcactgaacttctcagtttctctatctgtaaaatgagaattctaacaactcgtagagtatttgtgagacattgcatgcgaagcccccagcaccatgcctgtcctagcttaagcacccaccaggtgtcgataagtaattgttcttccctggactgcctgcagatctagggtaccccaggaagagtcacagcactctgttttggggctcggctctctgaggggagggcatactgtacggggaggaggggtctggaccagaaatcaactgcagaattcttgttattttcataataattagtagtt

SEQ ID NO: 2460 - DNA, 698 bp, Macaca Fascicularis
  misc_feature (1)...(698): n = A,T,C or G
tatgtgtgtatgaatatgaaagataatgcaaccatatcaatcgtaaaaatggattataattatttttgatggtattaggttatgtagtttcaaactctttgctgtattttcttttgcacatgccattcatttgctaatttttgtggtgtggagattcctttttattaatttgagcccaaagcacaagtgtatcactgtttaatnnnnnnnnnnnnnnnnnnnnnnnnnnnnnnnnnnnnnnnnnnnnnnnnnnnnnnnnnnnnnnnnnnnnnnnnnnnnnnnnnnnnnnnnnnnnnnnnnnnnnnnnnnnnnnnnnntcatctgggatagnnnnnnnnnnnnnnngagctactcctannnnnnnnnnnnnnnnnnnnnnnnnnnnnntgttatgaaacatgaatcacatagagctgtggagttttaccaagtggtgtgtgtggtttttgttttttactatgcaatgatgggaaatgcacaaacttttcaaagactagtgtctgaagaactttacaaacaatacttgaatcctttctttaaagttatcccatcatgttttatagtcattgttgcttccattgttaatttccatttttaagtgctttgtaatttttttaactgcactacctgaagttttgtttgaaattaataaactcattcatatcttgttggnnnnnnatgaatggagattcagtagt

SEQ ID NO: 2461 - DNA, 795 bp, Macaca Fascicularis
  misc_feature (1)...(795): n = A,T,C or G
ggcagcctgactccccagggaagcaggagactgaggaagatgaggaggaggaagatgagaaggacaaaggaaaactgaagcccaacctaggcaacggggcagacctgcccaattaccactggagccagaccctgtcggagctggacctagcggtccctttccgtgtgaacttccggctgaaaggaaaggatgtggtggtggacatccagcggcggcacctccgggtggggctcaaggggcagccagcgatcatcgatggggagctttacaacgaagtgaaggtggaggagagctcgtggctcattgaggacgnnnnnnnnnnnnnnnnnnatctggagaagatcaataagatggagtggtggagccgcttggtgtccagtgaccctgagatcaataccaagaagattaaccctnnnnnnnnnnnnnnnnnnnncctggacagtgagactcgcagcatggtggaaannnnnnnnnatgaccagagacagaagtccatggggctgccaacctcagatgaacagaagaaacaggagattctgaagaagnnnnnnnnnnnnnnnnnnnnnnnnnnnnnnnnnnnggctaaattcaactagcccctgttttttcctccctgaactcttggggctgagctgcaactacccaacttactttcccactcttctctgggacttgtgggcctcagggcttggggcaggcatgggaatgtcccaggcacacaggtcccagggcatcaggagaaaggctggggcttggggccttgtcctccccagttggcctactgtacacataaca

SEQ ID NO: 2462 - DNA, 772 bp, Macaca Fascicularis
  misc_feature (1)...(772): n = A,T,C or G
acctggcccagcannaagcagaagatgcgtagttgcatagaagnnnnnnnnnnnnnnnnnnnnnnnnnnnnnnnnagcttnnnnnnnnnnnnnnnnnnnnnnnnnnnnnnnnngctgtcctgagatggaaagctcagtggatataggaccctgattctgatgaatggggcatgtggtcccaatgctggagctcctctggcaggttctaaaagcacactactgagcagcgtgccctgccggacactgctggcgggcactcagtgagcactactcacagatccatacctgaccctgttgggtcaagtcaggctgggctttggtctgcactgtagcacctgcattctttgagttcacatcatgaannnnnnnnnnnnnnnnatatcatctcaggcttaacctagcacatccgatttcttttcttctatgatatccaaattgggctgacctcacttcaaatatgctgtcccattttgtcatcctatcttacctcggggaaattgggaactgatggccagaccaattctgttgaaattcttgcatagagcaaacctgtgctcatttttaagtggcatgggagaggcccccagcctcatagagcctagtctgtgtcttcacagtgctggtagaatatgtgtgtgtgtataaatgtatgatatagatttatatatgttgctattgccatatattgaaggccaacataaccggtggacagggtgggtgacagaaaatgaaagtctttttggtgattattaaagcaannnnngtgtataaa

SEQ ID NO: 2463 - DNA, 780 bp, Macaca Fascicularis
  misc_feature (1)...(780): n = A,T,C or G
gctggtgagnnngngctgacccggcccaggagcgcctggctacagccctgcagaagctggaggaggccgagaaggcggctgatgagagcgagagaggaatgaaggtcattgaaaaccgggccatgaaggacgaggagaagatggagctgcaggagatgcagctgaaggaggccaagcacatcgctgaggattcagaccgcaaatacgaagaggtggccaggaagctggtgatcctggaaggagagctggagcgctcggaggagagagctgaggtggctgagagtaaatgtggggacctagaggaggagctgaaaattgttaccaacaacttgaaatccctggaggcccaggcggacaagtattccaccaaagaagataaatatgaagaggagatcaaactgttggaggagaagctgaaggaggctgagacccgagcagagtttgctgagaggtctgtggcaaagttggagaaaaccattgatgacctagaagatgaagtctatgcccagaagatgaagtacaaggccattagcgaggaactggacaacgcactcaatgacatcacctccctctgagccccacgccagcgtggccacctcagccctcttctctcctctcctttctattctctctatggggaggggagcaggcaggaggagcagaaattgccaacattgcacagccaggctgggagcagcctagggagaccccctatcatgcccaccacccactctnnnnnnnnnnnnnnnnnnnnnntgtcccctccacccccctttgctg

SEQ ID NO: 2464 - DNA, 1837 bp, Macaca Fascicularis
atttcttctttatcaaataccattttggcctctacatcatcagaatgtacatcttcaaaaagtgtcagtcagccagtggctcaaaaacaagaatgcaaggtcagcaccacagcaccagttacgttagccagtagtaagacaggaagtgttgttcaacccagttctgggttctcaggcacaactgattttatccatttaaaaaagcacaaggcagcattggctgcagctcagtataaaagtagtaatgtcagtgagactgaacctaatgctataaaaagtcagacactttcagcctcccttcctcttgatagcactgtaatctgtagtacaattaacaaagcaaactctgtaggaaatgggcaagcttcccagacaagtcaaccaaactaccatactaaactgaaaaaggcctggctcaccagacattcagaagaagataaaaatactaataaaatggaaaattcagggaattctgtatcagaaattattaagccatgttctgtcaatttaatagcctctacatctagtgatatacaaaatagtgtagatagtaagatcatagttgataaatatgtaaaagatgataaagtcaataggagaaaagccaaaagaacttatgaatctggctctgaaagtggagactcagatgaaagtgaaagcaagtcagagcaaaggactaaaagacaacctaagccaacttacaaaaagaagcaaaatgatttgcagaagagaaaaggagaaatagaagaagatttgaaacccaatggagttctcagcaggagtgccaaagaaaaaagtaaactgaagttgcaaagcaacagtaatactggcattcctcgttcagtattgaaagattggcgtaaagtcaagaagctgaagcaaactggggaatcctttttacaggatgactcctgctgtgagatagggcctaatttacaaaagtgccgagaatgtagacttattcgcagtaaaaaaggagaagaaccagctcactcaccagtattttgtagattttactactttagacggttgtcatttagtaaaaacggagtagttagaatagatggtttctcttctcctgaccaatatgatgatgaagctatgagtttgtggacacatgaaaattacgaagatgatgaactagatatagagacttctaaatatatcttggatataataggtgataagttctgtcaattagtaacatctgaaaaaaacagctttgtcctgggtgaaaaaggatgccaaaattgcctggaaaagagcagtgagaggagtccgggagatgtgtgatgcatgtgaagcaacattgtttaacattcactgggtctgccaaaaatgtggatttgtggtctgcttagattgttacaaggcaaaggaaaggaagagttctagagataaagaactatatgcttggatgaagtgtgtgaagggacagcctcatgatcacaaacatttaatgccaacccaaattatacctggttctgttttgacagatcttctagatgccatgcacactcttagagaaaaatatggtattaaatcccattgtcattgtactaacaaacagaatttacaagttggaaattttcctacaatgaatggtgtatctcaagttttacagaatgttctgaatcacagtaataaaatttctctgtgcatgcctgagtctcagcagcaaaatactcctcagaagtctgagaaaaatggtggcagcagcccagagagtgatgtaggcacagataacaagttaactcctccagaatcccagtcaccactgcactggttagcagatcttgcagagcaaaaagccagagaggaaaaaaaaaaaaaaaaa

SEQ ID NO: 2465 - DNA, 1589 bp, Macaca Fascicularis
gaaaaacaatctcaaaatacatactttttcaatcatactaactcatcatgttagcagtaagttaaagaatcttgaatcatatgatccactgtagtttccttttcttgccttattcccaggagtttggtttttatttgttcttgtccttggagggaacaaaagacagctggtagctgtcccctgtttggttttgcatgtatttaaaaaacatcatcttctactgctctcttactcctttactttgtggtcatttgtttacagctatttagacagttatttcttaaggaacccctaaaactattagacagttacttcttaaagaacccctggaaactaccatatgttcctctagaaaggataaagatttgttgaagcaaacttcccctgacactttacctagagcaaggctgaaacaaaagctacctacacctgtattttccttctcttatccctcaagtacacaatagggcatctggctctcagcagttgatgccaaggtctactagggaagaaatgagacttcagaactccctacaagctgaaatggagtcagaaaagctacatatataaatgctcaaacggcaggtagttttgcagaaactgcaatgtggaggaactgggacactgttttctggagcactttgccactaggattttactttcagtgcaatgagggaccattgaagacttttaaaccagatggtgacatgatagaatttcatttctgaaaattatggtggctgttggaaaaaagtggattggaagaaacaagaaaacgctacattacttcacagcttctctaggaaaacagtgcagtgggagaaccctgaactcaggaaatatggtccatttcctgcactgtgtttcccaattcaagatattctgttgtagaattctacagctcaagagccccttctgacttacaaaggacaaggactgatctactaaagtcatgtagtaaatgtgaggaatttgcctaactcagccagttgacatgtcaaaatctaaccaacttgtctaataatctaacatatattgttagtgatttcaggttgtaagaaccagttttctgaaaaacaaaaacaaaaccaaagcactctagaggaagtaatcatatgttttaatgtcataagtcactgattatatacttaatagtaaatggtagataagaacttggaccctggagtcaaacttaggtggctctgtcatgcccttgacgtgtgtcttttggtgggctattgaaactctgtcttagtttcctcatctataaaatagaatgctaatatcaactttatagggttgttgtgaactctaaataagaaaacaaatggaaacccaacaccacatgttctgactcataagtgggagctgaacagtgagaacacgtggacgcagggagggaaataacacacatcagggcctgtcagggggacgaggagggagaatatcaagataaacagtggggcttaatacctaggtgatgggatgataggtgcaacaaatcaccatggcacatgtttacctgtgtaacaagcctgtaagtcctgcacatgtatcctggaacttaagtaaaaaaaaaaaaaaaaaaa

SEQ ID NO: 2466 - DNA, 549 bp, Macaca Fascicularis
ccggagagaaaaggtccgcttgcacttttttttttagtttttatttttagacacccctcccctccagggtgatctttaaaaaacaaaacaaaaatttcgatttttccagcgctcagtgttttttgtccgaagccgtttctgatttgacttttctcgccggccggtctcaaggccgcccagacgttccagaggaggagggcgacatttttactccctttttggggctaaccatttatgcttttgtacatcaaccatgcgcggccagagggggacaggggcggggggcgaggggcgttccaatcagaatttctaactttctattaattattatcccctttataaagcggtttatgaagtcatttttaaattttttaatttttttttttttttacttatacatattacctcttgagtataagtagggaatttatagggaaatatgtactttaggaaataattttaagaactaaaatatattttattttgaataaagtaatgggcctttcatcttgcagctaaatcactgattatatatttgctgagctgatt

SEQ ID NO: 2467 - DNA, 764 bp, Macaca Fascicularis
  misc_feature (1)...(764): n = A,T,C or G
agtgcacagtcatgaataagatgttcctgccctggtgagtcttatattttagcaaattaaaaaaaatctttggacagggctgccaggtgaggttggccagtctgtacactgcacaaaggcacctggtcaagggggaacatgggggttnnnnnnnnnnnnnnnttctgcttgccaagctggcagtgctggtgtggagccttttaacccagaggggcatgtttttgtagttaacacacagtcatcataagtgtggataaatcactgtctccatgtcacagatctaagtgatacttacagtcacactcctataagggaatggactcctgacttctttggaggacctctctgcaggcacaggcacagtgtgctggaagtgccccgaaccccatttgtcaggtggtagggcagtgctcagaggaatcgnnnnnnnnnnnnnnnnnnnnacgtccagtggattgtnnnnnnnngcaccttccaaatggtcacttttcgtctcgggcctctctctgnnnnnnnnnnnctccctcttccagctcacctttttccttgggcctctcaaatgtcttctttccagatttcgtagcttttctttctttagcatcacatgagggcaagtggcgctacaactgtctttccccagagttctgccgcctctactctcccacacctcagtctcctcacctgtagannngggttaatcatttgtaccctgcttcactcggtgtgtatgtgaaggtgcttnnaaantcagtgctctgcaaaat

SEQ ID NO: 2468 - DNA, 2159 bp, Macaca Fascicularis
attcagaccttgacagttgtaaccgatagactgggctgggacgacgctgatgaaaggcaaattcctgagagaaaaatcacccaaattagcatttcagtgtggattcagaagacgagattaacacagatcaagtaacatggaaataaaaaaggagacaatgctggatgatacaggggcagataacaagaggagagaacccaagcattggcaaatgcgtcattatccaaagaacactgggcctgagtatgtatgtcagctggggtcagacaggaacaggagtctgactcaacacacatttattgcactcctgcttcatgccaagaaatgtaccaaaatctgggactgtgtaacacagcgaaggaaaagacttatctccaggaggcccccttgtctaggaagagaaactgaacatcagcataaggtggtgaaaagctatgaaggaggtgagtgtcacgagtccacggaggagggattctagcctggacaggtgaggactggctttctggaagaagcagatgccccagctcaactttaaagtgcccatgtgaaatgaactgtctgtaccttcaattctgcaggtggagtaggtggccactttaattctggaagggggaagtgtaaaggggtggtgtgtgtgtttacccctacttagggattcaaaacagacagtaaagaacagaggcaaggtcatatccatttgagaaaatcaaagtgtctgctccaattgagtctggtatccttattcctggaatagccgtccctactgctctggtgctgatttacctcctgcagttcagtgcttcctggaaagtaggctgggttttttaacaaagtgactccttacttggcatgttttacccatacacagaggccactgcactatgtgcaagaaacagcaaaaaattaaatgagactcagtgccttccttagggatctaaacccccagtaacacagataaacaggtaaacaaacaatggcaggatggtgtgattctatagcaacaggaatagggcactgcaggggcaaggaaggaaaaggtggtgatctggcttggattcagtgataaaaaggggcttacctcctttctctatttctgctaatagccagtgattaccccgtgcttttcccatatcggacatagctataagtactttggacatagtggcacatttaatcgtcatgcaacaagaggaagctgaggcagacagaagtgcccaaagtcacatagttgaagccaggacttgaacctgagctatctggctcctgaatccatgcctttcactaataatgacctactctacaatggggaacaagctccattctggcctttctttagtgaaggcaactgcctgagctcatggtctgatctggcttctgggaaagagaaagcaggggaaatgtctagagatggcatactgggagaagaaatttcttgctgtggaatcctgcccccatctcccaccccaccatacacaatcccacatgcacttacacctgcacgccatatacacacgaacatttttttctccgactcctgtgggccccaactctactttttcatcaaaatcactcagagttttaaataaaatgcagatgctggtgcttgttcctaaattataatcttgggcatctaattttttcattaaaaaaattgacgtgtatgcttaaagtaaaaatttagacagtacagcaaagaatgtgtttgtacccctcccatctaacccttagttcttcccaaatatttaacagttctttgtgatccttccagaaaacaatatatgcatttcccctctgtaggtgattgtggtaatagtcatgagaatctaggaactggctcctgctctgtctatcttggagatgaatcttttgtgagagacctgagcaggaatagggaggcttaggcaatggggagtttctgagtagacgaagcagatggcagagcaaagggacagaacctggagagaggctactccctgtaacaacctgcttaagagtgaaagaggaaagcaaggcatggctatgagcacgtgtagtcttggctacttgggaaactgaggctgggggatcacttgagcccaggagttcaagaccagcctaggcaacatagtgagaccctgtttctttaaaaaaaaaaaaaaaaaaaaaaaaaaaaaaaaaaa

SEQ ID NO: 2469 - DNA, 628 bp, Macaca Fascicularis
aaaaaaaggagcttacaatctaactgaagatgtcaaaacttgtgaaaaactagcagtattaagcaacaaaaacattagagccaaatgcatgataaaggctaaagaaggccagagcgtatattactgtagagtagaatagtaagggaaggctttgtccttcagtaaagagagaggagttggcctggcccttgacatagtagtgtttaggtatatgcttatgtggattcctaataagagcaactgaaaagaaggagaggggaagtagtaaagggacaagaaacaattttttttgaggaacgataagcaaattatagtttgacaagattggggggcatatatggttaccagggcattacctcgtatgtgttatacctttatatgtatttatttttggaaaagcgtgccctgcaaaattccctacagctgcaagcagatgtcagttgatggacagaggggaattttgcccctccggtatcaggaaattatatattaaagacattgtgaaacgctgaacctcttcccttaaataaaaggtttgtttgtaaaatgggaaatccacccataataaatgaacaataggcactgccagtttaggtctgttcatgactggatctgcaagagggcatct

SEQ ID NO: 2470 - DNA, 654 bp, Macaca Fascicularis
  misc_feature (1)...(654): n = A,T,C or G
gctttccctctcatggtacctgctcatggttatgaagctttcaaagtaaagaacacgaagtacctcccaagtattaccaataggtaccaaaaaacgtccccttgagtcttttccttttttttagactttaattctctcccttggcatccggttagccccccagggggggcagcattgtggagaacttgacgtttannnnnnnnnnnnnnnnnnngacacaaaaagaacccatctttgaatatcagtgattttttttttttctttaagtactgttccagggagaaaaactgtctcaaaacttgaacttcttgggaagagaagtgttaggctgagaagtcacattcccaggaaatagtgaggagctcgccctgtgtttgaccgttttggtctctgtattcctggaagaaaacggnnnnnnnnnnnnnnnnnnnnnnnnttctttaatgtgtctccgttggagcccaaagtgaaatccagaaagcagccagagctgacggctgccccaggactcatacttgctaagaattacatcgccgacttcaaacccagagagcatctttcttttaggtgaaaacacatatatttattttttgtaagttataccattctttcgcattagataaaccaagttttgggggatccttttgtaatgac

SEQ ID NO: 2471 - DNA, 2670 bp, Macaca Fascicularis
ttttgagctattttaaacagtgtttcagtgctgagatgtataaatggaaggatttgttgctagttgcagtgacttcagcacttgaggagagcaaatttcacactgagactgatttagcctacataaactcctggtaagaatacccatttctgagccttcctctggctctttgaaagacggcatcatagatatctggggagactaacattgtaatactctgttctcacattcatcgcttcacctaatcataaattaaaagttaaattttagttaccagactcctaaagttcactgtggcatggtctaaactaaggattcaaatgctcccccaggtttttgttccatttgattttgttagaagtgccatgttttctctggtagaagtatgtctagataacggcctcactgtgcttctgccggctctccccaggcaggccttcagttttaaggtcatgctaaggcccatttggttcaaggtatgtcagatttggtagccaacagagatctgtttctgtccaggggcttgtagggcatgcacatggtgttttctgagcactccttggggttgttttcttttaaaataaggcattctctctactttgtagcttcaattcaggatatggtttatcaatattaccaagtgttccaattcacctcctcccccttttcctatagaaagtgatttcaggatgtttcactactccacttagtccccagcacattgctgacactcaataaatgtcaaataatgccgcaatatggttagtgtgtgctctttaagctttctgaaagaatgactctttattttcattgttgagtagtggtatatttttccacttgttaactggaaagaaattagagtcaggttgttcatttatatacctctatggctacatttctatactcagacaagctcagagtttaaattcgtttgaaaaagtgtttaaatgaatattctgggtgatatacaatgctttgtctaaaagatcatgtctcagttggatatggttgagtgttgaatctatattaaaaagggaacaattactcttccataaatggggatggctgaggctcatatttatgagaatttcagtaaggtgaaaagcatgtaatattttgggcttgggaatgaaatactgtctaaggaacacaattcaattaagcttgtttatgcaacataaacaagatacctggataaattattttatttcatttttatcccacttttgtcaaaacaatgtttaagacgttacttcttgcctcacaaaatactaagtgagaattgcttgtcttttaaataccctgattcaagaaggtttttatttgtcagatgattcagtcagtaatcagtcccaacccaagtagagaaatgaaatatatgttatcctactttcccccttggagtgtgggtgggtcatctttccagtagaggtgtgggtaataccctctaactatgagtatcggggggagggaaaaaataaatcagtttgagagtagaaactctttatcattctcaattgacctagagttcattgtactgtttctgtaacttcacgtgtgatataaaaatttggttttccccatgctttatctttagtcagaaaaaaattccactagatatgagaccaactgacacctgatgtattattgtccagaggcgaacgcaagtgaactggtggcactcaggcatgagtagtgttactaagggaatcacctgaacaatgagtttaagaaatggagtatgttaagtgaacattttaacactttattcttccttctggttttaacatgatgatatgttaacttaattaaaatgtaactattctgtaattgtctctactgtgagactgctttctatgagggagaggctgtttttcttattcattattgtatccccagggcctaacacagtgcctagcatttgcgtgagctcaatagcgtgagggaaagaatgcacggatgcaaaactttccccttctgttatatggagaagatagaaataatggcagttgctaatataaagcattcttaaagtaagtgaactctagaagtctagaacttcaaatgcaagtgggatgaaaatggaaatacagattcagactcccagaggaaatagtttgaggacaaaaggaaatagttcatttaaaaagtaataacctcagtaatatacaaactgtataaatgagtgctgtttgaactaaatggaattccatgacattgtcctttaagaaaaaaaagagcatagatgttttattgtaaattgtcttaacattgttctcataatcttaacgtttattattcaaaaatgctctgtagataactacactaagcattctaaatctttacttcttcagttctagcgaagtattcacaaatttcaagttttctattagttttaaaagttaagcaggaggagagccagaagacaattacaattctctgttcataagttttcacttctgttttctgctagaactattaagttcacagggctcagacaaagacttgaggactctcacagttattgattgtgacttcacaagacgagggtcgtgtttatttgtcattataaatctggaaagataaaccctgtgcttttcctgttaaggggctggataggaatacgtgtctagcaagtcagtaaaaaaaaaaaaaaaaaaaaaaaaaaaa

SEQ ID NO: 2472 - DNA, 1075 bp, Macaca Fascicularis
  misc_feature (1)...(1075): n = A,T,C or G
cttatacctaattttagtctttcaaatgaatgtacnnnnnnnnntgtatgtataaatcctatgaacaaatagagggcttttgtaaattatgcatttattgtaattatcattaattttttaatgataaaccatgaaaaggattttactacatttataaaattatgacagaagcaatgtgcattatccttgacagacgcagcctagctctacagcaatcattctgaaataagcatacctaatttcaagcaattgtattttaatgactgaccttaactatactttttctagtaagaaatgctttattctgcagcatgaacagatttaaaatagctggtgttaaatatcagctcctaataaaatgtggactgaaaagactatcacaacactannnnnnnnnnnnnnnnctggttaacgctttcctagcctagtctctggatttggggagcttgtcttcagtggctgacagagaccgtgagctgggnnnnnnnnnnnnngctggagagactcgggatggggtaacctggggaccagcccagcccctgcgccctcttccctgcctctgctccttgggagcgggtggagagacacccatgtagctccccttggggccagccaccaacaccacgcgcaagtccgcgcacacagcggatgaaggcaggagacccagaaagcagtgcagtgcagctctaataaaggccttatttttcttatgtaaatcatctttttacatttgtttgtaaacatgtttaaagaatgaacctagtgggacatttttagaccttgatgttatagccattttggattgtgtaagttgcagatgtggcttttactttttcagtggcatattaaaaagccagcaaagcgtgtcannnnnnnnnnnnnnnnnnnntgtgcagcagatacagaggtggaggcagcctgtcttttcacagttggtttctgcttttaatttacttgtacaattcattgttactgttctgtttttctattaatcttttgcgaacttcctgactatgtaacaaagtatgtacagtctacttttgaactatttttatcannagtattatttattgct

SEQ ID NO: 2473 - DNA, 756 bp, Macaca Fascicularis
  misc_feature (1)...(756): n = A,T,C or G
agcaaagaagcaatctnngcaagtngagaagtgggaagcaacgtgagagaaagggagctgcccagcaggaatnntcagcgtgtggtccctaggccaacaccaccagcacaccttgcccnnnnnnnnnnnnnnnnnnnnnaaactgccagcgcaaggcccagcagtctttcagtaagccctccaggggactctggtgcatgctcaagtttgagaaccatagactttgacacagttaaaaagatgttttaatggactggtctccttctaagctctgagatgctctcatattccctccataagtaaagagatttttttttttgtataattctttgcagaaactgttaatgtctttatttctcatattttttttcccttgcaagctcctgaaagatctttttgaaaaattgacaaaggatgctatcaaaggctatgtttagatggatggaaataaccttgaaaatggataaagccnnnnnnnnnnnnnnnnnnnnnnnnnnnnnnnnnnnnnnnnnnnnnnnnnnnnnnnnnnnnnnnnnnnnnnnnnnnnnnnnnnnnnnnnnnnnnnnnnnnnnnnnnnnnnnnnnnnnnnnnnnnnnnnnnnnnnnnnnnnnnnnnnnnnnnnnnnnnnnnnnnnncagctgcttgggaggcagaggcaagaggatcactcggacccaggaggnnnnnnnnnnnnnnnnccnnnnnnnnnnnnnnnnnnnnnnnnnnnnnnnnagagcgagatcctgtatcaaaaaa

SEQ ID NO: 2474 - DNA, 749 bp, Macaca Fascicularis
  misc_feature (1)...(749): n = A,T,C or G
tgttttannnacagttcctgagcaatagctgatgtctccttactaaactgtatccagctctgaaaatgtttcagaatgtttctaatatttaaacattgttgtaagacctttaaaccgtagataatgattctgctttttcagaaagacacattctgctaccctgagttagcgatatattcaggaaatttcccaggaagagtgagaaaataatacagccttggatggttctgttgtttagagaagaggtctctaaacttttttgatcactcagcttaaaaagatattaacccatggcccggcatgnnnnnnnnnnnnnnnnnnnnnnnnnnnnnnnnnnnnnnnnnnnnnnnnnnnnnnnnnnnnnnnnnnnnnnnnnnnnnnnnnnnnnnnnnnnnnnnnnnnnnnnnnnnnnnnnnnnnnnnnnnnnnnnnnnnnnnnnnnnnnnnnnnnnnnnnnnnnnnnnnnnnnnnnnnnnnnnnnnnnnnnnnnnnnnnnnnnnnnnnnnnnnnnnnnnnnnnnnnnnnnnnnnnnnnnnnnnnnnnnnnnnnnnnnnnnnnnnnnnnnnnnnnnactcaaaaaataaaaaagatattaatccacgtttcagtaaattaaatgtatttatgaatttaaagtatgctttattgtactaatgtgtgtatttataacatatatatgtttgtatatttttcaannnntgaattatgtttcactatttatattccaacataaattgaaaagaatgaggt

SEQ ID NO: 2475 - DNA, 760 bp, Macaca Fascicularis
  misc_feature (1)...(760): n = A,T,C or G
gtagctatagtatgctacgggccattagagannnnntctngnnnactggaaacaagataggctttaaaccagcaggaggcatccgcagtgcannnnnnnnnnnnnnnnnnntctctcttgtaaaggaggagcttggagatgagtggctgaagccagaactctttcgtataggtgccagtactctgcnnnnnnnnnnnnnnnnnnnnnnnnnnnnnnnnnnnnnnnnnnnnnnnnnnnnnnnnnnnnnnnnnccaatgtcttaaattagtcaccacnnnnnnnnnnnnnnnnnnngacaacgcttaaaaattatttttctacacaattgctaagattatttaattaaaacattgggtgataagtaactggcattcctctccttaaaatttctaccgagcttaaagaatggaatggaaaaaccaaactcatccacatgtggtactcgnnnnnnnnnnnnnnnaaatgatcttaattactagaagatctgcactattaactttgtgaagggtttctcctaaaaacccttaagtaaaatgttaatggtagctttgacaacatcaaattctaannnnnnnnnnnnnnnnnnnaaactgcccaagcagtgtgccctagcaaaggaaaatgcaacattccgcaagtgctgccgtaacgacttcnnnnnnnnnnnnnnnnnnnnnnatttcctgccgtgaaaactcatcttnnnnnnnnnnnnnnngtatgtgcttttattaattgtcgtgctgatgaactttctggc

SEQ ID NO: 2476 - DNA, 2298 bp, Macaca Fascicularis
cttctgcctcagcctcccgagtagctgggatgggactacagatgcacgccaccacacctggcaattttttttagttttgtggagacaaggtcccatgtgagccactgtgccccaccttttaaagaaattaccataaggaagcaactgtctttagcaaatagaagatcataaacatccttctggagatcttgagatgttgactgcggtttatagggcaatgaaaatctgcctacctgagtgggcaatgagacgggagtgccacctgtgatccttccagggagcaattctttctggtgccaggagcccaaaggaaactcagtcaaccagctacagatgggcttgctccgagtttgttctagaagtcagaactgccagctctgaaaataggtcacaagtgacaggccgtccctgggctgctcacaggaagtagctgcaaaggtcagggaaagtttttaacgactatacaggccagtgaatgacaggctttgaggagcttctcttcttggcatctgaaacagcatactttctgactaccgctgtgtgctgtgaggggctgaggatccagacgtggctgaggaaggtcccggctcatgaggaggtggaagcctgggtgcttaaacagataatccagagtttggatgtgaggtggtgaatcactctggcttcatttggttatactggtcaagagtttggctctggagcaacgtgtctgggtttgaatcctggctgtgcttttggtgatcctccattgttttgaagcacaagacctttaaaccactgtaggtatggacaaggaagaaaggaagatcatcaatcagggtcaagaagatgaaatggagatttatggttacaatttgagtcgctggaagcttgccatagtttctttaggagtgatttgcactggtgggtttctcctcctcctcctctattggatgcctgagtggcgggtgaaagcgacctgtgtcagagctgcaattaaagactgtgacgtagtgctgctgaggactactgatgaattcaaaatgtggttttgtgcaaaaattcgcgttctttctttggaaactcacccaatttcaagtccaaaatctatgtctaataagctttcaaatggccatgcagtttgtttaactgagaatcccactggagaaaataggcacgggatcagtaaatattcacaggctgaatcacaacagattcgttatttcacccatcatagtgtaaaatatttctggaatgataccattcacaattttgatttcttaaagggactggatgaaggtgtttcttgtacgtcaatttatgaaaagcatagtgcaggactgacaaaggggatgcatgcctacagaaaactgctttatggagtaaatgaaattgctgtaaaagtgccttctgtttttaagcttctaattaaagaggttctcaacccattttacattttccagctgttcagtgttatactgtggagcactgatgaatactattactatgctctagctattgtggttatgtccatagtatcaatcgtaagctcactgtattccattagaaagcaatatgttatgttgcatgacatggtggcaactcatagtactgtaagagtttcagtttgtagagtaaatgaagaaatagaagaaatcttttctactgaccttgtgccaggagatgtcatggtcattccattaaatgggacaataatgccttgcgatgctgtacttattaatggtacctgcattgtaaatgaaagcatgttaacaggagaaagtgttccagtgacaaagactaacttgccaaatccttcggtggatgtgaaaggaataggagatgaattatataatccagaaacacataaacgacatactttgttttgtgggacaactgttattcagactcgtttctacaccggagaactcgtcaaagccatagttgttagaacaggatttagtacttccaaaggacagcttgttcgttccatattgtatcccaaaccaactgattttaaactctacagagatgcctacttgtttctactatgtcttgtggcagttgctggcattggatttatctatactattattaatagcattttaaatgaggtacaagttggggtcataattatcgagtctcttgatattatcacaatcactgtgccccccgcacttcccgctgcaatgactgctggtattgtgtatgctcagagaagactgaaaaaaatcggtattttctgtatcagtccccaaagaataaatatttgtggacagctgaaaaaaaaaaaaaaaaaaaaaaaaaaaaaaaaaaaaa

SEQ ID NO: 2477 - DNA, 744 bp, Macaca Fascicularis
  misc_feature (1)...(744): n = A,T,C or G
tggtcagttcaaanntcagannnnnctacatatnnnctgccatgcccatcaggagtttgggaaaaatattctcacacagacccttactttgcatgcagtttagagggtcagatatgtgcttcttctggggatagagatttccttaattgtcaaannnnnnnnnnnnnnnnnagtctgttgggaaaaatagtgattaaaagcacttccaaaattaacatttttgacaattcagatatgataagaagcagaggaaaataacacactttactcttttcttgcttaaaggcaaacnnnnnnnngaaacttgaggacacactaaacatttgataactnnnnnnnnnnnnnaaaaattggttcaatggtgcttatacatgaaacagtaacaaatggggttcctaggactgtcagaaggaatctttagtttgtatgtaattacatactagaggaggaggtgcttttaagcctgtcttttatttttaatcatctcaaatatgcaaccattcatccagtaacattaagggtcgtaaaccggtgggaaacaggaaattcaatgnnnnnnnntaaatgcctctggtgagagcggggatttttgtttgttgtttnnnnnnnnnnnnnnnnnnnnnnnnnnnnnnnnnnnnnnnatcaagtttctaactggcatgtgttttgatcatgacatttaccatatcttgcccatacagacaaatgagagatctagtttaatttttttccctgaagaaagag

SEQ ID NO: 2478 - DNA, 337 bp, Macaca Fascicularis
ccccggcccccccaccccgccctcagcccgccagggtccagggagacatttgttcttgctttaagtcaggagtcacaaatgacttttttttcaattaaggaaaaagctccatctctacctttaacatcacccagacccctgcccctgcccgtgccccacgctgctgctaacgacagtatgatgcttactctgctactcggaaactatttttatgtaattaatgtatgctttcttgtttataaatgcctgatttaaaaagaaaagaaaaagagcttggcatatttatctatttcgctgtgtacctgttagtccttccccgaccccgaaacagatgaca

SEQ ID NO: 2479 - DNA, 726 bp, Macaca Fascicularis
  misc_feature (1)...(726): n = A,T,C or G
caggagagcttccaggggagggccccccagggaaggcaggtgtnntcggcttccctctgggtgccgctgtggcctgtgggtgccacggccattggcatggctggcctggtctcnnnnnnnnnnnnnnnnnnnnnnnnnnnnatgggggagggtggcacaactgcnnnnnnnnnnnnnnnnnnnnnnnnaggtcccatgggccttgccagcagctctggccagagctgcccctaggctacccctcaaatccaaggtctgcagcctcacactggtgtcacgcctggacctctgaagacgccctgcacgccnnnnnnnnnnnnnnnnnnnnnntcgtctccagggcgtctctggccgagcctctttttgtggaaaacgacagcagcagcagtggcttggaagacgccaccgctaactgaccccgacctggccccgctccaggatgggactgccgagtgtggcccggagctggcccgggacagccagggcagcagggagggcccctggctgggagccacagcgctcactcatttctcctgcgtctgtgtgcgtggggcacgatactaatgaccacatggctggcgtgaccttgggactggggctgaggctgggcctaagctggtgccctggtgcagcgtggcctctcccaggaggcctggggcatgagctgggcccacggctcccttcccatgtgtaacttcctcatgttgtgtgcgataatgtatttta

SEQ ID NO: 2480 - DNA, 101 bp, Macaca Fascicularis
agggaggaggagtagtagataagattctgccccccaattatgagcagccacattatgaagaaaatcatcacagccaagtaataacccacgaagggtagtag

SEQ ID NO: 2481 - DNA, 716 bp, Macaca Fascicularis
  misc_feature (1)...(716): n = A,T,C or G
atgttaaaccttttttaatatgacatcctccctgtcattctcttctcccctctcccgcagacttccctcccactgggtccaggttcagaaccaagacttctgtacctggtgctgcctgattggtgaacnnnnnnnnnnnnnnnnnnnnnnnnnnnnnnnnnnannnnnnnnnnnncttcctaaagtttcgggaagcagggttgtctaatatgcacatttcttactttggtcatatttttactttagtgccactcacctttgacaaagtgactttgtactcatttagggctctattggaaatgcttccattttgccttttctacagttagggcaattttgaaatgtataaattctatgcaacatttannnnnnnnnnnnnnnggaagccaaaagttctcttcccaaactgccaagaatgatacaggccataagtgaaatgggaagtttcattaggggtggggtgggagtgggacaggaacaagacttgcctagatctttgttgtatcttggggacttttactttgttgtttgatgcttaaacttcaaaattctctgtattcaaatttgattgtggcgaatctacttcaaaaaggaaaaataatccaactttgaggatattaaatggaaggtttgctgttttgatctagttgtttccagtggagcagtttatgaaatatgttctataagatgtacattttttcattgtaacatagaaa

SEQ ID NO: 2482 - DNA, 760 bp, Macaca Fascicularis
  misc_feature (1)...(760): n = A,T,C or G
gagtgnnnggcactttctgaattctttgttacttttacttttgtagttnnnnnnnnnnnnnnnctgagcctgagaactcagccctactgcgttgtgcccnnnnnnnnnnnnnnnnnnnnnnnnnnnnnnnnnnnnnnnnnnnattggcattgatgctcaatgacatggagttggtagaagacatcttcacctcctgcaaggatgtgtatgtagggaagaagttggcaannnnnnnnnnnnnnnnnnnnnnnnnnngcataaagnnnnnnnnnnnnnnnnnnntggttagggcttgaggggttttcctgtgcccttagtgggcagtggtgagnnnnnnnnnnnnnnnnnnnnnnnnnnnnnnnnnnnnnnnnnnnnnnnnnnnnnnnnnnnnnnnnnnnnnnnnnnnngagctaagtgaagacgttgaggagtatgaggacctgacagagatcatgtccaatgtacagctcaacnnnnnnnnnnnnnccttagctcgggaggnnnnnnnnnncttttttcatcaaggcctttttatcataattctacctgccatttcacctcgccgactatacctctgactagactctccttgattagaattgcnnnnnnnnnnnnnnnnnnnnnnnnnnnnnnngggagttctaggggagcagttgtgaccctctgacttctnnnnnnnnnnnnnnnnnnnnnnnnnnnnnnnnnnnnnnnnnnnnnnnnnnnnnnnnnnagaacaacagtgagtatccctctctgtgta

SEQ ID NO: 2483 - DNA, 626 bp, Macaca Fascicularis
  misc_feature (1)...(626): n = A,T,C or G
tgtgcccggttcagggctgtcttgagtccnnnnnnnnnnnnnnnatgtccacccctcactgggagggtgcggctggcctgccccgccccaccctgccctgcccacccacgctgctgggagggtgatggatcagagtgggggcaccctgccttgtctaggtcacgtagggtgagcagagggcggtgcaccttggnnnnnnnnnnnnnnnnnnnnggcacctgaccctccctgccccccagagcnnnnnnnnnnnnnnnnnnnnnnnnnnnnnnnnnnnnncggactgtaggcatccagcactggggatccctggggcattgggcagnnnnnnnnnnnnnnnnnnnnnntggcttctgccctaaattaaaaccacgtttttctctttcaggaatcccttcgcccatgtccagctgaagccgacagtgaccaacgacaggtctgcccctctcctnnnnnnnnnnnnnnnnnnnnnnnnnnnnnnnnnnnnnnnnnnnnnnnnntctgcccatgcagcctgttctgtcatcctctgcgcgctcctgttaagagaacatccaggccgggcgcgnnnnnnnnnnnnnnnnnnnnnnnnnnnttgggaggccgagacgggcggatcacgaggt

SEQ ID NO: 2484 - DNA, 1236 bp, Macaca Fascicularis
  misc_feature (1)...(1236): n = A,T,C or G
tctttcagcttaagtacttattgtggtagtgagtcctacagtatttcagtaaaaaggaattcatggcataaatgtggacagatttacggatgtagaaacatgatgatagatatcatgaggttagtgatgggacatataacggcatcattggtagtaccaggtgggtgaggcaggtcccagaaggatacaggctcattcccaaggctgcatgagcagttgaatggaggggctgtttaccgtggtatcttagtttgctagggctgcaccagagaccaagaaccttcaacaacaggaatgtatttccttgcagttctagaagctagacacccaggatctggcagggctggtttctcctgaggcctctctctgggcttgtagatgccatctcctccctgcatcctcaagtggtcatccctctgtatatgtctgtgtctaaatttctcctcctcctcctcctcctccttctcttcttccttcttcctcctcctccttcttcttcttccttcttcttcctcctctttctcttcttcctcctcctcctccttcttcttctttcttctcctttcttcttctccctctccttcttctctcccttcccagccttcctcactttcaatagcacctccctttgatcaaacccatctgggtttggacctcctgggccnnnnnnnnnnnnnnnnnnnnnnnnnnnnnnnnnnnnnnnnnnnnnnnnnnnnnnnnncacagggtcaggagatcgagaccatcctgggcaacattgtgagactccatctctagaaaacaaaaccaaacaacaacaaagaaaccccaaggcctagcagggagggaagacggagaagaccccacctctctcccttcccagcctgggtgacaaggtgagactctgtctcaaaataaataaataaaaagagcatgaagaagggctggtgaagtgcccaggaactggcaacagcagaaaactttatcatcccttaggctggagaggcaaaggagagagagaaggtggagttgctgggatcagtgaagagctgtagccacggaagaggggccgtccaccaggacatgtgtggtgtggccgagcgacacagccacatcaaaactgaggcctgggattccaggcacgagcccccgcgcccagcctgcatgttgtcttaaggaatattcgggttatctatttctgtgtaataaaccaccctgaatgcaaaaaaaaaaaaaaaaaaaaaaaaaaaaaaaaaa

SEQ ID NO: 2485 - DNA, 713 bp, Macaca Fascicularis
  misc_feature (1)...(713): n = A,T,C or G
gggcagaaatggcagcctccatcagaacaggggacgaggcacccacagtcnctctcccataagcctgccaagaagattgatgtggcccgtgtaacatacagtcaggggataaggcacccacagtccctctcccataagcctgccagaagattgatgtggcccgtataacgtactccctttcctacgatctgcactgctgtggggccaaacgcatcgtgaaggaagctctccgctgggcccnnnnnnnnnnnnnnnnnncgggccacgtgatgcttggcacctcctgttaccnnnnnnnnnnnnnnnatgctacggaggaagggcagccccccaagggcaaggcctcatccctcatcccgacctgtctgaggatacttcagtgaaagcccaagtccttggaagctttccccagtgaaggactagactaggggccccacgcttaactggtagtgnnnnnnnnnnnnnnnnctgtagagctgctaacctccccacacctccttcaccgtgtaggacctgagtgaggaggaggggctggaaacctggggtgggatggccaaaggagaacctcaggctcctggcctggcccagctccttcctgcccaaggcagcttagcccacccagactggtcctgaagtctgcccctcagcaatccagcctcacaggctgcactttcatggtgctctctaccttctggcccccatcccagaacatt

SEQ ID NO: 2486 - DNA, 1839 bp, Macaca Fascicularis
gcagactctgcgcgtgcccagagggagggatggcaggcttcagccacttctcccagccgccctaccgggacctctgggaacccccgcggcccggcggagagcgagagtccacgcagcggctgggcgggcagaggtccggagccaactcccccgcgtgctcccgggccgagactccgggtgcggagagcgaagctggggcgtgctggctgcacccgcactgttcgttcacgccgcggcctcgcaggcgcgggtgctcagactcaccgcggggcagccgaagcctgagcgatgtggtccgcaggcccctggaccgctccaggaagcacgggctccgcagcaggcgcctagaagatgcctggggagagacaggaaccaagccccgcccagcttggcagccgcagacccagctgccaccccagcggccgcagccctgcccgcattacccactggcccagggagactcgcccccgccttactccggaggagctggcactcccctgagtggcacattcagggtagaaaaggcacagggtggagaccagtgggcagtgccgctcggcagacatctaggtcgctggtccgcttcctcagttccctcggagcggtcttctgtgccctcccaaaagttcaggaggcactcagcctgcgggtgcgcccagaagagagacagcagcgaccaggttgagtcattagcaagccgggactcccagccctcggcctctagcaaagagatgcggagcccccacacccaggtcctgaagagcaagctggaagaggcagtggtgtcctcccaggaccagcagattgtggccctcgtgttgacccgtctcaagaaggcccagaggatgcgggagctgcagcagcaggcggctgaggcctgggaggagttgaagcgctcggatcagaaggtccagatgaccttggagcgggaacgccggctgctgctgcagcagagccaggagcagtggcaggagaaggagcagcgcaagaccctccaaagccctgagcagcgctgccggcggcgggacagccagaggaagaacgtgaccccgggggaaagccggtggaaggaacaaactgaggaaacaagaaaatgatgatctaccacaactccaattttcagagagacaagcccaggctcctggagaatatccagagaaaagatgacctcagaaacacggctcagcaagcaacctgtgtcccaactccaaagagaaagaagctggtagctacaagacgctccctacgtatctatcacatcaatgccaagaaagaagccatcaaaatgtgtcagcggggagcccccaatgttcagggacccagtggcactcagtccttcatgttctctggcatgtggtccaagaacagtatcactgggcatcccctgggaaataggccccctcaggaaccaaatggcccaagttgggagggcacctctgggaatgtcacatttgcatcttcggctactgcctggatggaaggcatagggcaagtgcctagtagcccggtttactcagataatggtagtgtattgtctttgtacaatatctgttactccattctgttggccaccctctcagtcatgtctccaaatgaaccctctgacaatgacgaggagcaggaaggctcctcagattacaagtgtaaactctgtgaacagttcagaaacaatgcaagtccgtgaactcacaggccactaatgaccgataaaagttgccatttgcaaatgagaaacacatttttggtcttaataaagaaaaacaaaattccatggaaataaataataaacaatttaaatgagaaaaaaaaaaaaaaaaaaaaaaaaaaaaaaaaaaaaaa

SEQ ID NO: 2487 - DNA, 1940 bp, Macaca Fascicularis
atcggaaggtgttgcaagagtttgcgaagtcatgaagaacaaagttttttagagccattatgaaatggcaacggtaatactgcactctgtgtgcataaattcggtttccttcatctggggcacatgcatatgatcaactttagacttcttttgagattgccaggaactctgccagacagggattacagcagtaggcaagaccaatccactgcctgccttcatggaacttacattctgatgagaaagaaagattatttacataattaacagtgtgattaatattataaatcagtacagaatgtttttggactatgtaacagtaaaacttctagttttgttgaaggaatgtgcaggaaaaacagaaacttgagaggtgacctaagatggaggtgggggtggcacactttctactgaagtactaaggtgtttgcaatggctgctactgtgaacttggaacttgatcccatttttttgaaagcactaggtttcttacattcaaagagtaaagattctgctgaaaagctaaaagcactgcttgatgaatctttggctcggggcattgattccagttaccgtccatctcaaaaggatgtggagccacccaaaatttcaagcacaaaaaacatttccattaagcaagagcccaaaatatcatccagtcttccttctggtaataataatggcaaggtcctcacaacagaaaaggtaaagaaagaagccgaaaagagacctgctgataaaatgaaatcagacatcactgaaggagttgatattccaaagaaacctagattggagaaaccagaaacacagtcctctcccattactgtccaaactagcaaggatttagctatggctgacctttccagttttgaggagaccagtgctgatgattttgccatggagatgggattggcctgcgttgtttgtaggcaaatgatggtggcatctggcaatcaattagtagaatgtcaggagtgccataatctctaccaccgagattgccataaaccccaggtgacagacaaggaagcgaatgaccctcgcctggtgtggtactgtgcccgatgtaccagacaaatgaaaagaatggctcaaaaaactcagaaaccaccacagaaaccagcccctgcagttgtttctgtaactccagctgtcaaagatccattggttaagaaaccagaaactaaactgaaacaagagacaacttttctagcatttaagagaacagaagtcaagacatccacagttatttcaggaaattcttctagtgccagcgtttcctcgtcagtaactagtggcttaactggatgggcagcttttgcagccaaaacttcctctgctggtccctcaacagcaaaattgagttcaacaacacaaaacagtactgggaaacctgctacctcatcagctaaccagaaacctgtgggtttgactggtctggcaacatcatccaaaggtggaataggttccaaaataggttccaataacagcactacgcccactgtaccattaaaaccacctccacctctaaccttgggtaaaactggccttagtcgctcagttagttgtgacaatgtcagcaaagtaggtcttcctagtccaagtagtttagttccaggaaacagcagccaactaagtgggaatggaaatactggaacatcaggacctagtggaagtactactagcaaaactacttcagaatccagcagctctccctcagcatcccttaaaggtccaacttcacaagaatcacagctcaatgctatgaagcgattacagatggtcaagaagaaagctgcccaaaagaaactcaagaagtaatgtggccaagtaggtttttatatcatattagcctaaagatgaaaggcttattattaagatatatgtaatatactgtaatttaataaaagtcttcataatcaaaaaaaaaaaaaaaaaaa

SEQ ID NO: 2488 - DNA, 327 bp, Macaca Fascicularis
atgattcttcagaggctcttcaggttctcctctatcattcggtcagcagtctcagtccattttcggaggaacattggtgttacagcagtagcatttaataaggaacttgatcctgtacagaaactctttgtggacaagattagagaatacaaatctaagcgacagacatctggaggacctgttgatactggtccggagtatcagcaagagctggagaaggagctttttaagctcaagcaaatgtttggtaaagcagacatgaatacatttcccaccttcaaatttgaagatcccaaatttgaagtcatcgaaaaacccccggcctga

SEQ ID NO: 2489 - DNA, 601 bp, Macaca Fascicularis
  misc_feature (1)...(601): n = A,T,C or G
ccctccattggatccttgcacntgaacagtgcaaggatgtacgtgtgcaatactttgctgaatgaaattaaagccctgggcagggtgactcaaaaaaagaacccaacctggccgatcgcggtggctcacgcctgtaatcccaccaatttgggaggccgaggcgggcggatcacctgaggtcgggagtttgnnnnnnnnnnnnnnnnnnnnnnnnnnnnnnnnnnnnnnnnnnnnnnnnnnnnnnnnnnnnnnnnnnnnnnnnnnnnnnnnnnnnnnnnnnnnnnnnnnnnnnnnnnnnnnnnnnnnnnnnnnnnnnnnnnnnnnnnnnnnnnnnnnnnnnnnnnnnnnnnnnnnnnnnnnnnnnnnnnnnnnnnnnnnnnnnnnnnnnnnnnnnnnnnnnnnnaccccaacctttaaggagcttacagtttatggagtatatgttgttgttgtttttagcatttatagaggcagttttgtggtggttaaaggcacaagcatggaatctgaataacccgatttaaatcccagctcagcctctcggggacaatgtccctgagcttatttcaactgtaaaataaaatgtgtcttgctacaaaat

SEQ ID NO: 2490 - DNA, 1912 bp, Macaca Fascicularis
gtgtcattcaaatttcagtattttgtgcaagtttggccttgggtgattttctgtgaaatatctgcagtaagaattcaagggacaataggagataccatggctactgtgaggaaatgaaagaggctttatttcagacactcagtatgaagctccccaaatgaaatgccaaacaaagctaatccactcaatctaatacagaatttacagtaaaacagagaaattctttaccattagcacttcagaaaaagtgcaggaaataaaattagcctcaaggaaaggaacaaagccatgagataaaatcctattactgatgtgacaaacagcaacatcattccctgtggcatctagacatcctcatccgcaaggtaatacctcccggtaattccaggtggaaatgacttctgatccacttgaaggtggaagttgagttggaacttgttagttcctaagaaggtaggtattttgaaggtaaacatgtttcattaatctttcttccataggaacagctcaagaattagtttagattttaatttttctattttgctgagtgaaaaagtatggcttttagtggcatgtgttaacttgaccactcttggggaccagaagcttgtcactcgtgtatttttcttagaatgtagcatttgatacttttaattggaaatttggtggtgctaatagcttgttttacatatgtatgggttactgaccagtccagattttttgtccatttttctggaaagggaaaagataaaacagacttgaataacttttgtttggaaactgtagaagtataatgaaaacttaacctgtggagaaggaagaaagtgatcctctcattttctgatctcatatttttcttattttccgtgtctttctcccttccagtatctgagagatttcttcaatttcaaactcttttacttctgctacctatcattttaaattttgatttaaacctttccctgagggttttctgtagtattctgtccttgcttcatggatagactatcttccgttatctgagactattactggtagcttttttgtttattttcttcttcctgcataatcgtttcttccaccttgctctcttctgtttattttgatgtctgtgttttgtgttcagtgttttctttgattagtttcttgtttagaatcatgcaaaggccaaatcctcataatgagaatcctcatttgcggtttcgtgtagttctctaattatcatgaagtgtaatagaaaggtgggatagtgtatcactcacagaagctgctaaaagtactcagaattctagagctgctaatattaaaaacaaaaatgaccttgtgttttgcttgattaaaattaagccttaagtttagaacatctttaaacttggtttaaaatatttattttagggtgtttgccagcttcccagtaaaaatgatgaaaaagaatatccacacagaagaattgatatcaggttgatacccaaagatcagtattactgtggtgttctctatttcactgggagtgatattttcaataagaatatgagggctcatgccctagaaaagggtttcacaatcaatgagtacaccatccgtcccttgggagtcactggagttgctggagaaccccttccagtggatagtgagaaagacatctttgattacatccagtggaaataccgagaacccaaggaccggagtgaatgaggcctgtgtcctccctggcagacacagcacaataggagtcttaatttatttcttaacctttgctatgtaagggtctttagtgtttttaaatgattgtttcttcttcatgctttcgcttgcaatgtagtcaataaaaccttgtgtactgttattggaaaaaaaaaaaaaaaaaaaaaaaaaaaaaaaaaaaaaaaaaaaaaaaaaaaaaaaaaaaaaa

SEQ ID NO: 2491 - DNA, 110 bp, Macaca Fascicularis
ctccccatcctctactcccgctgctcagcctgggccattgcaagggtgccacacaatgtcttgtccactctgggccacttctgagtgtgaagcgggatgctataaaaaac

SEQ ID NO: 2492 - DNA, 712 bp, Macaca Fascicularis
tggaggagttcgtggaagagttccctctttgtttctgtcttcatttttctttctcttcttttctcctaaagcttttatttaacagtgcaaaaggatcagttttttttgtttgcttttttaaacttgaatttttttaatttacactttttagttttaattttcttgtatattttgctagctatgagcttttaaataaaattcaaagttctggaaaagtttgaaataatgaaataaaaagaagccttctttttctgagacagcttctctggtaagtggcttctctgtgaattgcctgtaacacatagtggcttctctgcccttgtaaggtgttcagtagagctaaataaatgtaatagccaaatctactctgttggtagcaattggcagccctatttcagtttattttttcttcggttttcttcttttttttaaaacagtaaaccttaacagatgcattcagcagactggtttgcagtgaattttcatttctttccttatcacccccttgttgtaaaaagcccagcacttgaattgttattactttaaatgttctgtatttgtatctgtttttattagccaattagtgggattttatgccagttgttaaaatgagcattgatgtacccattttttttaaatagcaaggcacagcctttgcccaaaactgtcatcctaatgtttgtcattccagtttgagttaacgtgctgagca

SEQ ID NO: 2493 - DNA, 644 bp, Macaca Fascicularis
  misc_feature (1)...(644): n = A,T,C or G
gagccccatgaccacgtccactgccggctgttcacacttgctcagcccttgagccccatggccccgcccactgctccgcccccggccccgccctcattcactgggctctcgattcccccctccctccctggcctggcagagctggacctgcagcggacgctgagtttgcaggcgccacctgtgaaggaggggccactcttcatccacaggaccaagggcaagggtcccctcatgtcctcctccttcaagaagctctacttcttcctcaccaccgaggccctcagcttcgccaagacgcccagctccaaggtgggtaaggagggaggccggcaagtggggctccgagaggttatggcaccttagaggcacctgtccccttccttggagcccacctgaggtcccccggggtcagagaagaaagccaggtgtgtggcatctgtactgcttgtcagaacctaggagggccggacatgnnnnnnnnnnnnnnnnnnnnnnnnnnnnnnnnnnnnnnnnnnnnnnnnnnnnnnnnnnnnnnnnnnnnnnnnnnnnnnnnnnnnnnnnnnnnnnnnnnnnnnnnnnnnnnnnnnnnnnnnnnnnnnnnnnnnnnnnnnnnnnnnnnnnnnnnnnnnnnnnnnnnnnnnnnn

SEQ ID NO: 2494 - DNA, 2853 bp, Macaca Fascicularis
ttattggagtcatgaagtgggtgtggttaaggaaagaggccagagtcatggcttagccacaattgactgttcctgctcggcctcagaaacccactccccatcctccacacaatgaaaattaagttagtagctagggggctcgcaagtttagtttttctccccaaatgcttctggaacatttggtgcctgctcctgccacagatggcaaaaacaggaaggcgtaacaaagacaaaacacaacaccagcgtcggagaagggcgcgcttggcgtcatggcgggttttgttctgtggacacctgcctgctggccactgatgagggcggacgtcaggctccttgtgtgggaggcagcagtaaatgcagcagcactttgaggggtcaaggatgacatccagaattctggcgtgggcaactgtgatgcgcggaggagcaggtttgggcagggaattacaagtgcattccattggtgtgagctgcacgtgcagtgcgtgtggggcgtcagacagggagaggtgccctgttgcccccagaaagagagatgcggccaggatgaggaggatatacaggatgatgtgtggtaaaggcaagataaggtgccagggcagagcgtgagtgcctagtattagagaagccagggtgggcagcagggagaaagcaggtagggagaggagaggaaaaccaggagagtgggtgccatgggcccatggtggtcagcacgtccacaggcctgggagatctagatggtggtcctagtaccaccttcgaaggcctgggagcaattcccttcacctccctgggtctcagtttccccatctgtaacctgggaaagttggccttggcttcatgggtcttcctgtgccagcattttaagactgtcaggcctctttcttgagtggcactgggtgcggcacagcgtaccggggccttgagagtggtccggggcaaggagagccagcggtacagcgtaccggggccttgagagtggtccggggcaaggagagccagcggtacagcttaccggggccttgagagtggtccggggcaaggagagccagcggcacagcgtaccggggccttgagagtggtccggggcaaggagagccagcggcacagcgtaccggggccttgagagtggtccggggcaaggagagccagcggcacagcgtaccggggccttgagagtggtccggggcaaggagagccagcggcacagcgtaccggggccttgagagtggtccggggcaaggagagccagcggcacagcgtaccggggccttgagagtggtccggggcaaggagagccagcggtacagcgtaccggggccttgagagtggtccggggcaaggagagccagcggtacagcgtaccggggccttgagagtggtccggggcaaggagagccagcggcacagcgtaccggggccttgagagtggtccggggcaaggagagccagcggtacagcttaccggggccttgagagtggtccggggcaaggagagccagcggtacagcttaccggggccttgagagtggtccggggcaaggagagccagcggtacagcttaccggggccttgagagtggtccggggcaaggagagccagcggtacagcttaccggggccttgagagtggtccggggcaaggagagccagcggtacagcgtaccggggccttgagagtggtccggggcaaggagagccagcggcacagcgtaccggggccttgagagtggtctggggcaaggagagccaggagaggcatgagggagcagagaggccagggaggcagtgcctggtttggcaggaaaaggggcagtgtgaggtcaaaggaaggtttctgaaagcctgaatccctgtgtttgcaggacaagtggaagattccaaggggaggggtagctatggctggcagagagaatggggcaagatggggaaggacgcagggtgggctctagggcacagagaatgagcatcggctctgattccatgtgggcatcgcagcctgccatgttggaagttcgcaccatgccatttgacccgtgtatgtgtgtctgtgtatgttcagtgaggcctaaaaagctgccccatgagggtccctaacttctgggcctgggctgggggagttgcagcgggcagacccctggggtgccaggcttcctgtctctaaagcccttgcatgtggtaaaaagctttcttctcctccaccgcctccttgttgctccttcccagcgaaagaaattacggtattcagacctggactttgaggtaagggctgtgtgtgtgctgggcggtgggacatctggctgcggtgtctgtccctggagggcccactcctaaatgtagtccaagctctgttgcagagcctgaccccaggagcccaagcctgtgggttctgtgggatcttcccatgattccctccctgcccaagcccatagcaccgagaacggctgactctgcatcggacagcagcctgggagcccacagaaccaccggatggtgacttccagacagaggtgtgagtgccacgctggactgcccactgcatataaatatatatatctctctattttcacactccactttggaactacccaggagccagcaccctctcccctctcccgagggctgggcagggaggcgccgtggactcagccaggcttggggagccagacacggcttggcctaggggcccagggcccttccttgtttctcagaggcccctcagccactggaaccccatcttcagcccagcctgtccgtccctgtcccgggctggggaggggggaggggaactttgttgggaataaacttcactctgtggaaaaaaaaaaaaaaaaaaaaaaaaaaaaaaaaa

SEQ ID NO: 2495 - DNA, 720 bp, Macaca Fascicularis
gaaattttgaaattatacaagtttctgaaattgttaatattttagcatagtactaatcactcatcattgagctttattattctattgtctgtagtgagcaagatgttgagaattttataattccaaactttcaaagtaattcaagtatacatttactggaacatacttctcaacttttgaattagtaggtattgactaatactgagatactaaaatactaagatattttctcaaaatttaatttttatttatttattttagagacaaggatctcactctgttacctaggctggagtgcagtggcacaatctttgctcgcatggatcacttgacctcctcaagctgaagtgatcctcagcctcttgagtagttgggactacaggcataagctgccatgcctggcttttttatggtttttaactttttgtggagacaggatcttgctgtgttgcccaggctggtctcgaactcctgactcaaaatttaatttttaattgtgaatagagaaaaatatatttttgaatttctgaatctgacagcgcaaattagcccaattgttcgaaattggaatgattttggtaagaatactcacgactaaacttggaaaactatactgtagtggatgaaacattgagcttttgaaaaggagaacataaatgccctatttctgttgactgctatttattcatttttcaacccccctggtgatcagttcagaat

SEQ ID NO: 2496 - DNA, 745 bp, Macaca Fascicularis
  misc_feature (1)...(745): n = A,T,C or G
agcagngcagtacacantacacngtnattttttttttnntcctaaggatttttttgtagggcagcacagcagagcaggacatggnnnnnnnnnnnnnnnnnnnnnnnnnnnnnnnnnnnnnnnnnnnnnnnnnnnnnnnnnnnnnnnnnnnnnnnntttatttttatcaaactaagcatttaatcttgtatatttcccacatttaaaaatgaattaggtctctatcctaattannnnnnnnnnnnnnnaacactattgtagcagttaggaatcttaagagctatttttttttcatnnnnnnnnnnnnnnnnnnnnnnnnaaagttttctttagatgtctgattatcttgaggtgattacttaccttaaaaggtatagaaaggatcacttacatatatggaaaaatgaaacaagggtgaagctgaataaagtnnnnnnnnnnnnnnnnnnnnnnnnnnnnnnagtttcttaagatatgatttgctgtgtatgttacgctgtattcagaaccagtttctaannnnnnnnnnnnnnnnnnnnnnnttttcccataattgggatgaaacctttcattcagatattttgaattgaaggtgtatgtgttgtttnnnnnnnnnnnnnnnttgcaagtggtgttgacattctggatcttctatgtaacagttgaaatttnnnnnnnnnnnnnnnnnnnnnnctaacatnnnnnnnnnnagaatttacaagtcatttattgaaagaataattgt

SEQ ID NO: 2497 - DNA, 665 bp, Macaca Fascicularis
  misc_feature (1)...(665): n = A,T,C or G
tccttgtgacttctgttnngtgttggaaggaaagaagtctcactcccagcaaatcaaaaggaaatctagctgcatctgactctgtgaactccacctctgcatctcatctgctcagtgggtgtgaaaatacggccagtggaagcggggctccggccggcttcacaagcatcagaactgcaggcacctggcccaggcgtccgtgttctgtgtgtgtcagaatgctcctgatgctcctgtggctactgaggctgctcacggacacgagagaccattcccccccataaccattggtgaccaacaggcagccttctcctctaacctccgcaggatggggcccagcccagcagctgccccgagtggccaacgtgggcctctgtggacagggcaggtnnnnnnnnnnnnnnnggtgcaaaactgccccagggtgggtgggcaggaggccacctgaacctctgtaacagcaaaacagtgagtgttttcctgggatctccctcttcctgttgttctgtgaaagcacctaccagccatgtgaaaagcctcctggctaaccacccacatgcaggtgtctggcacagggtggcacactggctgttcaggggtcggcccctcctgatgtttgcatgtcccccttgtgtgaaactcacatttaatttcatgattattaa

SEQ ID NO: 2498 - DNA, 681 bp, Macaca Fascicularis
  misc_feature (1)...(681): n = A,T,C or G
gaggacatagtgaacccncgtacacccttannngatgtatttctcaccacctctctcctgcagtgaggccatggggtgacatcatatgggccaggccagtgggagctcccgaggagtgtcaggaggggatgnnnnnnnnnnaaggttcatccttccccctgcagcctccagtgcccagggccgagtggtgtggcaggacgctcaggttgtgatcttagtgggcccgaggcacacgtgagtccagggctggggctgtgctccagccagcatgaacagatcacttcctccctcctcaggtgccggaagctgcgaaggtgacacatggcttttcagactcagcgnnnnnnnnnnnnnnnnnnnnnnnnnnnnnntggggggacaaagaggagcctggtaaaaaaacagccaagcccccaagacctcagcccaggcagaagctgctccaggacctgggcctctcagagggttcttctgccatcccttgtctcnnnnnnnnnnnnnnnnnncaggacagagttggaagaggagactgggaagcagcaagaggggtcatatnnnnnnnnnngggagaatggggtactgtctcagtttctaaccactctgtgcaagtaagcatcttacaactggctcttcctcctctcactaagaagacccaaatctctgcataataggatttgggct

SEQ ID NO: 2499 - DNA, 683 bp, Macaca Fascicularis
cattaaatatacatatatgaagtgtttttattctacttgaaatatcctgatttaaaaaaaaaagattgttagtatcgatgaagcaaatgaggcagtgactacattatggaaatgtctaagtattttttccggagcttcaacttttttctttttcttttttttttacataaacctttaagcagttaggaacttttatttctgattaggtcatttgaagttctctggtgaactaaaaaaatatacattttggctggggataaggatttgattttaaaaagagctcgaatttaaggcaaaaaaaaaaaatgaacgttgtagttttaaaatcaatattagcagagccatagataggcggaactcttatttggggttctgagaaataattcagtttaaaagttctttaactgcctccattagtacccaggctagcccatggtgacatcaggaatgttcattactgattggcctctagtattccaagggtactactatagatattacaataatgctgtttactaagtgatagcccaatgtcttacaggactgactctgactcaataaacactcaccctattattggaaagtaccagaggccttgaggaagtatagttacatcttcacaaatatatgaagttaagtcactacttacaaggaaaacaaaaatgtaaatacatgtttctttc

SEQ ID NO: 2500 - DNA, 2612 bp, Macaca Fascicularis
gagagagagttggaagaacaagaaaagagacaacgagaaattgagcgcaatacatgcaagataaaattattctgtttgcatcctacaaaacaagtaatgatggaaaataaattggaggttcataaggataagacattaaaggaagcagtagaaatggcttataagatgatggatttagaagaggtaatacccctggattgctgtcgccttgttaaatatgatgagtttcatgattatctagaacggtcatatgaaggagaagaagatacaccaatggggcttctactaggtggcgtcaagtcaacatatatgtttgatttgctgctggagacgagaaagcctgatcaggttttccagtcttataaacctggagaagtgatggtgaaagttcatgttgttgacctaaaggcagaatctgtagctgctcctataactgttcgtgcttacttaaatcagacagttacagagttcaaacaactgatttcaaaggccatccatttacctgctgaaacaatgagaatagtgctcgaacgctgctataatgatttgcgtcttctcagtgtctccagtaaaaccctgaaagctgaaggattttttagaagtaacaaggtgtttgttgagagttccgagactttggattaccagatggcctttgcagagtctcatttatggaaactcctggatcggcatgcaaatacaatcagattatttgttttgctacctgaacaatccccaggatcttattccaaaaggacagcataccagaaagctggaggcgattctggtaatgtggatgatgattgtgaaagagtcaaaggacctgtaggaagcctaaagtctgtggaagctattctagaagaaagcactgaaaaactcaaaagcttgtcactgcagcaacagcaggatggagataatggggacagcagcaaaagtactgagacaagtgactttgaaaacatcgaatcacctctcaatgagagggactcttcagcatcagtagataatagagaacttgaacaacatattcagacttctgatccagaaaattttcagtccgaagaacgatcagactcagatgtgaataatgacaggagtacaagtgcagtggacagtgatattcttagctccagtcatagcagtgatactttgtgcaatgcagacaatgctcagatccctttggctaatggacttgactctcacagtatcacaagtagtagaagaactaaagcaaatgaagggaaaaaagaaacatgggatacagcagaagaagactctggaactgatagtgaatatgatgagagtggcaagagtaggggagaaatgcagtacatgttttcaaagctgaaccctatgctgcagatgaaggttctggggaaggacataaatggttgatggtgcatgttgataaaagaattactctggcagctttcaaacaacatttagagccctttgttggagttttgtcctctcacttcaaggtctttcgagtatatgccagcaatcaggagtttgagagcgtccggctgaatgagacactttcatcattttctgatgacaataagattacaattagactggggagagcacttaaaaaaggagaatacagagttaaagtgtaccagcttttggtcaatgaacaagagccatgcaagtttctgctagatgctgtgtttgctaaaggaatgactgtacggcaatcaaaagaggaattaattcctcagctcagggagcaatgtggtttagagctcagtattgacaggtttcgtctgaggaaaaaaacgtggaagaatcctggcactgtctttttggattatcatatttatgaagaagatattaatatttccagcaactgggaggttttccttgaagctcttgatggggtagagaagatgaagtccatgtcacagcttgcagttttgtcaagacggtggaagccttcagagatgaagttggatcccttccaggaggttgtattggaaagcagtagtgttgacgaattgcgagagaagcttagtgaaatcagtgggattcctttggaagatattgaatttgctaaggatagaggaacatttccctgtgatatttctgtccttgatattcatcaagatttagactggaatcccaaagtttctaccctgaatgtctggcctctttatatctgtgatgatggtgcagtcatattttatagggataaaacagaagaattaatggaattgacagatgagcaaagaaatgaactgatgaaaaaagaaagcagtcgactccagaagactggacatcgtgtaacatactcacctcgtaaagagaaagcactaaaaatatatctggatggagcaccaaataaagatctgactcaagactgactctgatagtgtagcattttccctgggggagttttggttttaattagatggtttactaccactgggtagtgccattttggccggacatggttggggtaacccggtgacaccagcactgattggactgccctacaccaatcagaagctcagtgcccaatgggccactgttttgactcggaatcatgttgtgcactatagtcaaatgtactgtaaagtgaaaagggatgtgcaaaaaaaaaaaaaaaaaaa

SEQ ID NO: 2501 - DNA, 658 bp, Macaca Fascicularis
  misc_feature (1)...(658): n = A,T,C or G
ccctttgctgcntttnnnaannnnnnnnnnnnctcagatttcaggacacattgaaaacagttgggctgntnagtataggccaccccttcccccgctccctcacccccaccccatgcacacacttcagttaagtaggtggagagtttggatcattaaaaggacacgttggaggctgagcagagagggtgnnnnnnnnnnnnnnnnnntttatgaactgaaatgactttatgaaccccaaggcagtgatactnnnnnnnnnnnnnnnnnnnnnnnnnnnnnnnnnnntgggaatnnnnnnnnnnnnnnnnnnnnnnnnnnnnnnnnnnnnttgtgctgcttttgtttcatatataataagtccctttcatttctttcacataacttattgggggaggtaccattatttctgatttcatagacaaagaggctgacaaagaaccatcctggtgtcacagggtcaattcatacctagaaaagctggttagaagaacattaggacgttagaagaacgttaatgaagctccaaggccttttaaaaatgcgagactttagccttgagaggcagctgttctgccttgtaggtttgtggggtctgccttttaggttagggtccttttaggtttgtgtctccagcatatagagttgtgcctgacccata

SEQ ID NO: 2502 - DNA, 792 bp, Macaca Fascicularis
  misc_feature (1)...(792): n = A,T,C or G
catgaaggaagtgnncnnnnnnnnnnnnnnnnnnnnnnnnnnnnnnnnnnttgtgcctnnnnnnnnnnnnnnnnacacacattactannnnnnnnnnnnnnnnnntgaactcttcctgctggtgtccatcagcacctctgtgatcctcatgcagcacctgctgcctgccagcnnnnnnnnnnnnnnnnnnnnnnnnnnnnnnnnnnngggctgttggcagaaggtggacccagcactgtgctccaacgtgctgcagcnnnnnnnnnnnnnnnnntgcatgtggccgcagggcgtgctggtgaagcacagcaagaacgtctacaaagcnnnnnnnnnnnnnnacgtggctatcccctctgatgtctcccacttccgcttccacttctttttcagcaaacccctgcggatccttaacatcctcctgctgctggagggtgctgtcattgtctaccagctgtactccctaatgtcctctgaaaagtggcannnnnnnnnnnnnnnnnnnnnnnnnnnnnnnnnnnnnnnnnnnnnnnnnnnnnnnnnnnnccgggaccgnnnnnnnnnnnnnnnnnnnnnntcatactccgctagcccccagagagacctggaccaccgtttctcctgagctctggggtgacctcaagnnnnnnnnnnnnnnnnnnnnnnggggctccctggcaaggggctgttgggtaggagcgggaggggggaaaaaaaaagacaaaaaaatccaccagagctttgtatttttgttacgtannnnnnnnnnnnnnnnnnatgtgataagaaaaa

SEQ ID NO: 2503 - DNA, 1746 bp, Macaca Fascicularis
aataaattgaggccgctcacccacggtacccacctagtatatagagacagaattcaaactctggctctagcacttgtgctttctgctacaccagctcaaggaagtttgaagacctacagaagggctgattttagaaggttaatcaaaaacccaaggacagtttcatcatgtcataaccaaagacccttgtggcacctgctgtcatgggataacaaatatcttgtggggttctgaatgtggacttattactgaagctcctgtctgcttggtcagtggtggtctagactaacttctggtcctgagattctaaagtgttggtagaccggttgagataaaagatatataataatgaatgccttacctatctgaaaaccagtttgatccgtgccaaggggctttttgtgggctctgtagagtgccctaaacccagctctgcctttgctgtgttagacagaagcacgccattcacatctctggggcccccaatggtgccatggtgtggttgtggtctgctcactggctcttctgttttttgtttttgtttttcctgcctttttccaatcctcacaccttctgagctacagccccagtagggtctaaatgtcctagagctatatgagatttaggtttctgagcacagccaattctcccacttttgaggcttcccttcccctttcactcgcccctctctggttctctgccaccagtccagaagaactgaatgtcgtgctggggaccaacgacttaactagctcatccatggaaataaaggaggtcgccagcatcattcttcacaaggactttaagagagccaacatggacaatgacattgccttgctgctgctggcctcgcccatcacactcgatgacctgaaggtgcccatctgcctccctacgcagcacggccccgccacatggcacgaatgctgggtggcaggttggggccagaccaatgctgctgacaaaaactctgtgaaaacggatctgatgaaagcgccgatggtcatcatggactgggaggagtgttcaaaggcgtttccaaaactcaccaaaaatatgctgtgtgctggatacaataatgagagctatgacgcctgccagggtgacagcgggggacctctggtctgcaccccagagcctggtgagaagtggtaccaggtgggtatcatcagctggggaaagagctgtggagagaagaacaccccagggatatacacctcgttggtgaactacaacctctggatcgagaaggtgacccagctagagggcaggcccttcagtgcggagaaaatgaggacctctgtcaaacagaaacctatgggctcccgagtctcgggggtcccagagccaggcggcctcagatcctggctcctgctctgtcccctgtcccatgtgttgttcagagctattttgtactgataataaaatagaggctatttttttaaccaagggagggtgcatgaaaatgtgtctccagcagaggctctggctgcagctcagggctcaaggatggaaactgagactggaaccaggagaaccagaaagtcaggctggggccctggtttggggactgcactttgggtctgtggattagtcaggactctctccattctaggtgacagtcacctaagtctgactgaattcagccaaaatgaggcatttatggatacatataacaggaaaataaaaataaaaataaaaaaccgacacacaaataaaaaacaaaaaaaaaaaaaaaaggccaca

SEQ ID NO: 2504 - DNA, 699 bp, Macaca Fascicularis
  misc_feature (1)...(699): n = A,T,C or G
tagatggatatggcaggaactacagcataagtgattattgtgattccgnnnnnnnnnnnnnnnnnnnnnnnnnnnnnnnnnnnnnnnnnnnnnnnnnnnnnnnnnnnnnnnnnnnnnnnnnnnnntttcacattataatttgtatatttcttgtgacagaagggatgatgcaaatatgtaattagagtgtcaccagatttctgttaaaaccaagtttgaaataaaaagcctgacattggtaagctacattgttttctcatcttagaatgatacagagatttcaaatagacattttttaaactttaatgcttagctagaatctacattctgaggaaaactctaaaaaaacttaaaaattgttagggaatttttatttttcagatcataatttnnnnnnnnnnnnnnnnnnnnnnnnnnnnnnnnnnnnnnnnnnnnnnnnnnnnnagttgaaagaatgtaggtacagtttggatacttgtactttaattttagagtaaacatctgcattatactcttatagataatagaattatttagatcagaaattctttacagtaaatgagataatgtgtgaaaaagtattttgtaaatggggattctacaaatgatagttgttattttcatgtgtatttgtaagatcannnnnnnnnnnnnnnnnnnnnnnnnnacataaaaaaagactttctcaagataactttg

SEQ ID NO: 2505 - DNA, 402 bp, Macaca Fascicularis
aggcaattgcagtaatatttgcatatctaatgagtaattcaattggtaaaaagatgaattatacacaaaagggaatggcagatttgtttgattttttatcaaggaaaagacaaaaagcaagttatcttgaaataaaacagcttgatgaatttggaataatggcaaaaactataaatgaaaatattgattttatagaaaaagggataattgctgataataatattgtaaatgagttggtaaatatttctaatcagattcaatcaggaaacttaaatggcaaaataaatttagaagcatcaaatccacaacttagtgaattataaaatgtatttaataaaatggtttttatgctaaatacaaatataacaagcattttagagatcttagaaaaatgttcaaaat

SEQ ID NO: 2506 - DNA, 630 bp, Macaca Fascicularis
ggccttcccatgcaactgtccagccagagctggggcagctcctggggactctgcccgcctcacacacacccatcccatccatggtgcctgagaggccttcgtcttcagtacccttcaccagatcagttgggcatgttgagggcagaggtggagggttgttgaatcatactaggctctgtaagctaaaaagatgatcctgcacggggtggcataagccagtccctcctgcctgggcacctgcagggaagaagtcacatgccagactgaggcatgccgggaacactagcctggccccaacagtagggggtgctggaggagctgcagcttttccccatcttgctgaattattgatgggcctggcactgcccctacccccagctacagccatgtttcagtcatggggacgaggaggagcgtgctaccaggctacctgtgcatgctgcccatggcctgtcttcctagggatggcttcagctgccctaggaagcatgagcccctctgaaaccaccccaggacagatgaatgtggcagataccttgctgccaggggctctctcacccattcagggaactggctggcagcttacagagtcaggagtcctcgctggcctggcccttcccctccaggggg

SEQ ID NO: 2507 - DNA, 691 bp, Macaca Fascicularis
  misc_feature (1)...(691): n = A,T,C or G
cttctnnnnnnnnnnnnnnnnnnnnnnnnnnnnnnnnnnnnnnnnnnnnnnnnnnnnnnnnnnnnnnnnnnnnnnnnnnnnnnnnnnnnnnnctgtgagtttgagnnnnnnnnnnnnnnagtaaaggtatatgtaatgtatatagtcgtatatgtattctagcaagaaaaacatatttattttaacaaaggggaacactgacnnnnnnnnnnnaagggnnnnnnnnnnnnnnnnnnnnnnnnnnnnnnnnnnnnnnnnnnnaattaacataaagactattcatcagcnnnnnnnnnnnnnnnnnnnnnnnnnnnnnnnnncaggccaggcctactagtgagccaggcannnnnnnnnnnnnnnnnnnnnnnntacaggggaaggccagtttttttcccttcaattcctcaagtctgggtggtgacaaggtaggaggnnnnnnnnnnnnnnnnnnnnnnnnnnnnnnggaactaaggtgtttctcataaacacaaaatgttgggtgaaactggnnnnnnnnnnnnnnnnnnnnnnnnnnnnngcttaaatggaaagtgtgggagccactacnnnnnnnnnnnnnnnnnnnnnnnnnnnnnnnnnnnnnnnnnnnnnnnnnnnnnnnnntggtaagataccaaacaagacagatatgcatctaaatttctaatgtgttctatgggtttcaatt

SEQ ID NO: 2508 - DNA, 355 bp, Macaca Fascicularis
agcaatgcttgcacagaattaggaagagaaaggctctaggctgctccagcctgaggagctctccttgtggtaataagcagggagcagtgccgggcacatttcagagccacagcaaggggtgggacacagtttcagaggagggttgagaagcgaaaccgccccttccctgactctgtgaggagaggactcttgcccacccctgctgcagctggcccagtcccgtcctgcctccctgtcctcccattatcctttcccttctaagcaggggtcactgggctgttggctcaatgggagggggccttacacttccatgtggcacattaaggtggttttgctttgctggcttcagaaacag

SEQ ID NO: 2509 - DNA, 706 bp, Macaca Fascicularis
  misc_feature (1)...(706): n = A,T,C or G
tttatttattttgtctatttttgnnnnnnngcagaaatgcaataaaaactctatttcaacagtgcccgaggtcagagcagtggaaaagggagtgggggtgggggagtctgggtggctggggcctggattgggcaccccctccccccatcctggtacaggcatggcttgacccttgggggcctcctcccaaaaactgggtctcggccacagatggaaaactccgcctctgagacggcccagatttggaggccaacttcagccctggcttcagccactagacaaaggaaggaatctctaagtgctgaaaagaggcggcaatgtgtgcacaggccccagtcctgagtaagactccttctcaatgaggacatagtgttttgcaagactctcccccttctggcacacccacctcctggaacattgtctggggagccagagacagtgggaagagcttgtggcatgaacatcggaaggcacctggcacctgagcctcctgcagtccccgagttgcgatgctgagagaatggcacatttgggtatccccaggacacgggtggcattgggatgcagcagggatgtcccactgtgggacggacatcagacccaagtcactgggactctgtcgtnnnnnnnnnnnnnnnnaatgtggcctctcnnnccctcaggtttgtcaggaagannnnnnnaaatgtgtacacatccaaaggct

SEQ ID NO: 2510 - DNA, 690 bp, Macaca Fascicularis
  misc_feature (1)...(690): n = A,T,C or G
attgactaaantagacagctaaaaatgtttccctccctataagtacgaatatgatttttaaagcatctttgtaattgtcaagaagctatttattattaattaaggatttaactctctacccatctgctcttacaaaaggagaaaaagatttatctatgagannnnnnnnnnnnnnnnnnnnnntatgttttttctctttagtattctatcaccatttaaaacttcaatatatgccttccactcaggttcctgacacagcctacgttctcttttctgcttgtaatcacaatatggtagagcgataaacaacgtcaaaaggtgttaacaattgaactgcaatcctacctattatctactttactatagcagtgaagtagtgcagacttctttgaaggtggtactatttttatctttaaaaaaatctactataatattataactttccatgtaaannnnnnnnnnnnnnnnnnnntacaagttaatagtgttatagaatgctcagctctcaatatgaggggttgtttgtggtgaattgcataacatatgtcatctatttgctgaaagaatatggtgttcagcaaactacctgctgagcaacataacaagatttttgcacaaggtacaaactactaattattgtattttatttttctatgatttcctaagaggcattatcagggtcttacagat

SEQ ID NO: 2511 - DNA, 717 bp, Macaca Fascicularis
  misc_feature (1)...(717): n = A,T,C or G
gcactggctagcagtnntctgatgcnnnnntggcagaggcaggnnnnaacttgattaggtgttttatgggaatgtaatttgaaatcactacttcagaaatttgagttaaaattcttgagcacgttaatatatttttaagatctgattatctttgagagatcttatgttgatacacattggttgttaaagtatacccaaattctaggacaatgcttaaagtgttaaaataccctagannnnnnnnnnnnngcaactgtagaaaccttccagaaatttccactgctgttctnnnnnnnnnnnnnnnnnnnnnnnnnaccacttctgacaaaattagctgttttgaattacccatatcactgccagttttattttaaaatattttgtgtttgaagtatcnnnnnnnnnnnnnnnatatttatcaaaactgttccctttcagaaatgattnnnnnnnnnnnnnnnnnnnnnnnnnnnnnnnnnnnnnnnnnnnnnnnnnnnnnnnnnnnnnnnnnnnnnnnnnnntgtatattgttagtttttgtcatttcttggctttttaatattttgactataataccctaatgtgaagaagtatggacatataaatattacaagagaaattagttaatagtaaggttaaaaggtaagtaaaatgtccatgaaaataaaatttctttgaaacaatttgaaaantgtaatcnnnaaaanntctaaactg

SEQ ID NO: 2512 - DNA, 676 bp, Macaca Fascicularis
cctggcccggtggcaagcgctgaaaaaccgaccgcctgtaggctcctggaactatacagataggtaaagagttccaagttcgtccagcccatgtgcaaagtcaacagtatttgccttaagatttcatatatatatatattttttgcattgactgctgagagctcctgtttactacgcaagcttttgtgtttattatcctcatttttactgaacgttgttagttttggggtaatggaaacccactttttcattgtaatgactctgggggcttttgttagtaagggtgggggggtgatgggttgcagacggagggcaggtcttcctcttttctgagactggatctgtttaaacagcaaacacccacagatggcccagaggtggcggcagtcagagtgtgtgggtgtttttagggttctttagcgttgcttctttgaccaggggtggtggtcccagccagtttggtgctgacggtgagaggaaattagaacctgtttgcaaattgtccaacccaccccctcaacatgaggggcttccattttctgtgtttcgtaagggaaatgtttccttcaggccgccatgttcctgatattagttctgatttctttttaaccaatgttatcatgattaagaaaatttccagcactttaatggccaattaactgagaatgtaagaaaa

SEQ ID NO: 2513 - DNA, 763 bp, Macaca Fascicularis
  misc_feature (1)...(763): n = A,T,C or G
annnnnnnnnnnnnnnnnnnnngaaatcattcagtcccggaaacatcgactgctgtgaaaaaccacatccttgactagtacttaatctttccacagtcattcatctgctannnnnnnnnnnnnnnnnnnnnnnnnnnnnnnnnnnnnnnnatacaaatttcccccacattcacactgatgccgtacttagtaattctggctctaccattcacttttgcactttttgcaaatcaaattcatgtggaaaaatgttctgtttgtagaactcatagtattcacttatagtgctcnnnnnnnnnnnnnnnngtgnnnnnnnnnnnnnnnnnnnnnnnttctgtttgaacctaatgcaaagataataaaacatgtccacttcttttctagttctaatcagtttttagacatcttgtcaagacttactttgcatgagatttgtttcctattatttgaaaatgtgctgtacacttgaattagaaaannnnnnnnnnnnnnnnnnnnnnnnnnnnnnnnnnnnnnnnnnnnnnnnnnatttgtcagtattgttctactgtttgtactgaaagtctcattttaaaattgctacttaacactgtactataccttgtaattttttagattcttcacttgtattctttaaatnnnnnnnnnnnnnnnnagttttagctgctgtaaaatnnnnnnnntgtgttatttgatatagaattgttttttaaaaactcnnntttatttatacagagacatttataatattttacaaacattc

SEQ ID NO: 2514 - DNA, 1317 bp, Macaca Fascicularis
aaaagagcacactggaggctgagaggcagcatctaccagcccgctccccgcctccaggacagagcctcggtctgcatgggggtgacaggtacccatggatttccatgctgcagcaaagggtcagtggaggttgcagagatgcgagatgacttaagtcaacaccagatacaagaggaaaaggagctttgagttgaaacatttcagctggaggcagacatgctagagcagaagccccagctcaaagtggacctggctccagacccagacccagaactggagatcggacaggtgccggctttactggagtcagagctgtacccagccctcaagcttgaaactgagctggacacaaaagccaactggaacgaggagtctgacctcgaagagcccctgcagctggtgtgccagatagagtccgtccactccaacatggcgccgcccacgccgcagaccttcagaccatggagtctgaattcaaactgcgggagtttcacggaggagaaccacgtgtccgcctgccgtcactccatcagtgcacagacctccaagcacctcttctgggcaaacaagctcatccaggcctcagagcacagcctgcagcgggccatcaacatgcagctcaacaatggcagcgcaggccagcccatcagttctcggctccgggaggccatccccactgatgccctgtgctccaaggagcagctccagagccccgatgcccgctcagctcctccggccacaagcttccaggagccaagccccctcctgtcctcagatctcccgccacccattggcctggcagagctaatcacctttgcatcttccctggccatggcctcctccagcaggacggacatgcccagtttggaacacatgatgaaagctccacctcaggaggctctggagccttccacagagcccctcctgatcactgcggaggagcaaaagccagaaaagcacgcagaggccctaccagagaaaccacgtgaagccagggcaccactgaaatcttggagtcaggaagacaagaacttcactcaatcttactttgacttcagcaagccagggatcaagagggccaccatcgaagggcaaatgcagcttctccagccaccagccacgtcccctgtgctgcagggaggcaaggaagactctgtgccgccaggaaaagagaaacagaatccattattggtgaaaatccattttaagctgtcagcccccacaaccccagagaaatgactagacagaaccaataaagcctccagtgctggcaaaaaaaaaaaaaaaaaaaaaaaaaaaaaaaaaaaaaaaaaaaaa

SEQ ID NO: 2515 - DNA, 731 bp, Macaca Fascicularis
  misc_feature (1)...(731): n = A,T,C or G
agtagtttttcgaaaggctgtgatcatttattgatgatgatatgtcttgttactagggtactgaaaaaatgtctaaggcctttacagaaacctttttagtgatgaggatgagaactttttcaaatagcaaatatatattggcttaaagcgtgaggctgccttcagaaaagagatgtggacataggaggcaatgtgtgagacttgggggttcaatattttatatagaagagttaataagcacatggtttacatttactcagctactatatatgcaatgtggtgcacattttcatagaattctggcttcattacggtcattatttttactgcatggcttacagacttagcatattagttttttctactacaacaagtgtaaattgaaaaatctttttattaaaaaagtaaactgttatgaagctgctatggagtaataatactttgcttgccaaagtgtttgggttttgttgttgtttggtttttttttttggttcatgaacaatattgtctagaaactcattttgaaattggaaaattattaagtcatgtnnnnnnnnnnnnnnnntttttttaattataaaatattgtaaagcagggtctcaacttttaaatatactttgaatttcttctctgaattattaaagttctttatgacctcatttataaacactaaattctgtcaccttctgtcattttattttttattcattcaaatgtattttttcttgtgt

SEQ ID NO: 2516 - DNA, 729 bp, Macaca Fascicularis
  misc_feature (1)...(729): n = A,T,C or G
caacagtagctgctaatgtcagaggcgttcaaaccggagccgctccttcttgggctactttcctgggcttcccagtcataggaccacataagaggttgacacggatacaggtcccaaagatcctgctgataaaacaggttgcagggccannnnnnnnnnnnnnnnnnnnnnnnnnnnnnnnnnnnnnnnnnnnnnnnnnnnnnnnnnnnnnnnnnnnnnnnnnnnnnnnnnnnnnnnnnnnnnnnnnnnnnnnnnnnnnnnnnnnnnnnnnnnnnnnnnnnnnnnnnnnnnnnnnnnnnnnnnnnnnaataaaaataaaaataaaaatcctgccaaattgtgattgcactaaacgccattccagtgcacactttgaaannnnnnnnnnnnnnnnnnnnnnnnnnnnattgcacgattaaaactaaatannnnnnnnnnnnnnnnnnnnnnnnnnnnaaattgcaaattgaatgattaaaaataagtattggccgggcgttggcctcatggtggcagcagcgagcagccggggcctcctgtggttcctgcatccgagctcccggactccccaccctcctgnnnnnnnnnnnnnnnnnnnnnnnnnngacaggtgggtcacctgaggtcaggagttcaagagcagcctggcccacgtggcgaaacctcgtctctactgaaaatccaannnnnnnnnnnnnnnnnnnncacgcctgtaagcccagcactttg

SEQ ID NO: 2517 - DNA, 815 bp, Macaca Fascicularis
  misc_feature (1)...(815): n = A,T,C or G
aaagtatatgtgcagtcnnnnntacaaggaggggttaccatgtatcncnntaatcttcccaatgtttgggatattaaaacacaaagtcctnnnnnnnnnnnnnnnnnngtcttatgggagttttagattttttaaagaattagacaaatttgtgtgtgttagaagcccatttattagaagtgtggtggttatttggtattaaactccagatgagccataggaaggcactacatgaagtaatgcactgagtgtgcaatgctatcactgtctttgactgtgattatatgtttaaaaagtatgttctaaaattattatatatacatgggtgaattatgtttccgaggcactgttttatctctgtgaatcttgaataactttttaatatttgggttattatgttgaacgatcctaagagaagatgatttcagttcatcaaaacatcattgatgactttatgtattatttacccagggagaactgaaactgagtataatcaataagctagatatgaaatcagtttctcaaactgagcttctgaaaggggcattttatactcttgtttctgcataactggttttgtttttttgcagaattaactataacaatcactggctaccgaagtaaactgatgtactgaattccataatacataacattcagtttttaccacttctgtttagcaaacttgtatacttattttctgtacagatttaaaacaaaacaaaacaaaacaaaactcagatatcctatacaacttttgcttgttctttttattctggtatctaaatactgagaagttcatttataattcagcc

SEQ ID NO: 2518 - DNA, 152 bp, Macaca Fascicularis
aactccattttacatgaggtgacagaagagtctgagtctacctgtggattatgttggtttattctcagtgctcgaagactacattcacaaatcctcggtttgggaagacaccgtttaattctaagttaacttgcatgctgtaaatgcgtttt

SEQ ID NO: 2519 - DNA, 126 bp, Macaca Fascicularis
cccctccccacctcccactccccaccctgtagaccaggcggctgcagcaagcagaccttcgcatcaacacagcagacaccaaaaaggagttagggccccgctctctaccgcccggccctggcactc

SEQ ID NO: 2520 - DNA, 700 bp, Macaca Fascicularis
tttgaagttacaaaggcaaaacgtcgaccagctgaagggagacttttgggatggcaggagagagttttggacccagcgtgggtccatcatggacccagctgcctgcagatttggcagtagctgatgcagtcgcttcacagcctagggagtgatggggttaatcacacctagaacaacaggtacctcttcccagaggagtgggaccagaaatcaggcaagccccgtgaggagtgccggggcagggcattcctaacctccagagggaaccatgagggagcttgtgttctggcagacgggccagagaatttgaacttgggaccattgtgtgagccctgggtgtgtgagcccttcaaaagtcctctcagcacgtgacaactatcgttatgggtgatactatggtggtgggacccccagaacagacctgtatgttgagttcaggagatgctttgttgcatttctgggcaggagcaagaggccccttccccttccttatcgccttcccttccaagttccccaggctcctttcctgccactctgtcaagagagggaagagtggtgaagagtcacttgtgcttggacactggggactgaatgtggcccttttgcctgggcattgccgaaacatacatttctactggtaaaacgttgtgtatgtgtgggcggcaagccacccaggtgccaaggcaagagaccgagggca

SEQ ID NO: 2521 - DNA, 185 bp, Macaca Fascicularis
caggggttataagagggaatcccggaaggtgctggaagtgggagcaggagattgagaaggagagaaagtgggtgagatgctggagaagagaggagaggagcgaggcggagagcggtgtcaggctggagagaagggcacccacctccccacaccctcccctcccccgctacaggggctcagaagag

SEQ ID NO: 2522 - DNA, 625 bp, Macaca Fascicularis
  misc_feature (1)...(625): n = A,T,C or G
cacactagactaccacacgtgtggacactttcaccgccgggagagggagccccgtgggcacggggactgggcaggccgccccaaaagctgtagcacgcggagcacacaaaatagtgatttttatacaataggtcagatttccattttttttttctttttcttgccataaacatctatctcacaggctgaaaacactgagaaaactggaacagataaggccatgatggttggaaaaaaacccaacaagttaccaactccgctcgggcggcgctcacgaatcgcacaatagtcatggggtgggggtcgcacggcacggaggagaagcacagtctccgggaagatggggcacagaaaaggttccattacaaaccagcggcggagggggggcgcgggggctggggtctgtgggcactccccggacccgcggcccgctgctctttgnnnnnnnnnnnnnnnnccccctgccgccctccccacagccgggccgggcagtgcccccttctcgggcttgggggcaagggagggcccatcggagaagatgcgacacccacggctttaattgcacttaataccaagaaggggaagcagtggggttgctgggggtagggggtcccggggctgctgc

SEQ ID NO: 2523 - DNA, 704 bp, Macaca Fascicularis
  misc_feature (1)...(704): n = A,T,C or G
tgcaacaaatgtctcaaagtctttagtagcctgtcannnctgttcaacatcagagtattcatactgaagannnnnnnnnnnnnnnnnnnnnnnnnnnnnnnnnnnnnnnnnnnnnnnnnnnnnnnnnnnnnnnnnnnnnnnnnnnnnnnnnnnnnnnnnnnnnnnnnnnnnnnnnnnnnnnnnnnnnnnnnnnnnnnnnnnnntccctgcttcaacatcacagaattcatactggagagaaaccttacgaatgtattaaatgtaggaagaccttcagctgtagttcaaaccttattaaacttcatcaataaatttcactataatnnnnnnnnnnnnnnnnnatacatcagaattcatactggagaaaagccatataaatgtaatgagtgtggaaaagcttttagcaaaggctcaaatcttactgcccnnnnnnnnnnnnntaatggagagaaacccaataatatggtaagtgtggaaaagcctttagatcatatgaannnnnnnnnnnnnnnnnnnnnnnnnnnnnnnnnnacnnnnnnnnnnnnnntttatcatggtaaacttcatagatcctcccttatttaacatcagaaaaaatttatactggggaaaagttgtatgaatgtggtgaatatgggagacttttagcaatgatgcagacatttttatttatcagaagtttatactgtagagaaatcatatga

SEQ ID NO: 2524 - DNA, 709 bp, Macaca Fascicularis
  misc_feature (1)...(709): n = A,T,C or G
taagtttgaagagtgttgtcaagaaaaaacagccatggacatttttgtgtgcacttacttcatgccagctgcacaaccccccgagcttccagaggtggagctgcccacaaacaaagatgtgtgtgatcaaggaaacaccaaagtcatggataagtatacatttgaactaannnnnnnnnnnnatcttccagaagtattcctcgttaaagtacttgagccaaccctaaaaagccttggtgaatgctgtgatgttgaagactcaactacctgttttaatactaagggccctctactaaagcaggaactatcttctttcattgacaagggacaaaaactatgtnnnnnnnnnnnnnnnnnnnnnnntaccgagtacaagaaaaaactggcagagcaactaagagcaaaattgcccaatgccacacccacggaactggcagagctggttaacaagcgcgcaaaatttgcctccaactgctgtttcacaaactcacctcctctttactgtggttcagagattgatgctgaattgaagaatatcctgtagtcctgaaacatgtatattaactttgacctagagttggagccacccaggggaatgacctctgatgacctaacctaagcaaaaccactgagcttctgggaagacaagtaggatactttctactttttctagctacaatgtcttcatacaatgataagtatgatgatt

SEQ ID NO: 2525 - DNA, 738 bp, Macaca Fascicularis
  misc_feature (1)...(738): n = A,T,C or G
gtaaacaaggaaataccatttttcctctatcagtgactgagaaaggagttgagcagaagatcttcaatccagtctctcctctcgtagggaaatactctcaggaaagcaagcaagcgagcgtgtaatttttataaatatggtaattacagacctcctggcaaacagaccagtggtatttgctagctgaagagtccatatttatggaattcctctatcaagatgtcccggattgtcctgggattgtttatggtaaacacattaagaatcgatctggnnnnnnnnnnnnnnnnnnnnnnnnnnnnnnnnnnnnnnnnnnnnnnnnnnnnnnnnnnnnnnnnnnnnnnnnnnnnnnnnnnnnnnnnnnnnnnnnnnnnnnnnnnnnnnnnnnnnnnnnnnnnnnnnnnnnnnnnnnnnnnnnnnnnnnnnnnnnnnnnnnnnnnnnnnnnnnnnnnnnnnnnnnnnnnnnnnnnnnnnnnnnnnnnnnnnnnnnnnnnnnnnnnnnnnnnnnnnnnnnnnnnnnnnnnnncacaaaacnnnnnnnnnnnnnnnnnnnnnnnnngggtacgattaactggaaaataccgtggaagttatataacttagcgtaaaatggaagtgttttgtaactgagttggctccttctgtgtaagtgggatgactatattcttggtttagaaaccacatctgtcctgggccaggatgcatccaaagcaagaagaaaggacctgggaattactg

SEQ ID NO: 2526 - DNA, 1066 bp, Macaca Fascicularis
  misc_feature (1)...(1066): n = A,T,C or G
gaggctgccaggnnnctgctgggtggaattttgctcgggaggactctngtcttcctctcagnnnnnnnnnnnnnnnnnnnnnnctggaggtgaagaagcaattcccgttgcnnnnnnnnnnnnnnagaatcagacagnnnnnnnnnnnnnnnnnntcnnnnnnnnnnnnnnnnnnnntgctnnnnnnnnnnnnnnnttgctgggaggtgtctccccgggtgacgtgagcttggggtgatggcctttggatggcatgtggtgttcgggactgttccttggtgttgaggggaaactttagnagnnnnnnnnnnnnnnnnnnagaggtcagggcacgtgggtgctctctcagcgtggggtgacttnnnnnnnnnnnnnnnnnnnnnnnnnnnnnnnnggagggcacaggactggccctgctctgctgcctcctnnnnnnnnnnnnnnnaagttaagtcacgtcccctgtcgggacttccgtgcactcatctgtcaagtggggatacgtcccttccnnnnnnnnnnnnnnnagacgggctgtcaggagttatgggttccaggcggctgtgtggacccagggacagacactcaaagggacgccagccattcttggtgacaggggnnnnnnnnnnnnnnnnnnnnnnnncccttacgaaggagatgaccagagacaaccccttcacagacacgagcacatcggcaaaccctatgagagtggaattttctaacaaaataaacttgcttgtttgatctgttttctgtaacttttgctaaatactttatacatttttcatgttaaagagctgtgtctcccgccagcacttctcaccccggtatgaatgtgtgtcctccacattnnnnccttccacnccctctggctgcctagatcagtaaataaaatcgatgtaatataatttataagtaacactgttgaaaccccgatcccagtggaggctgtaacccacctgcccccgccccccctccaacccgttatcgcatttnnnnnnattaacgctgaagaattaaatgtttaaagagtttaaattttgaaggcgtttgctatatacag

SEQ ID NO: 2527 - DNA, 762 bp, Macaca Fascicularis
  misc_feature (1)...(762): n = A,T,C or G
caaaacactgctgaggtctgtgnnnacgtatgtctgtnnnaatgnnnnttaaaacatgcttacttgggaaaggaaataaacatgtcatgtatcatatgtttaaatgcatacagggtttccagtaagtgctatgatttatttgatttcttaaagccctgacacctgcataaaattaattcatgtgcataggcctatggcatagttggatttccataccataatactgagtactcaccacatttctgaaagcaaagggtcacccaagcaccacaaccttgtacctcattacatcttggatgtcacttccccattgtaataaaattaaatggtttaaccttctgctcacttgaaacatacttaataacaaggatgtcacaatctnnnnnnnnnnnnnnnnnnnnnctcatcaaaaagagaacatggccatatttgacttcactggaacaatctgcaaaaaacaactaacatttaaaaaatctccagtaatctctagttcctagtatgtggaagggatgtaaagtatttccccagggagctttgcttttgcacaggaccaggactcaacagctcaagcaacatgtcccaaggtcagtgacaaagggctgggatagatttactttcctctgtatgagagcacccatgtctccaggtctacaaagaatttccagatttttctcttgtgcctatttgcgcctatgtattagtatatcggaatatcactctaggactttcaaagactataagagctctaatataattcag

SEQ ID NO: 2528 - DNA, 749 bp, Macaca Fascicularis
  misc_feature (1)...(749): n = A,T,C or G
tgaaagtagcagagtttcatcataccacatatataatagagcatacattttctataatcagnnnnnnnnnnnnnnnnnngagtaagactgttttcnnnnnnnnnnnnnnnnnnnnnnnnnncatacaaatctattctcttctctcgattgtagcgtagcctgacagctctagatacagcatttctctgatgaaaaatgagtgtctatcaggacatctagaagactagccatgttttctcagactccacctttgtttgcactctgttgcctgtgaggagcttcctggcatgtgattatttactccaaactagagttccaagcacctacattaactattttatattgtgtgcagaatagtatatctattaatgtcagaaatgatacactgcacatactgcttttgcactcttaaaatttttgtactaaataatagaaaatatttatattctttgagtgtgagctttgaatagatggcattatcactttattgtttttttcaacaaaaactttttctcaattattctatagcaatgttattcatgagcaagtcctatgccaaatatcttgtataacgtttgtatggaagattaaattttaatcttgtgaggtaagactattcagttactgatattatagttgnnnnnnnnnnnnnnnnnncaaagtccacagtgtattcagaaatccaagttggtgtcatacatttcattatgatgtgaacttatctatgctttcctttgttctaagactcc

SEQ ID NO: 2529 - DNA, 733 bp, Macaca Fascicularis
tgataaaacgtagattcctgggtcccaccccaagaatttctgactcagtaggcctaggatgagggtgggtgacaacaatatttatttctaactggttgaaaatgatgttgatgctgctgtttaaatttaaaatttccattgaaccccatcctttcccctaaatagtatgagttggggctataatactgtgttaaaaagggcactgttctgggaattgggagttccaggttgcaagcccagctgtgtgactaattttctgagttatccttcggcagttacttcacttctttagtcctcagcctccttctgtatcctaaattttgggattttgtgagatacccatagagtcacacctggctgcgtgcagccatctgtgtggttcacagcacacggctcacctgctgcctgtcctcttctgaatgagatctcttgcttcttgatccacccagaaggaaagaagaaagacagacacagaaaaaaaccttttgttcctttgaaatttccccggagatgctccagggatgaatcatttcagtggaccagtgagtaagtgaaagggacagcaaagcctcagggagcctcaggtagccacacagcttccctcacttctgggacttccctctatggagagccaaatgcagccaggattcagagaagcctagccagaccttaggaggagccatggagcttctctttggttagcctgaaagatatagaaaattaaaaactgtct

SEQ ID NO: 2530 - DNA, 691 bp, Macaca Fascicularis
  misc_feature (1)...(691): n = A,T,C or G
aggtctacgtgaacaactctgagtccaactctagggcgnnnnnnnnnnnnnnnnngcaccagctcctgaccaaccccaagtgctcctatatccctccctgtaagagagaaaatcagaagaatttggaaagtgtcatgaattggcaacagtactggaaagatgagattggttccnnnnnnnnnnnnngctattttaatcaacatcaaannnnnnnnnnnnnnnnnnnnnnnnnnnnnnnnnnnnnnnnnnnnnnnnnnnattgcttcctctggccnnnnnnnnnnnnnnnnnnnnnnnnnnnnnnnnnnnnnnnnnnnnnnnnnnnnnnnnnnnnnnnnnnnnnnnnnnnnnnnnnnaagaagcgcaagttctcttaaagggggaggannnnnnnnnnnnnnnnnnnnnnnnngctgtactcataggcacgcgtccacctgcggaacccgtgtttcnnnnnnnnnnnnnnnnacagggccacgacagggctatgagaggctcatccctcagtggcaacagaaacaggcacaactggaagacttggaacctcaaagcttgtattccatctgctgtagcagtggctaaagggtcaagctcttagctgtnnnnnnnnnnnnnnnnnnnnnnnnnnataagaagttcattttctttcaaaagtaacagtatattatttgtacagtgtagtatacaa

SEQ ID NO: 2531 - DNA, 640 bp, Macaca Fascicularis
  misc_feature (1)...(640): n = A,T,C or G
atttagaatatagttgaaaagctgtaatattcagtnnngctggtaaaagaccattaatttttgtgaatgaagtttcaattataaacttacatccacttttattgagcactacttaatttacagatattttgttgtactggcaaaagcaagtggtttcattatgctagattaatttgtattttctttttgagcagattggatgtcttgttcttataaattatnnnnnnnnnnnnnnnnnaatctttggatggatgggctgttaatttgtaaataggttttcagtaagttatttctcataagtaataattggcaattttataatatttactgtttggagggtcattttgatgctttaaattgctgaaatactcaaatttgaatattcagaaaataaatttatttagatatattgtaaagagactgcaaaacaagcaatgggttagaataatagatcttcaagtcttttcttaaatgggatatgtagttccagcttttcagtgagaaatttccaaaccatgcttattagctttaaatggtctcttgaaatgatctataaatttttctcagtgtcctttttgtgttgaacacacacatctgaaacctgtatttaaccagatatttctactcaactgaatataca

SEQ ID NO: 2532 - DNA, 719 bp, Macaca Fascicularis
  misc_feature (1)...(719): n = A,T,C or G
tgtgcagcagcagagacnnnnnnnnnnaggccttgtgtaacctctatggggccatcaccattgctcaagccatgnnnnnnnnnnnnnnnnnnnnnnnnnnnnnnnnnnnngcagcagagctctcaaaagaaggccaccaagtggctctgctgagtggggagatgatggtggagcagagggctgcggtgattgagcgcttccgagagggcaaagagaaggttctggtgnnnnnnnnnnnnnnnnnncgcggcatcgatgttgaacaagtgtctgttgtcatcaactttgatcttcccgtggacaaggacgggaaccctgacaacgagacctacctgcaccggatcgggcgcacaggccgctttggcaagaggggnnnnnnnnnnnnnnnnnnnnnnnnnnnnnnnnnnnnnnnnnnnnnnnnnnnnnnnnnnnngcattttaataagaagatagaacgattggacacagatgatttggatgagattgagaaaatagccaactgagaagctccaccagccactggtgccagccctgacactgcccctgcacgggagacaagtgnnnnnnnnnnnnagcccccaacatcaccccaaggannnnnnnnnnnnnnnnnnnnnnnnnnnnnnnnnnnnnnnnnnnnnntttggacttgacaaaaatgtgtgcaaatgatgggggatggtagaaaaaaattatttacacaacctggaagattaggc

SEQ ID NO: 2533 - DNA, 670 bp, Macaca Fascicularis
  misc_feature (1)...(670): n = A,T,C or G
ttatttctccagcannnnnnnnnnnnnnnnnnnnnnnnnnnnnnnnnnnnnnnnnaagcagatgacaagcagataattagatggtgtcaggtggtgagaagaaagagaagaaaaagaatnnnnnnnnnnnnnnnnnnnnnnnnngaatacattaaccatggaggttaatggagtgggcaattataggagtggggtggacatattgtcagcggagacctcatttgttaggtacaatttggtaagctcagatttgacacactcctgttggttatgtgctcagggctaagttctaggggcttttacattgtatgtcagagactgtctacaatgtgttactccattggttgacttaattgatcgtgttgatcggttggggccccctttctttatttctttatgttgtgtccttcttcaacagcatgcaaaacaagnnnnnnnnnnnnnnnnngctcaggaatttttaaatgctacgttttattgttctttgtgagttctaatgtatgtaagccctacctgcctagtgagaaaatcaactctttaatgttgataactcagccttttagttgtctacttcccacccagtaggaatgcctttgtaatatagggtaacacaaacttcaaactgtaatatgattttaaaatttatattttggtactttatgcttgaaaa

SEQ ID NO: 2534 - DNA, 765 bp, Macaca Fascicularis
  misc_feature (1)...(765): n = A,T,C or G
ggcaancagatgagcaactgaacagcctngtcagccagaacactgagaaagtggagccactcactccagaaacggtggatagaggtgttcgtccccaaattttccannnntgcctcctannnnnnnnnnnnnnnnnnnccaaatatgggcatnnnnnnnnnnnnnnnnnnnnnnnnnnnnnnnnnnnnnnnnnnaaagagagactccctgcagctttctaaagcaacccacaaggctgtgctggatgtcagtgaagagggcactgaggctgcagcagctaccgccaccaagttcatagtccgatcgaaggacggtccctcttacttcactgtctccttcaataggaccttcttgataatgattacaaataannnnnnnnnnnnnnnnnnctttctagggaaagtggaaaatcccactaaatcttnnnnnnnnnnnnnnntgttgactgatggcactttgctaatgcacaagaaataacaaaccacatccctctttctgttctgagggtgcacttgaccccagtggagctgcattcactggcagggatgccacttccaaggctcaatcaccaaaccatcaacagggaccccagtcacaagccaatgcccgnnnnnnnnnnnnnnnnnccttttccacaaagtctcccagnnnnnnnnnnnnnnggatgttgctgggttaccgtatttccattccttggggcnnnnnnnnnnnnnnnnnnnnnnnnnnnnnnnnnnnnnnnnnattgcagaattacaacaacacatc

SEQ ID NO: 2535 - DNA, 779 bp, Macaca Fascicularis
  misc_feature (1)...(779): n = A,T,C or G
gcataaagatgtcagttctcgctaagttgattgatagacttgtcaccctaaaaacacccacatatgcttttctatggaaccagataagttgacactaaagttcttatggaaaaatacacacgcaatagctaggaaaacacaggaaaagaagagtgctgagcaggggctagtcttagccaatattaaaacacactatgaagcctctgatatttaaacagcatagcgctggtacgtaaataaacagaccagtgcattgggtgactctctccaagactctggggaaaaaagtaataaaaagctaaatgcaatcaatcagcaattgaaggctaagtgagagagccagacggcctccttggtggtgaaagaggcttgcatttcttgcagccagaaggcagagaaagtgaagatcaagtccagaaccgaatcctaagaaatannnnnnnnnnnnnnnnnnnnnnnntgcgtgtgtgtgtttaatttttaaaaagtttttattgagatataagtcaataccataaagctctcacccttttaaagtgtacaattcagtggtgtgagtatattcgtaagatttatacttggtgtctattcataaaacttannnnnnnnnnnnnnntaactagagccatatcacagatgcattcatcatagtaattccagacattttcatcaccctaaaaggaaaccctgaaacccattagcagtcattccccattcctccaacccattctctccctaatccctagaaaccgccaatctgctgnnnttcatctatgcaa

SEQ ID NO: 2536 - DNA, 2616 bp, Macaca Fascicularis
aaggcctagaaaggggtattgacttgtccaaggtcagccagatggtgatagaactagagtgtggatccagcattgtttattgccattccaatatgctttccactgaaatttttatgcttttaaaaaatatttcagaaccaactagaaacggctccaccccatgagttaaagaatacgttccaactacttcatgaaatattggtaagtcatagctgttctgattcacttttatttaagaatgtattagtcaacaagtgtttataaatttaaaattgtatgtctttttattgtttctccattcatttggtctgcatttattgagaccaaatcttcatgtcagtcacgtgtctaatgcatttgatttagaggtgagcagtaataaaactacctcctaggagctcacagttgagtgagggagcaagacaactacacagacaactgtagtgcaggggactgaaggggagtaatagtgatggttaacccctgccggggccttactgtggagaaggcatcgtgttagcgcaaatgatgttaggtttaaacttcacagtcaccctcagaggtacatttctggttttatagtttatcaaatcttagacactattgattgtatatacgtactacaaaaagtatttttaagagccatgaaactgaaatgtaatcaattgtaggatgctttccagtctcagaagtgtgaagagctggggaaaaaaaaatcctctggcagttgtattgaaggatggagtaaagaaggatgcaagactgggaactggaagaccatttaggagtctgggaatattctgagtgtgaaataacaaggcctgtggtggggcaagggacagacagatcaagaggtattgtggaaagagaatcaatgggatttggtgactggttatgagttaatgagagtctggtccagaggttccttagagagtgagggcctgggttccctttggattcttgatacttcatagaggccttggcacagaatagccatttaataaagagttttgaataagaaataaatagaaagcaattgaataaccattcatttagttgtatttgcaaagtatagcaccattcactcatttataccagctcccttttatggtgggggaggttacacccacatatttcatatatattttgtacattttgtattttgaattgctcacattttcagccctgttttgcctttagttacaggttctgccttattttcatctcaccatgcacagaactagggagcttcaggaagtgccaggttttcactgtcagttagatttgccaagtcacagaggcgcagccagccctgaagtgcctgtctggctgctgtggcattgtgtgggcacgtggccaggcagatggcgtctcattgttgtgctctcgccctggcccagtcgtttcattctctggcagtgagggtttctgtgccgtcagacttcactttgttattctgtgacttgctggaggctggcaatggccttttgtcaaacacaccgaaaagatggaagggccagcacttaagagcagaactgtgcccttagagaaatggacagaggcaagtggcacacttcagacagttccagtgttcttgcagtttgaaatgtgatgttctaacattggttttgagtacgtgaatacttcctgtcctactgtttcccctaccctattctcaccctctctccacccgcatcctcaccaagagattgtgtgggacatgaccttgaaatgctggcgatgatccacgctgggatgtcatcgctggcaactgcactctcaggagcccaaaatcaggagtgaaatcgccacttctagtccccttatttcctatggaaacaacgccttccgcacccccagcacctgcagtcctcactgaaaagcttcatcaggatcgtccaccgtgtatattatacgcttcagatcatgttgcttatgttgttgctgcaatgaccatcgttttcactttgctggtaaccacttgattgctgacagctacagtcaatgaacctgctgatgactttttttaatgtagtacaacagtgacaattatgacaggcttaccttggaagagttgtcatttttactgccaattttttggatgaagatgtttttataaacctttcaaaatggtctgcaaacagagcaggaattgcacaattaactcaataatgctgtgtgttctcaagaagctcccttagtgaggccgatcttaggatggccgattctgcctgttgaaggcatcctgggaaagaaaacaagcatcccagcgggcatctgaccacgacttctcctggagtcctcacacggtcactgacaactacaatcagttttaggaagtagagcaccgtatcatcaaacttaccctgtcctgccccaccttccctgctaacattgaggtgtgtgcagttaccttctgagcttggaacaagcagactggaattttcctctgctacctcttgtgtataaaatcttgtttataaaatttcaaaagtaagtagatacactagggaagaaccttaattctaaatttggttcatgcgtggcaaagttcttagcttctaagagtataaaataaatttttcaaaaacataaaaaaaaaaaaaaaaaaaaaaa

SEQ ID NO: 2537 - DNA, 729 bp, Macaca Fascicularis
  misc_feature (1)...(729): n = A,T,C or G
gcctgggcnnnnncgccgcacanngcagcgctgcgccgggagctcggagtccggcggcttccctgtctttggctggcctggnnnncgcctgggcattcactgcctcatcctactagtgtgatagtttttaaaaattgagactcgcataaaagcaatgcatgctccctactccacccccagttgcgtagatcctccaaacggcatatcgccacattttacaggctcctccaagcgcgggttaagaacctccgtgttagtatagggagagcgcgccaaagctaccttaccttactgcttaccagcgtcacaannnnnnnnnnnnnnnggttcatggtgcctttatgcgctgcaactctcaccgggaaggtctgcagcttcactcctgaggccagcgagaccacgaacccaccgggaggaatgaatacttgcagacgggaggaacgaacaactacagatgccccgccttaagaggtataacaccgcgaaggtctgtggtttcactcctgaagcctgcgagaccnnnnnnnnnnnagaagcaagaaactccgaacacatctgaacatctgaaggaacagactccggacacactatcttctagaactgtaacgctcactgcgagggtctgcggcttcactcttaaagtcaacgagaccaagaacccaccaattccggacaaaatcagattggaaaatactgatggaaagtgaatatacacttatttttttaagc

SEQ ID NO: 2538 - DNA, 491 bp, Macaca Fascicularis
  misc_feature (1)...(491): n = A,T,C or G
tcccaccccccaccccctctttactgcctgcagtaaaaaaattaatagttttttatggaactgatttaagattagaaaaattaattttctttgatttcatcatgaacttttatttacatggctctaannnnnnnnnnnnnnnnnnnnnnnnnnnnnnagtgctagcatttattgttacataataaagaccttgacgcatatgtgcgacttatgagcatatcaattgttgcatgtcatttttgcctttgtttaagcctggaacttgtaagaaaataaaaattcaattttttttttctttttaggacganctatggaaaagctattgagagtatttagttacatcnnnnncagtacgtatgncaaacttnntggactatgacatcaaattaagagcttacgaagacnnnnnngnaaagtcattctaaagctntgaagcacatcacatacaccagcaagttcccaactannnnnnnnnnnnnnnagaactctca

SEQ ID NO: 2539 - DNA, 707 bp, Macaca Fascicularis
  misc_feature (1)...(707): n = A,T,C or G
tgcccnnnacaccaggagaagggccgggagagttccagggggactgagagacacagggaggctcacttcctccctgcccagcctgccttgtatttctccagactcggacaatcaaagggagagagggtgtatcagtcctgtttcagccggcatcgcccagtggcttccaggcctcagagctgtgtggcagggccccctgctggggctggacaccactgcagtccagtgcaaagctgcccccagagcccaggtgtcccccccacctaaccagacctggtgccttgacgcccccaccccagctgggacggtacagagaagggtcttggtttcctctcctactcccttccttgggctcctgaaatttgctcctaaatcttgttaattctttttctctggattttggtttcttttggctttcccttgccttccctttctctctctgtctccaactctctttccccacgtgtttcttgctgtctctatgttcctcttctctcatcctcaactttctgtccattcgggcctcctccccgcctcccacgccccagcccctccctccttggtctccttttcgatatgccaaaccaattttgggtcgagtgcatttaacgagaacaaaacaaaaggctcataacaacaagaacgtttcagaaaaaaacaaaaagtttaaaaaaaattgttgagtcagaaagtcaaacaaaggaagg

SEQ ID NO: 2540 - DNA, 1586 bp, Macaca Fascicularis
agctactggacccggccggtgtgaagtttcacacccaagaggatgaagggcacctacctggcttaacagaacgactcccagtgagtttcctgttactggaagtgcacttctccgggcccttacttgtagaagttctcacagatgcggcttctcctctggctcagatcatgtctaccatgaacgaagcagcccaccggctatccaaaagtgggacgagcctctatgcagtgctggagcttaagaagggtgcctcacctgaagacgtcaaaaaatcctacagacacttgtcatcctgtgtacactgctcacttgttgctgtttctgttgttgctgctgtttttgctgtggaacacttaaaccaccacctgagcaggatagtgggagaaaatatcagcagaacgtccagagtcagcctccaaggtcaggagccaaaggtgattttagaagagaggaaaatagcgaagatgatttttaagagataaagaaggatgaggtgctgacccagtgagagtgccttctgctgcccagtcccctggacacattgaagagaggagcacgtagccctgtcctgacattgaccctgatttgacccctcttcttttaagaatctcaataatctcttcagaagcattgatgacgttggtcccagtaaggacatcacctctgcccttggcaccacaactgtgtatagattttgcccagctactcttcctttttagttgctgtcccaattttactccatcagaaagctgccctcccatgccttcccttatgaggtctcaggcagtggtggcagatttttcctgaagagactttttcctgtgcctgccttgttattggaaccagtgccagctggtagggtccctgagccccttgtaatatcaccaccaagagcctgataaccgagcagggcggatcctgtccctggagccgcggcaccagttaactctcccttgttgcaactccgtgtaccaagaacccctagcatcagcctcattcctaagccaataacgcctttatggagctggtctcaccttctggtgcccacggccgttggcattgccagcctcattccatgccactatgagtcaactcaggaaaactgcgagtgcatttgaggcttaggggtagtcattccatctttagattctccttggacttcagctaccagaacagcatgcattagccttggtcctgtgggttaactgaagttcagacatcagtgccagcttgcctccatccttttcacatcttatgcaggccaattgacatataatttgttctcaaaaataggggcatgaaatatgtgatccggagaagattgcactttctggactcttttcccactcttgcctctttgtgctgctgtttcgtatcctcctcacaccgtgtatttcctacccactcagggtcactacctactaactcctcagacttctcttcctggactgggagaagggctaaagaatggcggtaaataaaagagcttttgtccaatcccaaggcatattttggacccagaaaagacaaattgtgtctggggtggaggaaaaaggcctaaagaaaaaaaaaaaaaaaaaaaaaaa

SEQ ID NO: 2541 - DNA, 769 bp, Macaca Fascicularis
  misc_feature (1)...(769): n = A,T,C or G
agaccatgtgtacaagaactacnntngctnnnnnatcattcactcgttagcaaaacgtttcataagtaccgtctgtctggctgctactatatgaggtgctgagaaattagtcagtgggagtgactttttatatttttcattcgtatgtagcctaagtaaggtgattcaagcttatacactgagagaaaaatgcaaaatatatttggttctcatttctgttgctgtcgtttcctttttaaagactatttatannnnnnnnnnnnnnngaacttcctataagaaactaaaagtgatctatttcagtgttcccttcacctttcctctcctttttgcataaatggtttcagtaacccatgctgttctctccctattctacgtctttctccctatgttgaaaaaagattcctgcagtttttaatgtgtttattgtcttcgatgtatgttaacattttaggaactgagtatcttaagagatgtcttagaatgctttagttttcataatttttcctttctgtagttttcattgtatttgctgttttgacatggaagtcatttaaaaagctggtgcgggaaaggactcttcaccgttgcacattttggttatctgatatgtaataaacccatggcttggcagnnnnnnnnnnnnnncccagagagaaggagatgtatttctgcagggtccagaccaaaagagccattaacagcatgttctcccatgttccatatcagcctgatgaaacctgccctgccaaggcataaacttttgtac

SEQ ID NO: 2542 - DNA, 717 bp, Macaca Fascicularis
  misc_feature (1)...(717): n = A,T,C or G
ataagaagatagttgcagttaaatttgaaaatggttgtaatgagccatgaagttcaatcnnnataatataggtactgctctttcagacaaatagtccannnnnnnnnnnnnnnnnnnnnnnnnnnnnnnnnnnnnnnnnnnnnnnnnnnnnnnnncaaatactacttcaggagcgaagattttcaaacaagcatacacgatgcaaaataccaatctggcttctagtctctctactgtttttgtttcactcagattagcttagttttctcatcaaagcagaatgctatcttgtatgtatttttttcattacaagacccatgannnnnnnnnnnnnnnnnnnnnnnnnnttccctgttcccttactgacatgtgaagaagggtttcttgctttcttaaacatttctgtaaggcaggctagaaatgtaaacttcaaatgtcagatgattatggtcttttgataggaatacattctgcttgggatatnnnnnnnnnnactctctaaggttctagggttgatattaacaaaggaatgtactttagaatannnnnnnnnnnnnnnnnnatatggaaattattttaagaaacaatgacatatcaaaactacttttatttacatgattttgaaatagactagaaagctttccctataaacatattaatattccaatcataactttaactcaagaatgcagttttaccaaaagaaaaatttgaaat

SEQ ID NO: 2543 - DNA, 1837 bp, Macaca Fascicularis
ttaaaaccttaaaaacatgactgccatgtttttgacccataaaacttacatttaattatttatccaatgcaacgtggacagtttttacaaacatcttgatcaggatatttttaatagaggaaaaattagaaactagttccaatgccaaaaaaaaaaaaaattagttaaataagctactgcatggccattcaatataatgataaccactgaaattacatttttaagtttatgtctttctgtgaatttacatgatattgttgactgacaaaaagtaaggttaaaatgtatgtactctctatgattggaatttttgttaaaaatatgtatacatatcacctatggataaaaatattatcttccctgcatttctaatacttggagatatgcctggcttgcaggtaacatttaaataaagttgaatgaataaatacaaaaaaatctggatatgcatatgtcaaaatgatcatactgattagtggctttagtttatttttcaacttttttgtttatatttgtttttatacaataaacccatataacctttgtcataaaaaaattttaaataaaaatacagctgctcagttcatatttccaagcaaaacaataatcaccatatttccaagcaaatatttccaagcaaaacaacaatttaactcacttagtctgaggtgcttaaaaagtgcccaaatgaagatgctcagatttctttagtgctactgcttaattctgtcataccaggccttcactgacagccacgcatgcattattggtctacagtttttaagtggctcaggttctatgttcagaatttcctgaatgcctaaagaatatctgcccacccacacacccaccttgctcagcttagcaaggctctttcatcatgttctatattttccaggaacacgttgtatgtagaaaaatggcccccaaggagcaactgaagcatgtgtgtaggcactttgaattgacatattgtggaataatcagaaatttatttggataaatagtctgtaatatagtcagggacttctcataattctgaagtcaatgaggccctcggtggttttatttccctcactttcaagacaatgggattcacgtagactatggatttactcattaaatgctgaatgtaagaacttgtcaatgtcgtcttattttgggaaaactgagcatggttccttttggtaaataaaatgaacataaaataaacattgcaggccatgtttgttccagacttctttgtgaactgcaaattcagctgctgccgcattgaagcagattctgctcgtaaagtagtgaaatgcctggtctgcaatatatcactatgggatgctgtaatgtcagaggcccttgtcaacccattggcaaaactcccatcctgtggctgcaggaaaagatgcaaaacattgcatccagtgtatggaccttggactttgagaattctggctttgataattgataactttaaaaaaaaaccttacgcaagcaatgatacatacctcttcacctgtgcaagataacttttaatcatgtagccactattctaaatagcttcactgtctctttcatcttttttgttggtggtggtaatgatgaaggtgatggtagtagtagctacggctactaagcctctattatgagccagatgccacaatttacaggtgaagacattaattcccaaaagtagaaccagaatttagatagtctctggagatacctgctacacaatgggtgcacacctgtgcctatgttttcaatcttggaatctttctattgtacagctccgtctccctttttccacctcgggattaaaaaaaaaaaaaaaaaggccaca

SEQ ID NO: 2544 - DNA, 722 bp, Macaca Fascicularis
  misc_feature (1)...(722): n = A,T,C or G
gctgaatggaccgacaagctgagcccgaaagcccagaagagcctcggtccaggagacgaagactggacccggtgtctagcacagcccagggcttcccggggggcagcaggagggcctgggggtcaccgccttcaggacaatggcctcagtggctctttctgccctgaactagcacccgcacctcctctgcttcctaaagggtgacctgggccgagcagccagtccttcttcccctgaggccagaggggacaccctgtggccacatcacacaggatactcagtagccatagtctcgcttcggggtgtnnnnnnnnnnnnnnnggagaggggacaggggccaggcccactcccttggccctcctcttggaccctaaggccaggctggatcctcttatcctgtggggagcccctgcctcggccatcgggctgagttccctcaagtccccgcataagtgggtgagagacccacgcgccgtcccccggggctgtggacgcacccacccttcggcagacagatgccctgagagctccggaggcgcgatccccatccccacccgcggagaagccagaaccgcgattgttgcgtctgggaaaacccagccggagccgcacggcccgtgcccccgctgtaattgtgctgaaaatgattctcaaatgacccaaactggctcttattttttctaatggccctctcaaagtattcatgaaattgatgctgtgtc

SEQ ID NO: 2545 - DNA, 763 bp, Macaca Fascicularis
  misc_feature (1)...(763): n = A,T,C or G
gacacgctcatggttcttgccaattacnnnntcttcaaagccaagtggaagcacccnnncagtcgctaccagacccagaagcaggaaagtttctttgtggacgacaggacctctctccaggtccccatgatgcaccaaaaggaaatgcacagattcctnnnnnnnnnnnnnntggcttgcaccgtcctccagatagaatacagaggaaatgccctggcgcttctggtcctccctgacccgggaaaaatgnnnnnnnnnnnnnnnnnnnnnnnnccagagaccctgagaaaatggggccaattgctcctgcccagtctgttggatttgcacttgccaaggttttcaatttctggaacgtataacctggaagacatacttccccaannnnnnnnnnnnnnnnnnnnnnnnnnnnnnnnnnnnnnnnnnnnnnnnnnnnnnnnnnnnnnnnnnnnnnnnnnnnnnngtgtcacacaaagcgatggtggacatgagtgagaagtgggaccgaggccggggctgcttcaggcctcctctcccagcccccatctctgaacaccatgtcagacccacatgcccacttcaacaggcctttcctcttgctcctttgggaggtgaccacccagagcttactcttcctgggaaaagttgtcaacccagnnnnnnnnnnnncgtggtgggaggccaggggttatcttatctcgccctagaccaaacagatagggcagcaccagcctgcatcctggggctgctatgtggaccagtt

SEQ ID NO: 2546 - DNA, 760 bp, Macaca Fascicularis
  misc_feature (1)...(760): n = A,T,C or G
tnnnnnnnnnnnnnnnnnnnnnnnnnnnnnnnnnnnnnnnnnnnnnnnnnnnnnnnnnnntgagtagctgggattacaggcacctgccaccgtgnnnnnnnnnnnnnnnnnnnnnnnnnnnnnnnnnnnnnnnnnnnnnnnnnnnnnnnnnnnnnnnnnnnnnnnnnnnnnnnnnnnnnnnnnnnnnnnnnnnnnnnnnnnnnnnnnnnnnnnnnnnnnnnnncgcgcctggcttattttcttgcaaacaaaactgaaaatatcagttcataatgtgtttccatatactttgcccttattcaaatggttatgaacaagtggccttccattttctattgccactgtaattatttgttcctgatctgacaacaccttcttcagctcctttctctggccaccgagattaacagtcccacaagcagtcttttgattcactaagtggcttaatagggcaaggttgatttgagccaatacttctggaatgttcatttcgatttgtaacagaagtttttttctgaattcatccccacaaggtgagctggaaaactgcaaccataaccaaagctagaaaatactggaagtagccaatatttctcttcatcaccaaagacttgtctccaatttttactattgttctattttnnnnnnnnnnccaatagtagtagctnnnnngcgagaggacactgatgaagaactttgcaggcccaaagnannnnaaaagtatgtnnnagcttgctgtgtatctgtcagttcatcctac

SEQ ID NO: 2547 - DNA, 1069 bp, Macaca Fascicularis
  misc_feature (1)...(1069): n = A,T,C or G
gctgtttttcttatttttgtatcatttttcagatgtaatttttacctttgctccgatcctcatttgctggtgtgggtgagggatccggcggcacgggctggtttcaccctcttcacgaggggctgcagggtcacacgctggtgccgggggtgctttggggggagccgcgccgatcaccagattaagcacatgtcctatcccgggcgggggagcggagccctcttggttctgggccgcatggacgtcggcggcaggatgaccgcatggcggcctttcccgaatggggcagaatctgctctgagccgggtgtctggccctgtgggggaccagctgtcttggtgcaccaggggcgggggacatgccccagtgaacccccccctcggcgcctggggcaagacagggcgggcaccgacccaccccagggacggctgcagaggccctgcccacagaccatggtcacccctctctccccagggcctggctgtccccaagggtgggtctggggccttggggccagtgagcgcctcttctcaggtgctgggattcagtccccaaacacagcgggaggggtccctggggcagannnnnnnnnnnnnnnagagttgggtggtttagttcgagtcccttttgtggagaaagggagatgaaaactgaccacgtgccaggtgtgcccgcagccccccagggagggccgcgttcggggagcagggggagggggagggccaccaagttggctttgctgccagcacaggcccctcctggaagtcctcgggagcggggcgcagaccggcacaggctctgggctccccatggagagaagctgtagtttttaccaaattgtgtacatctgggcagatgtttaatttctatgactaatccctgaactagatgaatgttaaagttttctgtctgaagcctgagtctattttggatctgtaaataatcattgccagtgtgacttttgttcaacaaaaggattgtactgtattaagaactgatgaaaaaaaattctcccgtaacatttttttaagaaaactttgtttgtttaaagaaaaaagtcttgtataaa

SEQ ID NO: 2548 - DNA, 750 bp, Macaca Fascicularis
  misc_feature (1)...(750): n = A,T,C or G
gaggcctgtgcagtagagtgtagaccnntntcatgtactgtactgtacnnntgatactgtaaacatactgtaataataatgtctcacatggaaacgagannnnnnnnnnnnnnnagcaagctgtagtttttaaaaatgtttttagttaaacgttgaggagaaaaaaaaaaggcttttcccccaaagtatcatgtgtgaacctacaacaccctgacctctttctctcctccttgattgtatgaataaccctgagatcacctcttagaactggttttaacctttagctgcagcggctgcgctgccacgtgtgtatatatatgacgttgtacattgcacatacccttggatccccacagtttggtcctcatcccagctacccctttatagtatgacgagttaacaagttggtgacctgcacaaagcgagacacagctatttaatctcttgccagacatcgccccttcttggtgcgatgctgtacaggtctctgtaaaaagtccttgcttgtctcagcagccaatcaacttatagtttatttttttcttgggtttttgttttgttttgttttctttctaatcgaggtgtgaaaaagttctaggttcatgttgaagttctgatgaagaaacacaattgagattttttcagtgataaaatctgcatatttgtatttcaacaatgtagctaaaacttgatgtaaattcctcctttttttccttttttggcttaatgaatatcatttattcagtatga

SEQ ID NO: 2549 - DNA, 697 bp, Macaca Fascicularis
  misc_feature (1)...(697): n = A,T,C or G
attctttgcaagcattttataagcagctgaaacatactccattgaatgcatatgctccagtacatttaatcagttgcccattgctctattttcttattaaaaaataatcagtcatagtatctctctctcacacatacccctacacctctagacattctttaagctctgcattcattctctatttccctccagaaaggttgtaccgatttacagtttcactggcaagatatgagggctccttgtatcgcagtccaaccccagctcatttcttagtataggtttgtttttaggatggtcgggctcaaagcagaactaagagatctgccgttttggacacggccgaggcgcgcagctcccgggggctggaacgcgctctgagtacgccggtcccttcaaggttgcgcgggctcccgacgagacccggcccagccgggcacccccgcgcgctcccggatctcgccggcctcgcgccggccggttgccatgagaaccacggagcctcggaacgcccgcagactagcctgtatctgagggggcgagggataccgaggcccaggcatggagctgccggatccggtgcgccagcggctgggaaacttcagccgggctgtgttcactgattccaatcggaccggtccggagtacagtgagggtcccggtgagtgacngnnnccggcgcannnnnngtggcctgctg

SEQ ID NO: 2550 - DNA, 710 bp, Macaca Fascicularis
  misc_feature (1)...(710): n = A,T,C or G
agaactagcaagtgtcccaanntttnccaaacgttggggaggggaaaattcactgtataatgaaaccctaaggnnnnnnnnnnnnnnnnnnnnnnnnnnnnnnnnnnnnnnnnnnaccatccttatttacagaagggcaaaactaactcaatgagaaaagctttataagttcaagggttgtaaaacatgacctacttagggtactctgctttctatgggnnnnnnnnnnnncttagaaaaagatnnnnnnnnnnnnnnngtaaagtgtcatacaatttagtagatttttgaagatggtaaacttannnnnnnnnnnnnnnnnnnnnnnnnnnntagaatgtttttctttgaaaacaggctaatatctttttcttttcttgacaaagtttcagctctttattgtgtcatttttctggtttaaatttcccttatctttccacctgtaatgtcagtggcaacaacatcatacttcacttacttgttaatttactttttacccttattctaagagcaagttgagttgaactgaatcttccttgtcctagtaacaatgtataaatagtggcttctctgtacannnnnnnnnnnnnnnnnctgatggatataattttgtgattgtattttaaagttgaataaatcacannnnnnnnnnnnnnnnnnnnnnnnnnnnnnnnnnnnnaaacaaaaatacatgcataatttgtgcacta

SEQ ID NO: 2551 - DNA, 767 bp, Macaca Fascicularis
  misc_feature (1)...(767): n = A,T,C or G
gtacagccgcaggacagcgagagcccccctgcccaactagtctccacctaccaccacctggagtctgtcatcaacacagcctgtttcaccctctggacccgcctcctctgagagagtggactggaccactgcatgtcacnnnnnnnnnnnnnnnnngtctacaagattgcctgccagaggcaggactgaccagcccttctgggccccnnnnnnnnnnnnnnnnnnnnngacacnnnnnnnnnnnnnnnnnnnncttgggggtctgctgccccagcctggnnnnnnnnnnnnnnnncctcaaacacccacagccagtgacccatccaggacttcagagggtcaggtcaacccaagnnnnnnnngggcccttctggggtactcctttctgcccacctggtagagtcttgggagttcacacggggtggcaaaaacttaccccctagagctcctctacctgatcctgccccccagcnnnnnnnnnnnnnnnnncacctgtgtcccttgagccctcgggtcttcacctcccacttggacnnnnnnnnnnnnnnnnnnnnnnnnnnnnncaactgggttccaatcccagctttgcctttgannnnnnnnnnnnnnntgtcaagtccctttgctctcagnnnnnnnnnnnnnnnnnnnnnnnnnnnnnnnnnnnnnnnnnngctctcccacctccacagnnnnnnnnnnnnnnnnnnnnnnntgggagggaagcaacagagaaactgaagtgttagacactannnncccccccc

SEQ ID NO: 2552 - DNA, 690 bp, Macaca Fascicularis
catttagacctggttgaggaggaggtgagatttatcagggagcattaaggagatgttaagagaattattattgtaagtggaagtaataggtttactcccaggaaagcagacacctcactccatttttcagaagtgtccttatcgtgagtgtcttactttggacataattgactttcaagtggatgctgcccctagggctcagaagttccattctctcctgtttgtctcattcggagatgaagaccataagtccagatgagtgcaaaagaaggctcgggttatggccaatttcattttgtaagttctaaaagcgttagcacttttacctggaaggagggagacaaaaacgttttgatgagaagaataattatcattactcttcatactttcggggaaaaaaggagttttcttgccatcaatatctttcatacttgcccagagcttgtctgctcctcctgctgcagcctgggtggtcagcatgactttttgtctggatggctggtaggtggcactccctgaagctgtgtaggagccagagtaaaagcatttcaggggaagatagtctaatgacactggagtctatctttgtatcctcaaagggagaactgggcatctggcagataattccatcaccaaatctgtagtgagcctactgcaaaataagaattctctttagaaggctggtctgtg

SEQ ID NO: 2553 - DNA, 781 bp, Macaca Fascicularis
  misc_feature (1)...(781): n = A,T,C or G
acagttcattggtagactctannnnnnnctgttatttttttaatactatttttgtttagatagaagtttcaaagaagataaaaacgctnnnngannnngagagtaaaaagattatgatgcaaagttatcatataaactgctcttgcagtccaaagggatacctggttaaagaagtttcttatttaaacatctaagactcagaaattacattaaatttttgtatatttcaacaccgttttaaatgtattttgttatgtttgtattatatggataaagcaaatgttgagttaaaatgcattgtgtcatttgtaaagtaagaagttactggccgggcgtggcnnnnnnnnnnnnnnnnnnnnnnnnnnnnnnnnnnnnnnnnnnnnnnnnnnnnnnnnnnnnnnnnnnnnnnnnnnnnnnnnnnnnnnnnnnnnnnnnnnnnnnnnnnnnnnnnnnnnnnnnnnnnnnnnnnnnnnnnnnnnnnnnnnnnnnnnnnnnnnnnnnnnnnnnnnnnnnnnnnnnnnnnnnnnnnnnnnnnnnnnnnnnnnnnnnnnnnnnnnnnnnnnnnnnnnnnnnnnnnnnnnnnnnnnnnnnnnnnnnnnnnnnnnnncaaaaacaacaacaacaacaaacaaaccagaagttacaaatgaatcctcaaggatgtgtatggttctatgtttgttttcttagaaacaaatgtgtttctttgtgtgtaatactgtgttttactatgtttaccttttataaaacataacctgtttatttatattctttgactctg

SEQ ID NO: 2554 - DNA, 735 bp, Macaca Fascicularis
  misc_feature (1)...(735): n = A,T,C or G
gcaaatgacttagaaaactgccaaggaaaaatgagtagttagattttgaaaatattaatcatagaatatttgttgtatgctaagnnnnnnnnncatattatatgnnnnnnnnnnnnnnnnnnnnnnnnnnnnnnnnnnnnnnnncagtttactgctgtagaaatcaaaatttggagaaataagttgtccaaggcaagaagatagtaaataagtacaagtgtaatatggacaatatctaacatgaaaagatttcagnnnnnnnnnnnnnnnnnnnnnnnnnnnnnnnnnnnnnnnnnnnnnnnnnnnnnnnnnnnnnnnnnnnnnnnnnnngataataaattatannnnnnnnnnnnnnnngtgtccagattaagggagataatagccctcccaccctactttgtgcaggtcatacctccccaaagtgtctacctaatcagtaggttcacaaaaaactcttggtcgttatagtatatgcctaaaatgtatgtatgcacttaggaatgttaaaaatttaaatatggtccaaagcaaataaaagcaaagaggaaaaactttggacatcttaaagactagaatagtcttttaaaaagtagaaagccagtatattggtttgaaatatagagatgtgtcccaatttcaagtattttaattgcaccttaatgaaattatctattttctatagatttattttagtactattgattgtattactttactgttacctgaatctat

SEQ ID NO: 2555 - DNA, 516 bp, Macaca Fascicularis
atggaacatagcacgtttctgtctggcctggtactggctacccttctctcccaagtgagccccttcaagatacctgtagaggaacttgaggacagagtgtttgtgaaatgcaataccagcgtcacatgggtagagggaacggtgggaacactgctcacaaataatacaagactggacctgggaaaacgcatcctggacccacgaggaatatataggtgtaatgggacagatatatacaaggacaaagaatctgctgtgcaagttcattatcgaatgtgccagaactgtgtggagctggatccagccaccctggctggcatcattgtcactgatgtcattgccactctgctccttgctttgggagtcttctgctttgctggacatgagactggaaggctctctggggctgccgacacacaagctctattgaggaatgaccaggtctatcagcccctccgagatcgagatgatgctcagtacagccgccttggaggaaactgggctcggaacaagtga

SEQ ID NO: 2556 - DNA, 2565 bp, Macaca Fascicularis
attctgctcatgcccgggctcccctgcccacccccagtgcatttatgtgatatcatgaaaaagcagcaggggtggcatgaacttgcacaccaggctgcccaggcttgagaccctgctctgccacccagaagccgggagcccctgaacaagcagcaattctgcgcctgggctttcctgactgcaaaatgaggataatcacagcccctgcctccaaagtgtcccgaggatcaaatgagttcatgatactcgtacggcgctcggatcgtgggtcttgctgtgttacccaggctggagtgcagtggcaccatcatagctccaggggaccctggcttgtccccctctgcccccagcgcccagcagagagcctggcacatgaggagagtgaggtttgaggggagaggaaggagaggacattcacaccccatgactggctacccagggcaggacagcaggggcccaggaaggtgactgggagaaggaggaggactatggccaggagctgggttccgcttggaaaatgcatcctgtcaggccctagcatctgtcagacacacaatcatgcgatgaaggagatgttggtatcaattaactcgtgttcagtgaaggccaaccctggacagtgagcagattacctatgtctgccaggcagggtgtggaggcgagaggcacattgtagctggatccgaaagctgcttattgcactcaaatcagcagccgacgcctcctcccattcaggccacccagaggtctgaccgatgacctgcccctgccccaggatgtgggagtgccaggcgaaatgcagtctttgcagctgcaagggagggctccagccaccatgctggaagaggctcacagggagaaggaggcggagaagggatgcgaccagtgctgccgattcttagtgagccgagccgttttgccaggtggggccaccctcagaaacaagccagcccgcgtttccccaagtcaagagagtgctgtagacattgtaatgtgcacggacccgggaggagggcagcgccacagccctggccactgggtcaaggggaaggtgaagtaggtgggggcgagtggccacagcgctcatcaacgcccgccctatcacagtagactcatctgcactccaagtgccaagggtgaggccaactcaaacccactgcagtcagggaatcccggaaagagagaaagggggtctcaccagcagctggaggcagagcagggttcgctgcactcccacaagggacctccccaccagcccctgtggctcagggacagtgaggggctgggccggtgcaggaaggagctcatttctctgtaggagggaggccgagaggctaagtggggaggaactggatgttctgaagaattgacatggccaagcgcccaaggagaccacagaagtgccccgtgtgcctcctgagccaccagccagtgggggtggcaccgggcagaccgcagctccagcccactctgcgcgggtggagtccccatgtgtccaggggcacagccacgtccatacagggggtgacccaagggactgaaggggcaactcagttcagctctaagtctgaggccacattctgcctctttccttgaactaatttctcacttgaactgaagacttaggtatctcctacaaaattgctttgccccatggactggttttagattttatatttttagagagtgagctccagaaaacaactttgaatcctctttggtaccttggcagcgctccctgggccaccagggaggaaaggccctgccacttcccacaaaggctctggatgcaccgtgtccctgcggacgcactcctgccccacagccacgcccacaggaaaaggtgcccgagagaaccttgaccctctggccagaaccggacgggcttgtaaactcaccgagttccaccagttcaaactcaagtatccagccaaaacaaatagagaactggtaggcaccgaggtccgcagcattgtgttcacggatgcgttcattcgttccaacattcattcattccttttcccaggccgtgctagcagctgggacacaacccagtcctggcccctgtcttcaagctgcgcacccacactggaggggcagacacagacaccccttctacacgcggggggagggaggcagtgtggagcaggagcagcccctccacctccccgggcctggggtgaggaagcttcctaaaagggctgccatggcttaagggatgagtgtcagccaagataaggtgggcggagaagcatcctaggcaaaggcagccagagagcaaaggcttccgtgcaagatgcttgaagcacctgggcatggcgggagcacagaggaccagccctgccacctctcgagggcgtgtggacttcacaggtgctaccacggagccgctgaggtctgatttgtgccgtttttagctggtcggagggactgtttgacccgacttctcatcctcagaggactccagggatggacttcagagctcacctccaaatgagatttgaaatttaatcatgtaccatgtcaatatatacacctactgtgtacccacaaaaaaaaaaaaaa

SEQ ID NO: 2557 - DNA, 731 bp, Macaca Fascicularis
  misc_feature (1)...(731): n = A,T,C or G
ccaaggagccgcgtgcacctctcgagaagctccnnnnnnnnnnnnnnncggccctcttttcgtcggactccagccctggagcagcaggaggagcccccagcccccaatcctcctgaggaggaactgtcggcccctgagcagagacccctccagccggaggaacccccagagccaagccctctgaggcatgatgggaccccggtgccagccaggagaaggcccctgggacatgggtttgacctcatgcaccccggcannnnnnnnnnnnnnnnnnnnnnnnnnnnnnnnnntaagccccagtgactgaaacccggcgctctgggagccaggccctgagtgggggccagaagtctcgctccgacgccactgagccctgctccctctgccaccgtggacacatcctctccactctctgggcctnnnnnnnnnnnnnnnnnnnnnnnnnnnnnnnnnnnnnnagacgtctgggaagaccttgacttaaggagtctgattctccaacacaggctggtggaccacctactccactgagaccatgtctcagggtgcctgccctggttcctctccagactgagtcagctatctggactgcatggaggctgggcacgggggctcatgcctgtcaccccagagctttgggaggccaaggtgggaggagcgcttgagaccaggagttgagaccagcctgggcaacatagcaagacccccatctttaaaagcaaaataaaaaa

SEQ ID NO: 2558 - DNA, 720 bp, Macaca Fascicularis
  misc_feature (1)...(720): n = A,T,C or G
ggagttccagactagcctggccgaggtggtgaggcccttgtctctactggaaacacaaaagtnnnnnnnnnnnnnnnnnnnnnnnnnnnnnnnnnnnnnnnnnnnnnnnnnnnnnnnnnnnnnnnnnnnnnnnnnnnnnnnnnnnnnnnnnnnnnnnnnnnnnnnnnnnnnnnnnnnnnnnnnnnnnnnnnnnnnnnggatcctgtctcaaaaaacaaaatcaaaacaaagcaaaaaaaaacagccaaccaaccaaaaaaaaaaaccaaaaagccacagggtgttatgtaaaggaattgttccattttgtagattggtatcatcatctccctgagaaacctttactacaattaagggaggagaccacccgtcatactgtcttatgcccaatttctgcctccaaatgaagaagaagtaaaaactaaaaggcagaaatgaaatccacaagcagacagcccagcactgagcactggccctggtagctaaagatcaacccctgaccgattccagacattgtatagaaaagcactgtgaaattccctgtactgttctgttctgttctgattactggtgcatgcagcccccagtcacgtaccctctgcttgctcaatcaatcacgaccctctcatgcggacccccctagagttgtaagcccttaaaagggacaggaattgctcactcagggagcttggttttggagacggatctcccgacgcaccc

SEQ ID NO: 2559 - DNA, 765 bp, Macaca Fascicularis
  misc_feature (1)...(765): n = A,T,C or G
ctnnncncgggaatcccnnnnnnnnnnnnnngcannntcggctcccagaacctggagaggannnnnnnnnnnnnnnnnnnnnnnnnnnnnnnnnnnnnnnnnnnnnnnnnnnnnnnnnnnnnnnnnnnnnnnnnnnnnnnnnnnnnnnnnnnnngggaaaannnnnnnnnnnnnnnnnnnnnnnnnnnnnnnnnnaacgagaaatacggtgaggccctgggccnnnnnnnnnnnnnnnnnnnnnnttataaactaatccgggacagcccagacgcggtggaggtcacgggcctgcctgatgacatccccttccggaaccccaacacctatgacatccaccggctggagaagatcctgaaggccnnnnnnnnnnnnnnnnnnnnnnnnnnnnnnnagctccaacccnnnnnnnnnnnnnnnnnnnnnnnnnnnnnnnnnnnnnnnnnnngcagcattcccaagcgcaagagaaagcgggtctcggaaggaaattccgtctcctcttcctcctcgtcttcctcttcctcgtcctctaannnnnnnnnnnnnnnnnnnnnnnatcagatctcactcgtgcaatggccaatgtacatggtggactatgccggcctgannnnnnnnnnnnnnnnnnnnnnnnnnnactagacctcagtactgaatcaggacctcactcagaaagactaaaggaaatgtaatttatgtacaaagtgtatattcggatannnnnnnnnnnnnnnnagtttttccanatgatttttacactat

SEQ ID NO: 2560 - DNA, 747 bp, Macaca Fascicularis
  misc_feature (1)...(747): n = A,T,C or G
tagnnnngacaaccacanggnnnnnnacaacacacatgctaaaaagtggactgtcttttaaaacttccaaggtaaataggtaaatgttttccacagccccannnnnnnnnnnnnnnnnnnnnnnnnnnnnnnnnnnnnnnnnnnnnnnnnnacagtaaaatacgtaataaatgctccaacctaccctctcccccgaaagctgcttctaagtttaaaaccatgaatttgactaacnnnnnnnnnnnnnnnnnnnnnnnntactagaggctgaatgagttttcaatgtctgagtcctagaaatatcactctctaccccagccctagcaaattctaactttacnnnnnnnnnnnnnnnnnnnnnnnnnnnnnnncctcagtttnnnnnnnnnnnnnnnnnnnnnnnnnnnnnaannnnnnnnnnnnnnnnnnnnnnnnnnnnnnnnnnnnnnnnnnnnnnnnnnnnnnnnnnnnnnnnnnnnnnnnnnnnnnnnnnnagaaagttaggttggtgagccaaannnnnnnnnnnnnnnnnnnnnnnnatctttctagcaataaacccnnnnnnnnnnnnnnnnnnnnacttttattcactgtgcttttggttatgttgcctcctgattagtcattaattttaatgaggttttttccttgtgttgagtatgaatagaccttacagtttnnnnnnnnnnnnnnnnncctgaattattggaaannnnnnnnnnnnnnncagcgtgactacagtta

SEQ ID NO: 2561 - DNA, 740 bp, Macaca Fascicularis
  misc_feature (1)...(740): n = A,T,C or G
aacccannncaaagnnngagtactagtattcccaaggcacacaccttnctctgaccttaggggctttggataagagctggagtaacactgtattnnnnnnnnnnnnnnnnnnnnnnnnnnnnnnnnnnnnnnaagaacaagctttgaagtaagatagacatgggtttgaggtccatctctgccttttatcagttgtgtagttccttaaactacaaattccacatcatgaagtagaaaacctacttcatgaagttattgtgaggaataaatgagactgcatgggtaaaatgcttacatctgatgactagcaagtgctaaacaaatttttattgtattactgttgccattatagttatattctatattataactataacatactatacgattattacaatatgctatattatcattattataatactattattataaaactaaccactaccaatgagagagtatatataaagtactagaatagtgccagagactaaatgaacagtaaaatgatacagatgatgacagtggagaagatccagaatagatttcgaggtagctgcttttagtaaagataataataataatctcatcctcttaagtctaaaaagtactggtgaatctgagggaatgaaaaatcccccttcttattgtctgaggatctcttttctaaacctctgttgaattcattcattcaattagccaaatatttattgagcacctaattgtaagccaagctgaga

SEQ ID NO: 2562 - DNA, 2677 bp, Macaca Fascicularis
aaaaaaaaaaaaaaaaggtgaaagtcaatccaaacaaagaaaaatggcacttccaaccaaaaacatgaagatgtagaaccctgtcatcaattgctgaggaaagagagacactcgagtagggaggggattgagaaaggggagaaggaaggagtgagagccctaaaaaataatgttcctagctaccctttacagctgtctctgcagggaagactggagaaagtagagggggaaatgagtgcaggaaaaaactgcctctgcagagcaggtaagaggaggttgttcagatttatggattttattaagccagttttctgtatcactctgctataaaggaaaatagctgctgcagggctgtctctcctccttcaggtgaggaacaaagggtgggtggagtcagagacagagtctggtctgcgagatcatggtgtgtctgcagctccgaagcactgcaggtgtttctgggtaatgtgccacatcatgtttatatcacgaacgggaattgaaaatcagtctgtgtggcagagatgagcccacatctgttatccttaccaacaataaataaataaatagcccagacaaacggatgccagtccatctacagcaacattttaaagcatgtgctttatgacaaaactggacccagcgtctgacagagactgcaggctgccgtgagcactgtagctatcctgaacgttgatgctacctattgctaaggggaacataatttatagcacaaaccctacagcctccactaaggttgagttttcccctcatttccttgcctttttattggcttcactgcatggttgccaatagcaacatccactggtagcaaggggagttcaacaccattgcaatctgccatatagtggagccctgacaatgtcaaccatcaatctagtagctgtttgtaattgcctccatctatttctcctgtcttgaggtatctttcctattgtgggtcaagattcggaaaccgctgactaatgccatgggtctgcatctccatgaccatgaagcagtggaaaggaaggtagcagcttcctggtgccaacaaccccagaggttagaggttgaactcttgcgggtttcaggcgtttttaatctcttttctaaaaaatttataattttgctaaaatgtgaggcatatgcagttatccatatattctgcttttccaaaaaagagaaagtaagtttcccagtccttattattaatgtttattttgtattggagaaagacatttgaaatgtgagccttcttgtaaaaactcaaactgaccagattatgtttgttttctcaggtctcttggcattaatggttgaaataaattcatcctactttttggatgagatgtatttttttagacatgagatgtattttttaggtatttagtcttactaatcagtatgtagctaatatgtgcgcaatctacaatatagtggcaatcctggtgggtagggacagcttcacatactgcaaagggcgccattcagtgcatagcagactggaactccctcctagcttggccaccagctgaacctgtaatcttaggactctccaagtcttagattctccatctattaaataaaagtactgacttttattcagtccccacaccaaaggaccaagatgtgtttagctttaaagaaattttccagataattttcctttttattcttctcaaataaaatagcaacaaacctaaagcggtcatcttcttaataaagacataataaaaagttacatatttggggtagacataaacacaatcatactacagatgtcttgagtctgtctctaactatgatgaaagatgtagtcatcaatacaattttttaaaaaatatgtccttctttttttgagacagggtcttgctccgtaacccaggctggagggcagtggcacaatcacagccactgcagccttgacctctccaacttaagtgatccatcctgcctcagcctcatgagtagctgggatcacaggtgtgcaccaccacgcccagctaaattttgcattgtttgtaaagacgaggcctcactatgctaaccacgctggtctcgaactcctgggctcaagtgatcctcctgccttggcctaccaaagtgttagggttagagatgtgagccactacacccagcttatatgtccttttatttcataaaaaacaattttagattatctgatatcatacatatcccataaatggtagtcattaatttaaaagtgaatttataaagtaagtcaagagaagttaaaattgcacatgcattttgtttctaaaagctgagatgtctatgcatttccaggtattgtatatttgcaaatacgttgggttagaaatcatctttaacattttgtgttagtgtaataacaatattatctaatattaatgctaccagaatccggttgcgttttctgtgtatcaaaatttatcatactttatccacttacactaggtgattaaacagaatctgcccaatttattctgcagtaaaattattttaaaacctatttttcctgctgactcttagaaactgcagaaagacaaaaaccagtttcatctccagtaatagtgtgaaacaatttccttccagtgggacagaaatctagacatattagggaaagatttaaatataaagaaaaatgttttggctggaaaaaaaaaaaaaaaaa

SEQ ID NO: 2563 - DNA, 2041 bp, Macaca Fascicularis
atgactcgggaaggttttaaatatctcagtgtcctggctgcacaccaggccagttaaatcagaattttgttagttcctgtgtaattaatttgttttgaagttccttaggaaaatcatgctaacaagaactgggtagacagagctggtagagccgaggttcgaaaagacggatttcaggggacagagaagttcacatgggagaagcaggatccaatggagagaacagaggggcctcaaagagagacagaaagaaggacctccagcctaggaggtacctttcaaaggaagcctgggactcaaatctagtttcagagagtacgctcaaaatcttaagtattaaagttcttaccagcttcaatggatattcagtggttcaggaatctgattcaccaatggatccccatcagtcagtcagaagtgaattcaaaagtgcaaacatagggtcctgggtccagtgatgaatttgattctgagtcacagcaccataactgttaaagaaaaaattatcagtgatacttgctaaagcatgataaggccgactttcttcagaatcattgagttacaggtatagggaccacagcagtgggattttggaattggagaagagagactgggcctaactccaaatgcagcatgcgcaagtaggaatgcatatccaaggagcagggtaggggttggtgggtggaagattaagagtaacatcagagtaaggggtttctgggtaaaacaacctaatggttcttgctgaagatggccagagtaattaatttggggaatggtgaaggataaggaacctgatcagatatcaagggtggggatactctcgctaaacggactcagtaggattcttgctaaaactggttttaacaacagggagcacaggtaggtctacaagaagattcaggactcttgactcaagtttcatcaagaatctttgtcagtagacttgacctttttgatacttaagtttttctttttatgcggttttgttttaaacaggctaatagctcgtcagcttgctaaaatccatgctatccatgcacacaatggctggatccccaaatctaatctttggctaaagatgggaaagtatttctctctcattcccacaggatttgcagatgaagacattaataaaaggtacaattatttttacatttgaaattatgttttatgttgctttgccttatgatagggtttcaaaggtaattgtaaagtttcattgtataaaatcaggttttctttctttgcattgaagtaaaataagcattgattctttggctgtcagatggcactacagaaaaaactgcctctctatccccctcagtgtccccttccaaaaaatatgccctacaacagcaaggggcagaggtggaagtaggggaacaccatttaaaaataaaaaggtaggtggtaatggtgaagcaagatttttcttgactttttaagatactgcagaattgagaggcaagtctagtattatatagaataagagcacaagagcctggagccaaacagattaaatctcagtcctactggttaacatttctgttgtgtaactcactcaactaaggaacttacctaactgttttcttatctataaaatggaaattacagtagtagtgtattaaccctagagaggttttgtgaagatcgagatagtatatgtaaaggtctttataacagtgcctggtcatcatgtaagtgttgaggtagctgctgttttaaaacttactattgttattcaaagaaggttattagagttgtatttctttcctaggctctccaaggtttatttgaaatccttaaggttaatgattgtttggaaaagctggaggtgtactatggtaaataataggaagaaaacccttaccccagtagaaaataatacagctagaacataacacacaattaaaatattaaatacattttgtatttcttttattccattttgtttgttcatgattataagttttataatcctttgaatcccacaattttcattcaacactacctttaaaaaaaaaaaaaaaaaaaaaaa

SEQ ID NO: 2564 - DNA, 741 bp, Macaca Fascicularis
  misc_feature (1)...(741): n = A,T,C or G
aacccgtgggaccagaggatatgggnnnnnnnnnnnnnnnnnnnnnnnnnacagagaaagagcgcnnnnnnnnnnnnnnnnnnnnnnnnnnnnnnnnnnnnnnnnnnnnnnnnnnnnnnnnnnnnnnnnnnnnnatctatcnnnnnnnnnnnnnnnatcagaaatacatgaagcccaaggatacgtctatgggcaatgcctcnnnnnnnnnnnnnnnnnnnnnnnnnnnnnnnnnnnnnnnnnnnnnnnnnnccacnnnnnnnnnnnnnnnnnnnnnnnnnatctgtaaggactacaaagagactggcttctgcggcttcggnnnnnnnnnnnnnnnnnnnnnnnnnnnnnnnnnnnnnnnnnnnnnnnnnnnnnnnnnnnnngagcttgatgagggtcgctatggtgtctatgaggatgaaaactatgaagtgggaagcgatgatgaggaaataccattcaannnnnnnnnnnnnnnncagagcttccaaaacccagttgtcaccnnnnnnnnnnnnnnnnnnnnnnnnnnnnnnnnnnnnnagcatttccgcaccaccccgcgctgttatgtctgtgaccagcagacctatggnnnnnnnnnnnnnnnnnnnnnnnnnnnnnnnnnnnnnnnnnnnnnnnnnnntacaggagagggtggtggtgcttccgacttgccagaagaccccgatgaggatccaattcccgttacttagctgtctgataattcttaaattaaat

SEQ ID NO: 2565 - DNA, 620 bp, Macaca Fascicularis
tcctcctgcttcccgcttttgtttccacttcccccattaactgttgtactctgtggaggggactcctttcggaaacagcaaaccaggggaaaactgccttgctagcaaattcacggactcaaaaaataaatgtcaagaaggctcagattaaaataccttttaatgataaaagactccagttcgcagtctcatcgtcttgtcgaacgcttggaaaaggaactcactaggcagataaccttttgttcgttaacattacggggaaacaagatgagaggcctcaagaaaggggtggaactgagaaaggagtgaaagcagcaaaatctagtcagatgccaaaggcttggcagaaaaaaaaaaacccagggaaaaccactgcagtgtttttagctagttatcgtggagaaattgatgccttgagtctcttatctgtctactctccaatatttctactcatggacattccaaatagttcacttggaagcaatatgaatgtccggagatgagggagtttatgtaaattatggtgttgaaaatatacagtaaaatgtttttaataaaataagcaattgcttgttagggtacaaaactggagaactggatatgcagctataaaattacga

SEQ ID NO: 2566 - DNA, 723 bp, Macaca Fascicularis
  misc_feature (1)...(723): n = A,T,C or G
tgctgcttgtttcaatgcnnnngnctcactgaaatcagaccacatttaactanttatatatcaaaaacgtccccaaacaccataagaccagtacagagttgctgccctaaaatgtataattagtgaaaaatgtacctctgcttccatttaaatcatggcagtgggttgggtgtcattatgtagtataaaaactggactagataaactgctattttagagcattattagcattctctgaatatatatgtgtatatatatatatttatatatatgctcatatactcccaattaaaagtcatatgaaagccacacaggattaacagaggcatctatattatcacttttgctctttgactaatcttatgctgttttggttatagagagaaaaaaggacatgggtgaagtgatttttttttttttaaataaaaggacaaatttgccacacaacagaacaatctgagtatgatctgtccttggggtatctttatatcctttccttgtgaaatagatataaagacttctgacagcaaaactactttaaaaatcaaaccaaatcaaacctacaagcacattcccatgcctcccctgctgcaatggttcttgctctcaatgtttagtagagaaattaagagccacattcaaagatggaaaacaagatttgtcattagaagcttgccaaggtaacagataaatacaactgagatgaattcatgttgtttaaga

SEQ ID NO: 2567 - DNA, 786 bp, Macaca Fascicularis
  misc_feature (1)...(786): n = A,T,C or G
tggatgatgatgannnngaagttgtggaatacgtggatgancnnntagaactggaggagaccagctagcccacagcaaccagacttcctgttgacgttcaggaaacacagattcttcgtccttttcccaacagccnnnnnnnnnnnnnnntcagagccttccctttactctccgaagtgaacgggaagcccccatctctctcactacatgtcaccaggggtgagcctgcctttcccgtcttcacacctgccacctcgtgttcacacctatcnnnnnnnnnnnnnnnnnnnnnnnnnnnnnnnnnnnnnnnnnnnnnnnnnnnnnnnnnnnnnnnnnnnnnnnnnnnnnnnnnnnnnnnnnnnnnnnnnnnnnnnnnnnnnnnnnnnnnnnnnnnnnnnnnnnnnnnnnnnnnnnnnnnnnnnnnnnnnnnnnnnnnnnnnnnnnnnnnnnnnnnnnnnnnnnnnnnnnnnnnnnnnnnnnnnnnnnnnnnnnnnnttgacttcaggtgatccacctgccttggcctcccannnnnnnnnnnnnnnaggtgtgagccaccgtgcccggcctctttctcacctttacacctgtcttcttatcctcacatctgttttcacaccttcacccctgtctttctcatgttcacacttgtcttccctgtgttcatgcctgactttctcaccattttggtttgaaggacagtcttctctggcttgtatttttgttttgtttcttttttttttccccagaaannnnnnngtattattttttaaataagaaaaacct

SEQ ID NO: 2568 - DNA, 185 bp, Macaca Fascicularis
agcaaacctgttaacatgggaacattgacataataaaggagttttattctttggggggaaaaaaaaatcacagttgttgacatgacggtatttttatccccaccccacccccagaaaagggcaaaaaaggtcaaggacatattaattgcaaaaggtgtacgttctagtgttgacaggtacacacc

SEQ ID NO: 2569 - DNA, 677 bp, Macaca Fascicularis
  misc_feature (1)...(677): n = A,T,C or G
cagaaaatcccactttctcttctcacacagtcaatttcagcagcctgatcctcagagttggaagcaccgtgtcctcagggtataggaggggaaatcactagcatgtccctggagtcctggtgccagatccttctccatctttttgggaatcaaatgcgaatattctgtatcaatttgaataactttatacataaattatgattcagtttacaagaatattacctcacacacatacacacataggtttttaatatttgttnnnnnnnnnnnnnnnnnnnntctcttatagtgttttacatttatttaatgtattagatttattttaatttcatgtcggtttcctcattccttcctctttgtattgcatttccctataactatcacctattttnnnnnnnnnnnnnnnnnnngctcccggtgcaggcagcagggggaggagaaggaaatgggtcacactcctgacctccctgtacagccgcaggttcccaaacacagaggtccctgctctgcaccttccctggggacagctttcttattgnnnnnnnnnnnnnnnnnnnnnnnnnnnnnnnnnnttcaggggtgccgacccaggtacagctactgaatccactgcaggagtgnnaataagcttccaaaacaagtatcacctgnnnnnnnatggagttcatccctgtaat

SEQ ID NO: 2570 - DNA, 1064 bp, Macaca Fascicularis
  misc_feature (1)...(1064): n = A,T,C or G
tctgagctgttaacaagtcattcaatggacaagttctcttttagttccatctccattatttcctgctctaatgtctagtgggaggggtcgtatcatgaaaggaccaccaaaataataaaaggcagctaatggaatggagaaacaaaagcatggttagtatatacactcactattacctccaatgactcgggaattgcctgcacattattatatccaatagattgcatgtcatattccatttggttcaacacaacaacctatgtgttatcattacagctttggctgctgttaaagaatccagctctctattttgataacgacagtcttaaagctgaggcaatgctccctcctctatctctatgtaatttgccatagaattaggatgattagattgaaacacgttatatgttttaaaaactacattgcttcattactttcattttccgacaacatcaaattaacaagaggcagtgttaaatattttaaatggtgctatagccaatgtatttggatgcttgcactgctggttgtgtatcatcaatataaactttttatccaatgactcgactttaattacatctaagttagacttgttcacgttcagtttgtacagttgtgtgttgacttactatgtttttgaaagtggcgacttctaccaaatgagaagttcccattgtcaaaaaaaaaagagacctgcttgcagcattcatgttcacaacagagtaaaagagaatattgtaaagaattactgcagggccgggcgcggtggctcaagcctgtaatcccagcactttgggaggccgagacgggcggatcacgaggtcagnnnnnnnnnnnnnnnnnnnnnnnnnnnnnnnnnnnnnnnnnnnnnnnnnnnnnnnnnnnnnnnnnnnnnnnnnnnnnnnnnnnnnnnnnnnnnnnnnnnnnnnnnnnnnnnnnnnnnnnnnnnnnnnnnnnnnnnnnnnnnnnnnnnnnnnnnnnnnnnnnnnnnnnnnnnnnnnnnnnnnnnnnnnnnnnnnnnnnnnnnnnnnnnnncaaaaaaaaaaaaaaaaaaaaaaaaagaa

SEQ ID NO: 2571 - DNA, 2934 bp, Macaca Fascicularis
  misc_feature (1)...(2934): n = A,T,C or G
tatagagacagacttttgagctggaagagagcataaagaaatattcagtatgatgaagtgatatgccaaggtccaacggtgaacactatgtatgctaaaaattaagggacatgtgtttgccttaataaaatattgtcaataatcctcacaatattaaaaaacagactaccctcctattttactgttcaaatgtttcactgtgcaaataatttctaattgtaaacaaagttgtcgcactatcctgcacgttaaataagccattaattagaatactgtgactaaatgctctggtcacttaaatattgaattcagacgctcagtcttttttgtttgatgatgtacttttaaatttatgccttcaggtcaccaagataaaacagaggagacagtggtgacatttgcttatgggtgaacataggccgtgagctcttgagtagagttaagagggaccatatatattccttctccaccttgggaactctgattagccagaaagcagcatttgtagattaggaatgaagaaaatgacaattgtcattcatttggacacaggttgatctctaagtaaatccctaaatgcgtgtgggagattcctggtgatttgttctgtttcatactcctcttgctgtgggcaactgagttccccaaattttaatagagttttgccagcataattgcacggtacactgacacaagttagtttttcttttttacacattttccttcacttgaactttctggccattttccacatgcatttgacagaagaattacaaatatagactgttattacatcttagatggaggaaatggtccatggaccagtgtctgaaatgttcagtcttggcaatcaaggctctcacctcagcatttgctgggatgcaggaaaccagctaatggctgataatgtccaggaaattagtaacttgtgcatatggtaaatgctccaatcccagccaaatgatttgtttaactgacggctggagttttcataggaactgttagcacagtgtaatagttggattttattaactggactatgtgctaaatacttattgttccctagttgaagaatgtaaccataatgcaaaatacaatgggaaattgtatatccagaaagtaaagatgttaaaggcaccaacattctatactccaaaagaacttatttttttgtgtcaacattattagtatcacaattttcttacgactatatcttagttcggaattctataaaatgaattgtgtaccttttgttatgataaagatattaaatacaatgtcactttgcttaacatcttattcctctccgttaattttgttagggacagtgatgattatttataacctattgcttgcattaattgattatctacagagtatccagctatcaggacagccttgtgctttcaatgttgtctcatttaatccccctgtttttcaccccttgctcctctttcatagttaactgtcatgaatccttcaggcccaaggtcaagtggcagttccttgggaaaatgttactgacacccaattctaggtcacgttaccctttttatcttttctcatagaagcttcttcatcatcatagagtttatgtaacaatttgcaatttaaattttacatgagagactattggattactcttgctgttccagactagagtataaaatataaatgcaaagatcataactgttaccactcgcactgtgtatcttctgaaccaaccacaacgtctatccagcaagtagcaagtaacaatacttgttcaatgaaagaactctatgtgatagtcattaatgtcccagttttacaaatgaaataattaatgctcaaagagactaatttattaaaatcgtacacccaagtagatgtcagtatcctatctcatgtctaactctgaagccattagtgtattagagctctttctttttaattgagtaggacaaagaaagaaagtactgcaaaattcatctttccttttataacaaggttgaaaccttctctgtgcaatctttcagagaagtggttctcaattagaggcattttgcccaccataggggacatttggcaatgtttggagacatttgtggttgtcttgactgagaggaaagttaatattggcatccactgacactacatgatgcatgccagggcccctgcacacttcattggtcagctcaactgccttcctctttggtttcctttctttctagtttccttcattgattcattcagcataaagtatattcatatagtgcttagtgtatagaaaacccataatgagtaagatacaactccagacctgaggaaacttatggtttatagggaagtgcagataagtaaataggtaattgttatacatggtaaggagctatctagaggtttacattcaactggccactatgttaatactgaagctaacacctgaaccactgctttagaacgctggttctcaactgcaacatctataaacatttatggtggtcacagctagggcacaagttgctactggcatctgttcggtgggtagaggccaggatgctgctagttatactgcaatgcattaaagagtgtctcatttttgctacaataaagaattattgtattcttttttattttgctacaataaagaattattggccggtggctcaagcctgtaatcccaggactttgggaggcgaagacgggcggatcacgaggtcaggagattgnnnnnnnnnnnnnnnnnnnnnnnnnnnnnnnnnnnnnnnnnnnnnnnnnnnnnnnnnnnnnnnnnnnnnnnnnnnnnnnnnnnnnnnnnnnnnnnnnnnnnnnnnnnnnnnnnnnnnnnnnnnnnnnnnnnnnnnnnnnnnnnnnnnnnnnnnnnnnnnnnnnnnnnnnnnnnnnnnnnnnnnnnnnnnnnnnnnnnnnnncaaaaaaaaaaaaaaaaaaaaa

SEQ ID NO: 2572 - DNA, 733 bp, Macaca Fascicularis
  misc_feature (1)...(733): n = A,T,C or G
atgctgtgctcannncnttgcctgggtgctggannnnnnnnnnnnnnnnnnnnnnnagccccagggctgcccnnnnnnnnnnnnnnnnncccctccagacagttctgcctagcttggggcctgatctgtgtagtaaggaaacaaagaaaagacaacagggcactggcttagtttgatttccttcagcgcaaaccctgagatatggattcaagtgcaaggccgtgggtgaggaaacactgagagggtagtggggaggtgacagggaagagaaggaagcaataaacagtgcaagctcctgctgtggggaactgtagctgtgtcctggcggggagctccaggaggcagagtgcaacacacacctgcaagatgtcccactgcagccaggcctgggttgaggactgctctcctgggatgctacctccccagcacctctggcctgccctgcactgcagcagaatgggctccagtggctagaaaaaggccacaggaccaggcatggtnnnnnnnnnnnnnnatcccaacactttgggaagccgaggcaggtggatcacctgaggtcaggagttggagaccagcctggccaaaacggcaaaaccccgtctctaccaaaaatacaaaaaacttagctgggcatggtggcacatgcctgtaatcccagctactccagaggttgnnnnnnnnnnnnnnnnnnnncctgggaggcggagattgcagtgagctgagatcgcaccac

SEQ ID NO: 2573 - DNA, 758 bp, Macaca Fascicularis
  misc_feature (1)...(758): n = A,T,C or G
aagcaaaggaagcgccgggtgtaaagtttgcnnnnnnnnnnnnnnnnntagttttcctttttttgttttaaaagaaagggttttatatgttctattgtaaaatacggaaattaaacagggacttaannnnnnnnnnnnnnnnnnnnnnnnnnnnnnnnnnnnnnnggctcctgacattggccgaggtctgtgttttgaannnnnnnnnnnnnnnnnnnaaacacgtggattctattacactggatttggaataaatgnnnnnnnnnnnnnnnnttccaagcagctcagcccnnnnnnnnnnnnnnnaccaggcgaatgtcagggctcccaaaccactagtgccaaagggtcatgttgaaaagttcagaatatttatnnnnnnnnntataataattgccccccaccttagtatttttnnnnnnnnnnaaaatttagatattgtttttcagtggcttgagtgttttgccttttcaaaggataactgattttcttgaaaaacggagtataatcgtgaaagagaggaagatgataaaaaaaaaaaaagtcaaatgttgattggttgtgtaaaagttttgtcatataaatgtattggggagcttccaattagcatacatagacacatgtgtccatggctaagacctgcttatattttgctttatagatgtagtcatagcatgttgttaattgcctcatgtaaataaaaaggctattaagttttccagtaatatttattaatctgtatttacaatagaacatat

SEQ ID NO: 2574 - DNA, 2900 bp, Macaca Fascicularis
gagaaacaggccgggtggctgagccaggctgtgctcggagcgcctgacaggcccaacagacccatgctgcattcggagacctcccctggccgggggcacctcctggctgtgctcctggccttccttggcaccacctgggcagaggtgtggccaccccagctacaggagcaggctccgatggccagagccctgaccaggaaggagagtttcttgctcctttccctgcacaaccgcctgcgcagctgggtccagccccctgcggctgacatgcggaggctggactggagtgacagcctggcccaactggctcaagccagggcagccctctgtggaaccccaaccccgagcctggcgtccgccccgtggcacaccttgcaagtgggctggaacgtgcagctgctgcctgcgggctcagcgtcctttgtcgaagtggtcagcctgtggtttgcagaggggcagcggtacagccacgcagcaggggagtgtgcccgcaatgccacctgcacccactacacgcagctcgtgtgggccacctcaagccagctgggctgtgggcggcacctgtgctctgcagaccaggcagcgatagaagcctttgtctgtgcctactcccccggaggcaactgggaggtcaacggaaagacaatcgtcccctataagaagggcgcctggtgttcgctctgcacagccagcgtctcgggctgcttcaaagcctgggaccatgcaggggggctctgtggtgagtgcatgagggctcagtctggtgaccctggggtaggggtggcagcatcctactgggctgtcccagaagccccgaccctcagcacccagggaggctcctgcccggcctgctgggaggagacccttttctcggagtcccctcctcctctgaccagaggtccccaggaacccttgtcgcatgagctgccagaaccacggacgtctcaacatcagcacctgccactgccactgtccacctggctacactggcaggtactgccaagtgcggtgcagcctgcagtgtgtgcacggccggtttcgggaggaggagtgctcgtgcgtctgtgacgtcggctacgggggagcccagtgtgccagtgagtcctgccccagggcccccaaagagccagcccctcccaagacccccttcaatggggcgtcagctcccaggagcctactatgtacctctctttccaactaattcggtgacaacacgttgagagcttgaaaccagccacagcgtggatatttacaccaaagaaattggcaaatgctacaaatcatggatttttttttttcttttgagagagagcaagctcagtgttccacacttaacagcacactcctgaccgtcaccacccactctgttggagcaggtggctggaggaaggggcttagctccctggcagggcaggaaagggcagggattctgaagtccgcacacaaactcaggctcccctaccccagccaaggtgcattttcccttccacacctgtgacctgaggatcgacggagactgcttcatggtgtcttcagaggcagacacctattacagagccaggatgaaatgccaggtgacggtcacccccaccttcccagggacccccccagggcctcaagtgagggtcttaatggagggaccctggagtgagggatgctttcttcaatgtctctgagctcaccctgttcatcagcagaaagcaggggtcatggactctgaggctcatagaagccaggaggtcacttattgacctgaggggtcaaggtcaaggccaacctccatctaagggagtttcaggttgccttgcaggagggaatgcaagatcaaagtggccagagctcggggctgctcaataaaaccagcagctcagacttccactggcagctctcgaaaccacagttaatttctggggttggcaatcaactcagatatgttgaagacactgtgcaggtgaaacagaacatcctcaggggccagaccttgcccgggcctgtgggctgccggttgggccgctgtgcacagggagaagagaagcagatgtgagcagaggggactcctgctcttggaagggaggctgtgcgggctgggggtgacgacagcctggccagcacacacgtgacatcctcggccatgggcggggtggcaggaaggggcagccttcctaggagccctgcctgtgtaacctggggtggggttacagaggaaaggtggggtgctggcccagatcgagagccagaaagtgcaggacatcctcgccttctacctgggccgcctggagaccaccaacgaggtgactgacagtgacttcgagaccaggaacttctggatcgggctcacctataagaccgccaaggactccttccgctgggccacaggggagcaccaggccttcaccagttttgcctttgggcagcctgacaaccaggggtttggcaactgcgtggagctgcaggcatcagctgccttcaactggaacgaccagcgctgcaaaacccgaaaccgctacatctgccagtttgcccaggagcacatctcccggtggggtccagggtcctgaggcctggccgcacagctccctcgcctgccctgggtgcaccggctctgcttacctgtctgcccacctgtctggaacaagggccaggtgaagaccgcatgcctcatgtccaaagaggtcttagaccttggactctgccggaagttgggcagagagaggcatggaggccagtgagggccagggagtgagtgttagacgctgaaggagaagaccccgccagtgatccaaagaggctgctctcttctacctggcccaggccctgtggggcagcggagcttccctgtggcgtgaacctcacagggtattaaactaagttatgaatcagctgaaaaaaaaaaaaaaaaa

SEQ ID NO: 2575 - DNA, 750 bp, Macaca Fascicularis
  misc_feature (1)...(750): n = A,T,C or G
ctgctgaaaaaacgnnnccatttcaagttcccaaattacttctatactnnnnnnnnnnnnnnnaaatggagatatgaaaagattctctnnnnnnnttgaaagacttaatagagatacatgagactaagttaatcttggaacaaaattacactttttttgtctttcatgggagtgatactcagttattgcatatctttacaaaattgtaactgttggagaattacagtatttcatcaagaaattaattagagtttttaaataatcaagagcatattctatggaattaacatttagtggactagaattacataagcaggccatcagtgatcacaaggcatatgagtttgtnnnnnnnnnnnnnnnnnngagaggtaatttggagtacagacagacaccctgctgagtagaatataaaagttaatgtaaagttcttaacgataaagagtagtccttttaaatagatgcattgatttgtatatctctgaaaaagttgattatgattaaatgtgtgggtagttaattaaaatttagggtaacaaccaggatgtatggattctgaggttttggcttcttgagctttctcttgagtacttgatactgtcttttgaatattttgaggtttctaattaatggtatgctagtttctactgttttatataaaaatttatctagtgttgtataagggctttagtattctggatgatgggagtggctttttgtggcatatcgttgttttacttaattgaaata

SEQ ID NO: 2576 - DNA, 754 bp, Macaca Fascicularis
cagatcaaccagccacagctggaaagtatgtgaatcgaaaatacaataaaataaaaataatgcagcaattaaaataatacaaataaaaacaatccagtataacaactatttacacagcatttatattagttattataagtaatctataaataatttgaagtgtatgagaaaatgtacctaggttatatgccattttatatgagggacctgagtatccacagattttggtatctgcaggaactaatcctccacagataccaagggataactaatttatttaataagcagtggtattcacacctgtgtgccaaaagttccgcttttcatggtgaccctattatcttggaaagagagtttcctttacatatcaaatatatctaagctaaaagctgaactttaacagccagcatacccctaaatttctcacataaaagcaatacaaagggctgaggtatagactttcccaagataatcttgcatctgtgaagtactttaccatttatgcaagataacgttattccattgatgccattcataatcctttgaggtgggatctgttggtgtaagtcttactcaggcaagactggcatccatgctttaaaaaaagctgcactctaccccaactcttaagggagtgtttttcacagtattttattataacagtgtgtgttatagtagagagatcctttcatccactgatctcagactttaccatcaaaatattaactgtggtgtctagagagagccagagggt

SEQ ID NO: 2577 - DNA, 774 bp, Macaca Fascicularis
  misc_feature (1)...(774): n = A,T,C or G
cctggaaatagctgcctcatgnnacttaggccatgactggatttaatgtcagaagttattctacaaacgggtatgctgcagtgcagaggctagacaactgtgaacggggctcccaaagctggcaaaagaagatgcaattgttgccgtgagtgactttgaaagcccctgttgccttgcggtgcccttctgaaattcaaacagtaatgcagaagtgtctgctttagaatttacggtgtctaaaattcatgtttttaaaagagcttgcctacagatggtttccacacccgaaattgtgccctgtgagttgcatagctggaagttcaatgctcagtcctaccttggctcccattaaacatttggtgctctgtggattgagttgaacgtgttgaggctttgcaatttcacttgtgttaaaggctctggcatttttccatttctatgcaaatttctttgaagcagaattgcttgcatatttcttctctgccttcacagaaagcagagtttctttcaaacttcnnnnnnnnnnnnnnnnnnnnnnnnnnntgtcccttaccatgattattaagtttgtggcttgagtttacaaattttgtttgttgcattgatgttcccatgtagtaattttcagtttggttgtgaaaaaaccctgggctgaagttagcatttaagttaaaaaaaaaactagtcccagatttgaaaacttgtaataaaattgaaactcactggttttctatgactttttgaactcttgtaatcgagttttgatcacatttc

SEQ ID NO: 2578 - DNA, 693 bp, Macaca Fascicularis
cagaagagtgcctcctatgaagagcgcctcgtatttactcaatactttctatgaggcaccttcatccccatttcagatgaagcagctcagactcggggctctgtccctaaccacagccccatggtggctgtgtgggggatgtgcgctgacaaacgccttcacactttgagctccacggagtcgccttcctcctgcctctcactgtctaggtcacctcgcatactctgcaaggctttacatcactgaagactctggggctttttttttttgttttttggctttagtgctctgctgcctagaacaacccttctccaatttcttctgtatctgttttggcaattagttgttcgggttaagaagtgtagagtccccacccgctgcatgcaatctggtagcaagttctgttcttcgccctggtccaggtcatggcctctctcacagcgactgccccgggcagaatgcctgcactcaacaggggagagccgcaggaagtgccaagcaggcacgagggaaggaggaaaggtggggccggggctcctggtcggatggcggtcttagggagggtggcactgcaatctacccgccgtcaggccggcaaggctacgactcatccgtgcgatgcttcgttatcttagttcctccctgcactaccaagccctcagcctctttttctgaaattggtttctgccttcc

SEQ ID NO: 2579 - DNA, 520 bp, Macaca Fascicularis
atatatagtgcaattcagttttagtttatgcagcatggtttggaaacaaaagatacatgggatttaaacttgatttgttttcttcttacagtagaagtaaatgctcttgtgggttgaattgcatcttccaaggaagatatgttcacattcaaacccccagtactgtacatgtaaccttatttggaaatagggtctttttagatgcaatcaagttagaattaggtcatactggattacagtgggccttaacccaataactagtttttttggttaaaaaaaaaaaaggaaatgtgaacagagagacagagaatgccgtgagatgatggagggatagattggaatgatgtctacaagctaaggaatactgaggattgctgccagccatccaaagctgggagagaagatggaacaactcccttggagcctgcaagaagaaccaactccactgatgctttgatttgggatttctgaccggaactggaggaaaataaatttatgttcttttaagcccagttttact

SEQ ID NO: 2580 - DNA, 690 bp, Macaca Fascicularis
  misc_feature (1)...(690): n = A,T,C or G
ctggagtgtaatagcgcgatctcggctcacagcaaccttcacctcacggattcaagcgattctcctgcctcagcctcctgagtagctgggattacaggcgcccannnnnnnnnnnnnnnnnnnnnnnnnnnnnnnnnnnnnnnnnnnnnnnnnnnnnnnnnnnnnnnnnnnnnnnnnnnnnnnnnnnnnnnnnnnnnnnnnnnnnnnnnnnnnnnnnnnnnnnnnnnnnnnnnnnnnnnnnnnnnnnnnnnntttgccctcatttcttgcccatttgctttgcacattttccccattctccaacagatccagcagactgcagccctcgggcgtttgcatgtgctgtttgcactccttggcagcctgtcctgagggattcatttggttctcaccgtctgctcaataggggaacatcatcttctcattagggattaccccactacccgttgtgaacttgcaagcaaacccttccctccccatatgctccctgcctcctccttcatcttttatttttttctctaaagaacttttcactatctagcacactatatattttaagtatttatttggtctactgtctgccttcaccactacaatgtcaattccataaggaaaagcatttgtatcgatgttgatcactgctgcatcaccaacacctaaaaaaataaaacagagagaccngcacatgat

SEQ ID NO: 2581 - DNA, 185 bp, Macaca Fascicularis
ggtgtgtacctgtcaacactagaacgtacaccttttgcaattaatatgtccttgaccttttttgcccttttctgggggtggggtggggataaaaataccgtcatgtcaacaactgtgatttttttttccccccaaagaataaaactcctttattatgtcaatgttcccatgttaacaggtttgct

SEQ ID NO: 2582 - DNA, 2355 bp, Macaca Fascicularis
aaacagagggcgaatgagttgaagtgaaaacaatgcctttacctgctgcacactcgcgactctcatatacgagtccaagaagatcaacagaggcacatggatatttttgccttgaaataacttggaggccggaaaacaagtgggtggggaaaagaagcaaagtcacaatccacagcaccccctttccttttaagtctgaaaaggggagaaaagtcaaaaaggtgaagaccttcctggaattctcagctcctttccgccctaaggaaaggatatgggagtttacggctctttaagagtccgggtttgagcagcgtcagcggaggaggacaaagtttgcaaatgtgaggagggggcgaaagtttacaaaaacaaaagcacagtttcttcgcaagtgattaccgtgctcggagtacgtgaacaccagcagatcctccaggatttggaccagcgtttctatctgtttaccttcctggacattgttcagcctgactatcaacttcttcagagtttcctcgtcctcctcgcacccctgacagctgccactagccatggtggcccctgcttccaacccgccgccctcccagcacgaacgtccgctgctcagggaaccggcaggggcgccggccacagctccccgggatctagctcagctcaccgccctcagccagggctccccgggggccccgtcggcgcccacgcccgcctgtttatgaggaaggcggtggctccccgccccgcggtgccctccctctccagagccctcctgctcggcttcctcctcccccagccaggccccaaaaaaccagctcaggggcctgccagaggctccgccggggcgacgggccgcgcagaacttcggcggcggccgtggggctgctggagccgggcctggccgggatgaccgtgccggtggcccccacgcacgcctagactggacccgggcggacgccgcctcctgggaccagattccaccacaggggcggcgcggcggggagtcgcgcaggaagaaactgactcagcggactccgccgagtcccaaggcccggagccccgcagcggaggcgcgcagtgcgcagccctgccggccaccctccgcgacccgccagccggggatcctgcggccccagggaaggtctgggaactggcagcaggaaaaatgaaagccgcctatccccagatctaagaatagaaatcagggcgctgggaaaaagaggacaccgcccagatggcccctttaggaaaacattctctatatagagttctccccttaaaggatggagagagaggttagccatcaaaacttgccccgctactgtcttttttattattgttgtgactgttagtgggagaggaaataaacattgtttccctgtgagttatctgaagctctggtcaccaaaaggccactaaattaacttttggaattgagttgcactaggcaggatcctgatacgtgggacacccgaaaagtaatcagctctcagagctattagaactgagacaaaggacagggtacatgaaatgaaaggtgaaaagggagagaagcaaaccgaaatactcttctctggcattcagaattacttatgagtatgggtgtctataaccccaaagttttttggtttcgttttttgattgtttgttctgttaagtacttaagtaatgtgtttttagggagagaaacctagcaagaacattgtaaacaaggctaggcaaagatgatctatccttcagttgatgtgtctgtcctcaaggttatttacaaagaagaggattggactggaagttactacttccacaattttagatttgttttcacatctgttacttcaatcctgatgacaagtctgaaatggataaaactactactatgtatccttctttcactaatgaggaaattgagatttggagttgagaagtgaagagctttgctggagtcacacaggtgggaagttgagagccaggacttcaactcaggcaaatctcctaacacccggtagatggttcttcatgctctaccactttaataaaaatgctctagactttgttttttcatcagattagtaagatagcaaattcctacttaacctggatattaggtctatgtcttgttgttgtagagtcttcagtttttacagagacatgctgaaatatttacagttgaaatggtagcagggttaggatgtgtttcaaagtcatccagtggtggaggaaaagatgaaatgtgtagaggcagagataacaataacaacttttgaactggtaattgttgaagataataagagatgggttcatgtggtctgttctactattctgtctgtataacattttccataatttaaaaaaaaaaaaaaaaaa

SEQ ID NO: 2583 - DNA, 774 bp, Macaca Fascicularis
  misc_feature (1)...(774): n = A,T,C or G
aaaatatagtnnnnnnnnncatgtgtnagctttaatnntgctggtgtaggctgttgcccaagcatctatcattttattgagctcttcgagtgattctgataacacaacctggattgagaatttttataagattggcaatggaaaaaatttattcttttaaataattattttctaaaaacccaagaggtcagggggtttttataaacaaatagccaagtgttctttaaataggaggcacccttcccattgtgccaaaatcatcttttcatttcttttgaaatatgtatggttattttatacttgtatgttgcctttctttgaaggcgcctgaagcactttataagcacgaatcctcacagcacctctgtgaggtagataaataatacttttctatgtagtaaacctggagtatggagaatttcctaacagttcattctacttaataatgcaataatggagctccaagatgtcttggacttctacaccacactcagacttctggaaagttttccgtacctcattctttagtccctatcaaggttagtaaataaaataagtgacataaaaaacaaaacaaaactacctgttgtgttgaaagttcctttttgccaatgttatgttcaggaaactcaataacctgaaaaagtttgactttgatgtgacatcttcatattcatcaatgctgataattgtccaaaggcatcttcactatgtctactaaataacatccaatgtgtgtgttatctattgtctaggggatgaattttaagtaca

SEQ ID NO: 2584 - DNA, 762 bp, Macaca Fascicularis
  misc_feature (1)...(762): n = A,T,C or G
gtggtgcagtgtgaaaagtcnnngattgttcgggtgtgcaatgtctgagtgaacctgtataagtggtggcactttagggctgtaaaatgcatgattttgtaacccagattttgctgtatatttgtgatagcactttctacaatgtgaactttattaagtacaaaacttccaggctaaacatccaatattttctttaatgcttttgtacttttttaaactgttaaagcccctatagtcaccttttgggaatatgttttaatttctccggttttttgttatatagggatcaatcggctaagaaaagattttaaatcaagttgaattgaggggattaatatgaaaaattatgacctcttcctttaggagagttatctaaaagaaatgtctattaaggtgatatattttaaaatatttttgggtgttcctggcagtttaaaaaattggttggagaatttaggtttttattagtaccatagtaccatttatacaaattagaaaatgttatttaacagctgttgaattatctatacatacctttattaatcactattgttccagcagttttcaagtcaaattaatcatcttattagggagaaaattcaattgtaaattgaatcagtataaacaaagttactaggtaacttcatattgctctgagagaaatatggaacttacactgttcaattagaatagtgttctgcaaaaatatttataaaacctctcaagatacttactgctactgtaattttatatgaagataag

SEQ ID NO: 2585 - DNA, 711 bp, Macaca Fascicularis
  misc_feature (1)...(711): n = A,T,C or G
caccagtgtataaaattagaagatgtgtttgccctatttactgaatatttgaacactgcagcattactagccaccagtgttaaaggacagatgaggggaaacnnnnnnnnnnnnnnnnnnnnnnnnnnnnnnnnnnnnnnnnnnnnnnnnnnnnnnnnnnnnnnnnttattgacttgatgctcacaaatatcatttgaagaaagacgaattggggttagatgataaattctagggaatctgggtgatttggaggatttcatttggttttgcattacagctagttgctctcagtaaaagtaaatttctggtgaaataactcagggttaacnnnnnnnnnnnnnnnnnnnnnnnnnnctttacacatgtgtcctctccttaaattcattactttcaaatgatgttcaaagcattgactgttttcattcaaagaggaccaagactacagtgaaattaaaactatttgctggccgggcatgnnnnnnnnnnnnnnnnnnnnnnnnnnnnnnnnnnnnnnnnnnnnnnnnnnnnnnnnnnnnnnnnnnnnnnnnnnnnnnnnnnnnnnnnnnnnnnnnnnnnnnnnnnnnnnnnnnnnnnnnnnnnnttnnnnnnnnnnnnnnnnnnnnnnnnnnnnnnnnnnnnnnnnnnnnnnnnnnnnnnnnnnnnnnnnnnnnnnnnnnnnnnnnnnnnnnnnnnnnatgattgtgccattg

SEQ ID NO: 2586 - DNA, 2591 bp, Macaca Fascicularis
  misc_feature (1)...(2591): n = A,T,C or G
tctaataactgcccagaacttggtatgatgaatcctctttcctactttgcagtagctctcttaaaatttgctgagagtctatcatttttcagttgtgtgcatttacttacaaatacaaatttggatttctaaggttcactctgcttcatagctagtaatctctcttctgtgcctgggctggtgccccatttagcaatctaggcttaggagaaaggagaaaaatataggttgatttggtgctcacatatcatgctctcttttaattatggtgctagtggacaagagaaatggagaaggaatagatgagagtctcctcacttgacacagctgagcttcactcctggttagctgtgactgctattcagcctcactatctacagactcagcacagttagatggtaggtactacatgcattgctgatgagacacacatctgtgaacagatacctacttgtggtgatccctttggccacatccttcagttggtagaaccatatttactttctcttaaccctcaaactagagttgtattagaaatacagaggcccccaaatttaccttctcagaactttaaatccaagcaacatttgatgtttatcttatccaaaatgaggaactcaagagaagggagaaggagaactgatacttcttgttctacccctctccatgagattttctgtcctgatttctggttttctcattctggtagtatagtgcagatcggctagttcactggctaagatatacaccgcgaagaggaatagaatgtaaaccttctcttttctttccttgttgcaaacttcctcaatcttttcaggttatcctcttcatctcagggtagaaaaatatgttctttcatcctccctaaggggatgaataaggcaaaactgcatttaataaagactacagtttccaaaaatgctcctacctttcccaccactctgtcacttatgttgaacaggaaagcgggggcgtggttggtgtgagaaagggttctttgacaattctcagaaagcccagcaggaatggagagtatctcataggtcctacaggaccctggacttcaaggggaatttagttcctttattctcaacactgggcctgtaatatgagtgcacgacaactggaaaaatcccaattgactgcctgttagatgtgtgtatgtgttgcatgagatctgttcatcagttgagtgaagattcgtgaccaattttttgtttatcaaaaccgtatcaagtggaacttgggcaaatgaatggtttctattttttttctcagctgttctggtgctgtgtacactgtcagaattaggtcaagggaaggtagtcattctcatatgctaacacttgctctgtctgagaatatttaatgcaaccacatagagaaaacagacatgtttaaaagataatgcatgtctgtgacatgtgctcttccttgacacatttgtgtcacaggtgccaattcctgcagtttactggtgttccacacctcagttctgcagctacaaaaggtgatgagtggaggctgtgcttgccttagctgggggcagcgctcgccaatcaaagatcaagcatacagactggcaggaagtttaacaattccctttcccatccatggaaattcaagctcttttgtcatcatattgtttttatttctatatgatatagcttgctgagcctctcatgagatttcaaatatgaaactgatcaattaggtaaaaagcaacttaatttttaaaaaactcaacctcatcaccctgcatcacttcaatgtggtgcttttgaatacaaaagtctcagaaatagcctcttccacccaattaattatgaaccaaagagatcatcagagagcaaggttgccccaaggtctgtgctcctttttggcctctgtccatccatcttctggatcagtggtcttcaagcattttgactcaagcacaacctcttaaagagttttgaaataccatgtactgtctcatatatttaaacagaaaaattttgagataatcatctattcacatgcatttcacatgtcataaataatacagagacctatatgctctttccctagtttcccacagtggtaacatcttgtaaaactgtagtacaatatcccaaccaagatgttgtcactaataccgtgagatacagactatgtctatcactacaagtatcactcatgttgctcttcagtagcaacacccacttccctgccagcctcaccctctccttatcccttgacaaccactagtctgttctccattgctatagttttgttgttttaacaatgtcatacaggccnnnnnnnnnnnnnnnnnnnnnnnnnnnnnnnnnnnnnnnnnnnnnnnnnnnnnnnnnnnnnnnnnnnnnnnnnnnnnnnnnnnnnnnnnnnnnnnnnnnnnnnnnnnnnnnnnnnnnnnnnnnnnnnnnnnnnnnnnnnnnnnnnnnnnnnnnnnnnnnnnnnnnnnnnnnnnnnnnnnnnnnnnnnnnnnnnnnnnnnnnnnnnnnnnnnnnnnnnnnnnnnnnnnnnnnnnnnnnnnnnnnnnnnnnnnnnnnnnnnnnnnnnnnnnnnnnnncaaaaaaaaaaaaaaa

SEQ ID NO: 2587 - DNA, 774 bp, Macaca Fascicularis
  misc_feature (1)...(774): n = A,T,C or G
gctcatgtgcaggcgttnnnnncgggaacacaggcagggcgctgagagtgaacctttttctgtccaaactgggcttggagaggtgggctcagannnnnnnnatgacagtggatctagaaatgcagacagagattccttgcgaagggaagaggggaaaacgcattgaggaaaataggaactctgtagcaatgaaactgtgatggtgaagagcnnnnnnnnnnnnnnnnngagggcggattttctgagcaggggcaggtatgttccagatctagattccttgatctctttcttcacaatnnnnnnnnnnnnnnnnnnnnnnnngtcccttgagnnnnnnnnnnnnnnnnnnnnnnnnnnnnnnnnnnnnnnnnnnnnnnnnnnnnnnnnnnnnnnnntgtagaacaggggaggagattcttgcccagtcagtggaatcctgtgtcaattttaaatactcagaagtggccaggcgcagtggctcatgcctgtaatcccatcatttttgggaggttgaggtgagcagatcacttgaggccaggaattccagaccagtctggccaacatggtgaaactcccatccctactaaaaatacaaaaattagcagggtnnnnnnnnncatgnnnnnnnnnnnnnnnnnnnnnnnnnnnnnggcnnnnnnnnnnnnnnnnnnnnnnnnnnnnnnnnnnnnnnnnnnnnnnnnnnnnnnnnnnnnctccagcnnnnnnnnnnnnnnnnnnnnntatctcaaaaaaaaaaaaaaaaaaaaaaaaagg

SEQ ID NO: 2588 - DNA, 708 bp, Macaca Fascicularis
  misc_feature (1)...(708): n = A,T,C or G
aggactattccagnnnnagcnnngaaagtccnnnnnnnnnnnnnnnnnnnnnnnnnnnnnnnnnnnnnnnnnnnnnnnnnnnnnnnnnnnnnnntcatgaaaataaggggcaggtgagcccccccaccccacaattccacgatggagggttgagctagaggaaggggccagcagacagggccttaggtgaggggagggccacgtgcccacggaccaaccacactggggtcacagcnnnnnnnnnnnnnnnnnnnnntgatctttggaagaggtctccttccctcaacagattggcaagattctggaggggcatgagtgaaaggagaggtggtggtgggctgtgtcctcccttcctgttgggtggccctnnnnnnnnnnnnnnngggagctgcagaagacccagcgtctgggggatcctgaagaaacggggcctgcggagtaaggctggcttccagggaccaggacctggacagtggctccaggaggaccccagtgcccatccgctcctgctgcctgccccatgcccctctcnnnnnnnnnnnnnnnnnnnnnnnnnnnngcacagggcagcagactctgtgggtgccagggcccctgttcacacctcttgtgccctcacaggcaccttctcccccatccacccaccttctgctctctatctcnnnnnnnnnnnnnnnnnnnnnnnnnnngttcccaggtctccagagt

SEQ ID NO: 2589 - DNA, 618 bp, Macaca Fascicularis
  misc_feature (1)...(618): n = A,T,C or G
gagcgcctctacaacccattnctgcgggtggcgtgagtatggctgtcgtcccggggcctccaccgtcacgtggacctttaggaaggcatctggggaccgcgtgttggnctgagtgagcatctttggcttgggggaggctgcttattaagtgccttcccgcccgcccccgccacttggcaccatcctcctgtgtgggcagtgggccctgcgtctcactgcactccnnnnnnnnnnnnnnnnnnggtgcgnnnnnnnnnnnnnnnggcggtccccgctgacgtcctggaggcgctctacaaggagcgggcgcgcnnnnnnnnnnnnnnnnagccgcggcagccacaggcgcgggccctccttgcgctgcagtgggggctcctgagtgcagccccacaggagtgacccatccagaccctcacagggctggggcctgcgtccctcctcgtgacctcagccagctggacccgcgcgagggccacctctggaacattctttgaggccctggccagccgtttgcgcagcctcggagtgtgcgcctcggcaggcttgtgcttcctgggtggacacacaggaccactgtgcggggctgtngggcnnnnnnnnnnnagtttctgggaa

SEQ ID NO: 2590 - DNA, 759 bp, Macaca Fascicularis
  misc_feature (1)...(759): n = A,T,C or G
gtgccttagtgcagcaagcaagtcctgagcnnnnnnagccaccgagagtgactgagggtcagtgggggcagatgccacatggcaaagggcagagaagtccgggaggtgtgaggagcggccgacctggcctccgcacatccgggcactgggcgcaagatgaagcctcaggggacagatgtgactgggcgccacagcagggagggggaggggaagagagaacacatcacacaaactgcacaaaacaagcagcccatgaaaaacaaccgagaaaaagaggtgaaaaatgaacagcaaaccaaccggaccctgcttcctccagcaggaggctcccaccnnnnnnnnnnnnnnnnntgctttctgcacctgccgcttatgggatgcggtgggcctgcagggaatgcggggcttttggttgctgttagcgacttttcttctcactttgtgtagccccccagaaccgtgaggggcatctgagtgggtgagcacaggcgtcccctgaagcgccgcccggaccagggcgttcagcgctgcggggaggccttcgcccnnnnnnnnnnnnnnnnnnnnnnnnnnttcactgtgtcccacagggctccaggctcagagtgacgggagctattctaagtgtttaattgaaggcctagcacttgaccagcccctggagaagctgacaaccacctaagacacatttggacttggtgtccaccaagaatgacttnnnnnnnnnnnnnnnnnnngcactagaataactaaacgcaa

SEQ ID NO: 2591 - DNA, 746 bp, Macaca Fascicularis
  misc_feature (1)...(746): n = A,T,C or G
cgtaatagcatccagctgctatnnnnnngagcnnnnnnnnnnntaataatatggcaggaggagccttccgttcacggtgtgcgggtgtctgcgggttgcctcctgcggtggagtggtgtggaaacaagcacatggcctctgtgaatagccacagaaacacctgaacgtcctttgcttagcatccttctttgcacttgtgagagattctttggggnnnnnnnnnnnnnnnctgatccatggatttagcttccctgccaacgatggtgtgcgatttttgacctagagacacggggagcttgtgccttcgtgaaagttggggcagtgtgtgttttatccattagcagaggcagcataatggatgagctcaggtttgagttccagatccatacgtaagctctgtgtgcctcagtttctccatctgtaaaatggtacctacctcattggaagagtgccttgcttgtagtaagcactatgtaagcattaacnnnnnnnnnnnnnnnnnnngccaggcgcagtnnnnnnnnnnnnnnnnnnnnnnnnnnnnnnnnnnnnnnnnnnnnngatcacaaggtcagnnnnnnnnnnnnnnnnnnnnnnnnnnnnnnnnnnnnnnnnnnnnnnnnnnnnnnnnnnnnnnnnnnnnnnnnnnnnnnnnnnnnnnnnnnnnnnnnnnnnnnnnnnnnnnnnnnnnnnnnnnnnnnnnnnnnnnnnnnnnnnnnnnnnnnnnnnnnnnngatctcaccact

SEQ ID NO: 2592 - DNA, 729 bp, Macaca Fascicularis
  misc_feature (1)...(729): n = A,T,C or G
atgaagtccttgctgctnnnctgtctccccaaaggtaaggggaaggggcaggttggggatctgggaaagcaagttctctgttctctcccgctggtgatggaataggccttttagaactagcaagatccnnnnnnnnnnnnnnnnnnnacatacctttcttactcgctccagacccattggtgtgtctccagtaacaaaagtattagactcagcctgcatatttgacagcaaaagtggccaaagggaattgaaatatcttgaagaaaaggaattttcaccaagatatgtcctctccctctcccagagtttagctgtttattcctttttgtctgtttctattgttctcatctgcataaaaccagtctcttccaataagcctgccacagaatcaaagtctgtactacaaacggtaactgcatcaagggatgggactgtgtgcatcgccctgatctaatcattgtgacgttggtagcttcctaaatactgtatgtaccttgaacaagggttttatttttgtttggttctgttttgctttttgtttttattggtagtctaaggtaattaaattttttaatttgctattactttggttgtattttctgtactataactgcctacagtatgtcttttgcataaaatgcataagggtttggggatgtaaatggaattttattcatannttgtccaaatacctcctgtaattnnntccaaanncnnnccaataaaaaa

SEQ ID NO: 2593 - DNA, 2562 bp, Macaca Fascicularis
atcagctccacgcatctcagcaacggacactttcgcaacatcaagggagttttccggggccctctcagcaagaacgggaacaaaactctggactatgctgagaaggaaaataccatagcaaaagctttggaggatctgaaggcaaatttttactgtgaactctgtgacaagcagtactataagcaccaggagtttgacaatcacattaactcatatgaccatgctcacaagcagaggctcaaggaactgaaacaaagggaatttgctcgaaatgtagcatctaaatccaggaaagatgaaagaaaacaggaaaaggcactccaacgcctgcacaagctggctgagctaagaaaggaaactgtatgtgctcctggaagtggccccatgttcaaatcaacaactgttactgtgagagaaaactgtaaaaatgaaatttctcaacgagttgttgtggattcagttaataaccagcatgatttcaaatatactttgattcatagtgaagagaatagtaaagatgctaccactgttgctgaggatccagaaagtgcaaataattatacagcaaaaaataaccaagttggggatcaagcccaggggattcacagacacaaaatcggcttttcttttgcatttccaaagaaagcgtccatgaagctagagtcctccgctgcagcgttctctgaatacagtgatgatgcctcagtgggaaaaggatttagcagaaaaagtagatttgtccccagtgcttgtcatcttcaactatcgtcaccaacagatgtacttttgagttctgaagagaaaactaactcttttcacccaccagaggcaatgtgcacagacaaagaaactgttcaaactcaagagataaaagaagtctctagtgaaaaagatacattattattaccttcattttgcaaacttcaacttcagttatcttctgatgcagataattgtcaaaattcagtcccattagcagatcaaataccactggatggtgttgttattaatgaagacatacctgtgagtggtaacagttctgagttgttaggaaataaatccacagttcttgacatgtctaatgattgcatatctgtgcaagctaccacagaggaaaatgttaagcataacgaggcatccgcaactgaggctgaaaataaaaatgatcccaagacagtggccccttcaaatactgaagaggttggtataactataaataagaaaacaaatttctgcaaaagacaatgtgagccatttgtacctgtccttaacaaacacagatctacagttcttcagtggccatcagaaatgctggtttatacaactactaaaccatcaatttcctatagctgtaatcctctatgttttgacttcaagtctactaaagtaaataataatctagataaaaataagccagctttaaatgatctttgttctcagcagaagcaagaagatatttgcatgggaccagtttcagattgcaaggatgtatctacagaaggactcactgattatgaaattggaagtagcaaaaataaacacacccaagtcactcctctttcggctgatgatattctctccagtagttgtaattttggaaaaaatgagaatatgggtcagaggtataaaaatatttcctgtaagatcagagaaacagaaaagtatagttttactaaaagtcaaataaaacagggcactctagatgaaaaatacaacaaaataaggttgaaagagactcatgaatactggttccataaaagtagaagaaagaaaaaaagaaaaaagttatgccagcatcatcatatggagaaaaccaaagaatcagaaactcgctgcaaaatggaagcagagagtagttacactgagaatgctgggaaatatctactggaaccaatttcagaaaagcagtatttagctgcagagcaattattagactcacatcagctacttgataaaaggcccaaatcagaatccatatccttaagtgacaatgaagaaatgtgtaaaacatggaataccgaatacaacacttatgatactatcggttctaaaaaccagtgtaaaaagaacacaatacttttcaatggacaatcaaatccaagaatgatacattctgggaaacataatttaacatattctagaaattactgttgttggaaaaccaaaatgtcaagttgtaatcaggatcacagaagcttagttcttcaacatgatatgaaatgcgtgagtcagaatcaggctgttaaaagaggttacaattctgtcatgaatgaatcagaaagattctatcgaaaacgtagacaacattcacattcttattcttcagatgaaagtttgaatcgacagaatcatttaccagaagaatttttgaggccaccaagtacttcagttgctccctgtaaacctaaaaagaaacggaggcgaaaaagaggcagattccatcccggatttgaaactttagaactcaaagaaaatacagattatcccatgaaagacaattcttccttaagtcctctggataggttaataagtgaagacaaaaaaaaaaaaaaaaaggccaca

SEQ ID NO: 2594 - DNA, 2439 bp, Macaca Fascicularis
cagggctccaagacagcgagccatgttccttcttctggtgcttctcaccggacttggtgggatgcatgcagacctcaatcctcataaaaccttcctgcagaccacaattccagagaagatttcatcatcggatgctaaaacagatccagaacataatgttgtttacatgattacaatagaaggaaagccatatttcgtccatctcaaaaagcaatcaattttatcttcagcttcttttattcattcttatgacaaaaatgacatccgtcattccaaacctctgctagttcagatggattgcaattataatggatatgttgcgggtattccaaattctcttgtgaccctcagcgtgtgttcaggactcaggggaacaatgcagctgaaaaacatctcatatggaattgaaccaatggaggctgtatcaggatttatacacaagatttatgaagaaaaatttgctgacactaatattctcttagaagaaaatgacacttattcttggtttaattcagagtatcaagtcagaaaaagttcagaaaaaactgactttattaagttattccctcgatatattgaaatgcatattgttgtggacaaaaatctgtttgattacatgggctctgatataaacgctgtaacgcagaaggttattcagataattggccttgttaacactatgcttacccagttacaactgactgtcattatatcttccattgaaatctggtcaaataaaaacaaaatttctactacagggcatgctgaatatgtattgttagaattttttgaatggaaaaaggaccatcttaactttaaaccacatcaaattgcatacttatttgtctacaggaaacttcccaccttaataggagccacatttcctgggcaagtatgtaataaggattttgctgctgcagttgctctgtacccagagggtttatccttggagtcatatactgtcattattgttcaattgcttggccttaatctgggattaacttatgacaaaactgatacctgccattgttcaggagatgtttgcacaatgacaccaaaagcagtgtactctggtggtgtaaaggattttagcgtctgtagcttggatgactttaaatatatttcttctcataatggccttacatgtcttcagacaaaccctcttgaaatgccaacctacacgcaaaggagaatatgtggcaatggattgttggaaggaggtgaagaatgtgattgtggcaataaagacaattgtacacataagttatgttgtgatgctttaacatgtagactgaaagataatgcgcaatgtggttccggagattgctgttcaaaagattgcaagttcaaaccagctaatacgatttgcaggaaatcagttgatgtggaatgcgatttcactgaattttgcaatggaagctatccatactgtttgcttgacacttatgtacgtgatggagaatattgtgattcaggtggagccttctgttttcagggaaggtgtcgaacttttgacaaacaatgtgatgatttaatcggaagaggttcaagaggtgctccaattttctgttatgatgaaattaataccagaggagacaagtttggaaactgtggcactgaatattgtttgtttcaacatattctatgtggaaaattagtctgtacatgggaacacaaagacttaatatcacgtccaaatttatctgtgatttatgcacatgtacgagaccaaacatgtgtgtctacgtatctacccagtaggaagccacctccagtagcttcaactgtttcaaaaacatcatattattcagttgatgacagagatgaaacatttgtacaagatggttccgtgtgtggtcctgatatgtattgtttcaaaatgcgttgtaagcatgttagattcctgatggattttgaaacgtgcgaggcttctattgagtgcagtggtcatggaatttgcaacaattttaaccattgccattgtgaaaaggggtataatcctcctcactgcaaaccaaagaaagaagcatttggaagtactgatgatggacacttagtaccagctgagaaaagttacatggaggagggaagacatgccccttttcaaaaacaacggtttcaactcattttctacatttcgctacctgtgcttattattactactgccattttaataaaacggaaaaaattgagagagctatgttatagaggggaaactgaaagtgagagctctgtgtcacaagaaagcagcagtaacagcaagtcatccctcagtgaaagcaccagtctctaacaaccttgaatgctaatacttggagagaggagagtaacaaatacatcatcagaaacgggcccgaaccaaggaggaacaaaacacaatttctctctcactgtggagggttttaaactgtgaaataaatcatccggcctgaatctcaa

SEQ ID NO: 2595 - DNA, 679 bp, Macaca Fascicularis
ggatgaaagaattgggcttttttttttttacatctgttttcactctttggccgttaaacaaaactgatagttattgctcttatccctctcaaattcttctaagaactgagagtgatggggttgtattgaatttctgtatgcaccgggaactgagctatgaagaggatcttattaaactgctggtctgactcatggattgacactgttcctttcttttattgtgaaaaaaaaaaaacccctaaaagtcttggggaccccctaaagtcttttgggaatcctcaaaaagcatgggaaatacaagtatttagctacataaatgttgtaagatcatatcttatgtatagaagtaataagaccgtttggaattactagactaattgaatagttacggtttctattcagtacaataaaatgtattttgaaagtgctgctaactattgatgctgacagtgtttcactcctatgagtgacccaaacatattataaataggtggtaaagggagtggagcctgtggggttgagcagaatgttgtactaactgtgcttggactaagtataacagctttatgattatgggaaaacaaaatctttatttttttttttctgttccaaagattcatcctgtggggtggccataaagtctagaattagatactaatattttgtcattcgttataac

SEQ ID NO: 2596 - DNA, 722 bp, Macaca Fascicularis
  misc_feature (1)...(722): n = A,T,C or G
cttgtggcaccatccagnnncagggtcttggagacttgagtaagaatgtgagtggagggggagaggcgaggagaggagaggtcacagggtggatctgtggagggaagaggttgcagggggaggagctgatgatagatcccacccagacctaagctgctggtgggtgggcgagctgggaagtaggactgtccagggaagggtggagagatgnnnnnnnnnnntggggatggggagnnnnnnnnnnnnnnnnnnnncctccacaccaacgttgatgaaggaagggatnnnnnnnnnnnnnnnnntctggggctnnnnnnnnnnnnnnnnnnnnnnnnnnnnnnnnnctgcctgggggaaagggcagccaggcagaggcccagtgtctggtaggnnnnnnnnnnnnnnngaaggggtgattggatggaaagaggccagaaaccccagcctgagagactgctgtgcgccccacagtctgactgcacagagccgcctctgttggcaggaggcactgaggctccnnnnnnnnnnnnnnnnnnnnncgtgtttgccaatatattttgctttcaattccaagaggagctctgnnnnnnnnnnnnnnnnnnnnnnnnnnnnnnnnnnnnnnnnntgtttccttttccttttctctctctgattgttttaattgttctgtggtggttttaatggatttgagaccctggagcggcagctgccttctgattcca

SEQ ID NO: 2597 - DNA, 702 bp, Macaca Fascicularis
  misc_feature (1)...(702): n = A,T,C or G
atttatgagtataaatgcatttgctgtttcannnnaaaaatgttgtggaggaaaatagtatatttaacttgtataagagaatatttgtgctcctgtccaggctgcaggacctttctccaagagctttgcacacttgaaccacattttctgatccctttactttgttttagaagcacactgaaaaatctcgttgtttaaagtacaatttgtaaatatttcaaaggtctaggcgtcataactttttgttttcatactgaaaatgatgttgatcagagaaaccaactgttttgcttttcattgctctgtgagaaatctgaggattctgttttgttgttaggttagctaaatcagaaattgaaaaggaaaagactggataaacacaggattttcagtaagaaaacaaccccagtcttgtcttagaagccacttgttgaggagtctgtggggggaaaaaagaggatgtgcttttaaaggtagaacaaaccttcttctgtgttaaatcaaaaggatgttcaaaatccaccagggcagatgctacttaagtttaaatggagccatagatgatacaaagtcctcttggggctgaaaatcacttcctatctgcatggctttactaactggtttctgttttccattatctttttcacagaaagtcttggtcagtatttttccagcatttaaattgaaacggtcagtatcaga

SEQ ID NO: 2598 - DNA, 674 bp, Macaca Fascicularis
  misc_feature (1)...(674): n = A,T,C or G
gtaatcccagcacttggggaagatcacttgagctcaggagttcaagaccagcctnnnnnnnnnnnnnnnnnnnngtnnctggaaaacagttagctcggcatggtggtgtatannnnnnnnnnnnnnnnnnnnnnnnnnnnnnnnnnnnnnnnnnnnnnnnnnnnnnnnnnnnnnnnnnnnnnnnnnnnnnnnnnnnnnnnnnnnnnnnnnnnnnnnnnnnnnnnnnnnnnnnnnnnnccaaaaaaaaaaaaaaacctgagtttttttggatcttattcaatgggagaagagtctggagggaataccacttgacttcactaccaaaggtttaaagatttagcaatttaagaggttttccttttaccaagaaatgcggaagcccagagcaaaccccacataccagatcactgtttcctactgaagcagctagcccgagaaaggactctctcataatgggcttgggaaatgacttggcagcctgaaccatcccagcagaggacaaggatggttaattcttattctctagacgtccacaggaacagactaggatggaaaacgcagttaagcacagccatgcaccctgtttctgtagaaatgcccctgtgtgaaagaaaaataaattcaaggttggagttttggaggaaaaaaaatacaagtagcatttacaacagctc

SEQ ID NO: 2599 - DNA, 674 bp, Macaca Fascicularis
  misc_feature (1)...(674): n = A,T,C or G
attnnantaattgaacttgaatcgagcatttgtatctatcataagagtgaaagnnnnnnnnnnnnnnnnnataagtggtttgactgcaatgtagaaactacagtatgaagtgttttatgtctgcattgtcttaataataaaaacaagaggtctttatagaaatatctatttttatgacattgatttcatggtaaacttgctccgttatttgtgtggcacttctcttccttaaatacacgtccccatctaaatccaaatttcacatttttaaatggggctgagagagaaataactcacacattgaaatgtgctttgctgagatgggcattttgtgggattatttctaggaataatgaccctagaaggcccagtgagatctgttgtattctgaagagagaagtaacttacatatttactaccacaacttctactaaactaaactctgttgttagactttgttcttgctttgtatgaaatgtttttaggtttctattactaaaaatcacttttcagagcttagttttatttatacccccatgtcttgtgttttacttctatactcatttttaccttttattcattctttatttacatccattgctaagattctgtttgcactaaaaactactgagttgcagaagtgcagctacacatgtatatatgtatgtattagg

SEQ ID NO: 2600 - DNA, 749 bp, Macaca Fascicularis
  misc_feature (1)...(749): n = A,T,C or G
cagggcatgccttggggaggtggatcaaagataggactttnnncagtagccagtcctacctcccagttgtctttttaccagttaagggtgggagagaaaacggcagcaccccagcatgtgagttactcaggtgttgggggccagaagggacagtgtgtttaaacaaccttcagagctctggccttaaacctgtggccccccccaccaagtctaggagcctcatctnnnnnnnnnnnnnnnnnnggcagggggtcctgaaagggaaaacccattcagacaactgttccccaatctaccagccatctgcaggggccgtgacgcggcctcnnnnnnnnnnnnnntgnnnnnnnnnnnnnnnnnnnnnnnncggggaagaggagactcagctgtccttcagtagcttgtgccagtatcccagggcagaagtttccacaggagcctcttgcccttgctcagagccactttgtgaggcggtgggagccaacacccttgggggaggggcagtgctgctcagcacaccccagcatcaggtcagatcattgaaattaaaaaatgtgaatgaagttcatatctaccttttggggaaacaggacaaaccaccaccccaccaagtgtgtgacttctccatatcccattgcagtttccattttttaaataggaattttcaatcccccgtgcttgtctaacgtccgctttaaacagttcgagaccctgttactgtttgaaaatgcatgcatgttacaatgaat

SEQ ID NO: 2601 - DNA, 752 bp, Macaca Fascicularis
  misc_feature (1)...(752): n = A,T,C or G
tactctttctttctgtgtacatatcaacaactgttaatctcccttctaacaaaccttgatgtaagcntnntgatatcaaagtatattgacagttaacccttactgattttaaacttgactatccagtctgttaattacctaagattttgttttcatttcatctctaattgttttgatcattggcagagaaagagtatttgaaattcatatcagttttgctccttattttaatctctttgaattaaannnnnnnnnnnnnnnnnnnnnnaatttgaaattataagtagacttcaattatctttgctaatcctctctttaattagctagttaaaagttgttatatttatatatcctcaactctctttttgcctttnnnnnnnnnnnnnnnnngaaagaagaaaatgagtttttgttagtttttggttctgaggatnnnnnnnnnnnnnnnnatgatactaaagccaaatttaaattttaaaattaattcttgggtatccaataaacaaagaactatttttctatttttgcttttgtgaagtcagtgcttagaggatttttaagatggttaatgagcttttgtgaacataaagagagatatgattttaaaatggccaggtctgagtttagctctgttaacatccagtagcttataaatgaatatcatatagcagtagnnnnnnnnnnnnnnnnttaacaagtaaaattttggaatactatgaacttattgttttgtttataatatattcctaaat

SEQ ID NO: 2602 - DNA, 738 bp, Macaca Fascicularis
  misc_feature (1)...(738): n = A,T,C or G
gctgacttgtttggaaannnactggaggtanctgaaatgtgatgactctaaaggggttcattnnnnnnnnnnnnnnnattgattcatctgacctcctatttatcaccactcaatattgggtgagttggtctgaacaaggtgggggtaaagtggagtggaaataannnnnnnnnnnnnnnnnnnnnnnnnnnnnnnnnnnnnnnnnnnnnnnnnnnnatcttggacaagacttttcccatctccagtctcaatttcattcataaattggggaaagtggtaggtcttgccggttccatccacattcattgccccatttcctttcccagcaaccccccatttctgtttggggattcatatgatctgccagagcctctccaggggtggaatacatgtcctggactaagccaatgacaccttccatctttccagctatggtgactgggttggtatgatcttgtgagttaaggcgatgaagccagagggaatttcaagacttttgggaatgctgggtagaagctgttttaattcccctgttgaatgtgaaaaaggtagtagtattcctgggtctttatgttgaccaccttgggccttgggatcatgaccaggagccacatgaagctgacaccacagaagggagagtcgagaggcagaaagaaacaagtccttggtgaaattgtttaagtacaggatcaagccttgcttgaggttggccttacctctggactttttttgttatat

SEQ ID NO: 2603 - DNA, 748 bp, Macaca Fascicularis
  misc_feature (1)...(748): n = A,T,C or G
cacggaagcccatgaccactaagnacctgctgaaaaagttccagaccaagnnnnnnnnnnnnagcagnnnnnnnnnnnnnnnngtgctggcccagatcctcaagcgcctcaaccccgagcgcaagatggtcaacgacaaaatgcacttctccctcaaggagtgaggcgccgtccggcacacagccctgcccccgaactcagcctctcactgccccttcactatcctgctccctgactcccagggccccatagttagcaattctggaaaggttaagccatctcctcctctggcccctcctggaatcttcagatgcctgttagaccttgttactgtccttcttctcctggctcagcctccctcacactgaccaagggcccgtgctccccacttccacagttctcccttccactcccctagttctctctatagccgtgacttgtccnnnnnnnnnnnnnnnnnnnnnnnnnnnnnnnnnnnnnnnnnnnnnnngcgcctgcagtccccgctacctgggattcttagcccagttcaaggctgcagtgannnnnnnnnnnnnnnnnnnnnnnnnnnncgggtgacagagcgagatcctggcgcacacacacacgaaaaagtagccagacatagtggcaggcacctgtggtcccagctactctgtaggctgaagcacgagaatcacttgaacctgggaggtggaggttgctgtgagccgagaccacgccactgcactccaacctggataacaga

SEQ ID NO: 2604 - DNA, 127 bp, Macaca Fascicularis
cattcaaacctgtctggtgctgcattaggcccgtgcgctagagttggacaagacgatttcaggttataaaaccagaagtacaattcaaacaaaaaaggagtaagtcatcattataaatattagcaga

SEQ ID NO: 2605 - DNA, 688 bp, Macaca Fascicularis
aacttggctcagctgccgggctgctccggttggaaacgccaagccagctgcgttctaatccaaaagccatgaacagcggcgtgagcctgtgcgtactgatggcggtactggcggctggcgccctgacgcagccggtgcctcccgcagagcccgcgggctccgggctgcagcgggcagaggaggcgccccgtaggcagctgagggcagtgcagagaacggacggggagtcccgagcgcacctgggggcgctgctggcaagatacatccagcaggccaggaaagctccttctggacgaatgtccatcattaagaacctgcagaacctggaccccagccacaggataagtgaccgggactacatgggctggatggattttggccgtcgcagtgccgaggagtatgagtacccctcctagaggacctagcctccatcggcccaacgagaagcaacctcccaacccagaggaggcagaataagaaaacaatcacaccatatctcattgtctgtggagtttgacattgtatgtatctatttattaagttctcaatgtgaaaaatgtgtctgtaaaaattgtccagtgcaaccacacacctcaccagaattgtacaaacggaagacaaaatgttttcctcatctgtgactcctggtctgaaaatgttgttatgcgattaaagtgatttcattctg

SEQ ID NO: 2606 - DNA, 1347 bp, Macaca Fascicularis
  misc_feature (1)...(1347): n = A,T,C or G
tttcctagctctctgttcagttcgtgcagcagcacccagtggggacctgctagaaaaaggacctggatgtgcgcacgcgtccagcaggagaaccttcatcttcaggtcggcgctgccgtccgggaaaggccctggagcctcatgccgtcnnngctgctcccaggtgctgcgtgtcgccagtggcccccgtcgcctgccgagcccagggcgtctgttcggggcgggccttgtgctgtgggggcaccaggagggcccgggtgctgcgggcagagttcgacgtggcgcttgtccaccctcccttagctctggctcagtgcatcctactgtggggacatcccgtgggggacacgaagtgactgacctcaccctttcccagtattcggagctgtgaacccgtgtggcgcaggactggcctgtgtctgttattttggttgtaaatcattctcctgtggaattggcaaaagctacatatttactgtccttaccagcaacagttcgcgtcgtcacatgctgtgagtgtgggctgtggtgtgtccgtgtgtgtacatatgtgtatatgtatatatcacacagcaagcgtgtcatttgtgctgctgtcccgtgtgaagccacaagtacaatttaaggtggctctgaaacggcctttggtttcttgggagtcgggcagggacctgcaagaggctttcctggcaggtgcacannnnnangcgctgnnnnnactgtgtgcngngnatgtgtgcccagggcactgccacggcccccactggtgttggcctctgctctgcagggttgagtgcccatcctgggggctccgtgtcacgcccacctgacccaggtgtgtgtcccggtgtgaaatctaggaggtgactggaaacccttccctcccttgaaacattaaagccgattttctaagcaacacatacaatcagtggcaaagctgcatatgaagggcagcgtggggaggggccccgtcctggcctcaggtccgccccagaggaggatacacagcagcacctccagaaggggctgggccgggtcctgcaggcggcaccttttggtagatattgtttctctggaaaatggggaaaatgtttcaaaccaggtgaggggggggaagttaacactgaaatatgtcttgtttttaaaaatcaaacgcaaacgcatggaagctgcttgtccatgcactggttttttcactggcgtcctggagtccgaccgtgttggggtgcaggcgctgtcagactccggctgatcctggctcgagcacacacatctgagggccaggctggttccgcatggtgatctccgtcttgtatgtctgaatgttgacctaaaataaagattact

SEQ ID NO: 2607 - DNA, 760 bp, Macaca Fascicularis
  misc_feature (1)...(760): n = A,T,C or G
gtaggatgaactgacagatacacagcaagctnnnacatacttttnnnntnctttgggcctgcaaagttcttcatcagtgtcctctcgcnnnnnagctactactattggnnnnnnnnnnaaaatagaacaatagtaaaaattggagacaagtctttggtgatgaagagaaatattggctacttccagtattttctagctttggttatggttgcagttttccagctcaccttgtggggatgaattcagaaaaaaacttctgttacaaatcgaaatgaacattccagaagtattggctcaaatcaaccttgccctattaagccacttagtgaatcaaaagactgcttgtgggactgttaatctcggtggccagagaaaggagctgaagaaggtgttgtcagatcaggaacaaataattacagtggcaatagaaaatggaaggccacttgttcataaccatttgaataagggcaaagtatatggaaacacattatgaactgatattttcagttttgtttgcaagaaaataagccaggcgcgnnnnnnnnnnnnnnnnnnnnnnnnnnnnnnnnnnnnnnnnnnnnnnnnnnnnnnnnnnnnnnnnnnnnnnnnnnnnnnnnnnnnnnnnnnnnnnnnnnnnnnnnnnnnnnnnnnnnnnnnnnnnnnnnncacggtggcaggtgcctgtaatcccagctactcannnnnnnnnnnnnnnnnnnnnnnnnnnnnnnnnnnnnnnnnnnnnnnnnnnnnnnnnnna

SEQ ID NO: 2608 - DNA, 767 bp, Macaca Fascicularis
acgtattataagaggatcttaataacagatgtgaaagagggggtcaagactggcaattggctggattaagctaaacactggtatcattgattaactgtaaataacaattaaaacacatttttagtgtttgatatgtttaaattatttgtcctaaagctttatgttaaagattagcctattttaaccctttgtgtgaaatttactagcaaaattaagctttaatcaaagttcatcacttttgcattcagatatttggtcatttacttaccagattacaacgcaatactatagcatttgtatattgagtatcagagttactcttaataaacttctacttttgggttttatttcattgaggcacattttattattgtttgaaggattccagcttgtcatatatcagcctctacactgaaatgcagaagagttcatttttctaagatctggttttcattagaaatattgacaaataacaaattgtcagtttggatcctttgacaattgacttaactctggcatgttcacaaaaagtagaaactctcagagaccattaccatttattcacagatgtataggggatgtattctaaaaactgatagaatctgatagtcaacactgttaacttttactgtataattgccaaatacacttttccaaattcatcccaacagccctgtaagccagctttcgtctatatttataaacacgataaatgcatgagaacatctgttattacgttagtatattgtgttatttattatgatcct

SEQ ID NO: 2609 - DNA, 1868 bp, Macaca Fascicularis
atacttacctggcaggggaggcttccttgcatgttaaacatgggtattcagacctgattctgaggcaatggggagccattgaaagcttttgagcagaggagaaacgtgatgagctttgcattttggaaggatctctctgacagtgagtggaaaggagagtggtgtggaagggcacagatatgtagtgtagtctgagagctcaggaaggaggttaatgcagtcatcctggagagatgataagggctgcactgggccagtggcaagtggggatggaaagaggtgtcaaatgtgagaaagagctaccaggaacctggtaccaggaacctgtttgctgcgggctgggggaaggggaagcatcggatgattcctgtgttctggcctgggcaactgagtgacagtggggtgagcagaagcaggccggagggtccagtgagaggtgagtgggtctggagttcaggagaaagatctgggccagaggcagtgttgagagtcgacagtatctgcagggtgtggaagtcacaggtgggaacagggctgcccaggcacattcatcaggagtgaggggccattggccaggagtagacaaggcctgggcctaaggatcagcagaagaggagccagccatggaggcggagatgccctcacacaggtgggaggacagccaggagatgtgcctcaaaggcagggaaaaaggcgtcaggaaggagatggacggcagccacagtgggctggagaggaaatcatgctggcctttgccagagcggtttcagtagccgggggctgggagctgttgtgcagttgatatgtgactggaaccttgactccaaaccatgaccttccactgctccgtgactacgcaggcacatttatagggaagacgtcaagagaaggggaagcctgaaagccacaggtgagactgggaatggccaagagagggtcccagtcactcaaagtgagccagaagtccaaggagggtcccccgaccccaaattgtacaccagagaagggctgcctctacttcaaggccacagggcggctggcaaggacaccgggcggctgcaggtgagtttgactgggagggaggatgggaagaagtctggcctggtagcttggctttctaggtagggtgggaggcaagggtgggtgctctgctgagagaaagccagagtgagccgagtacttgaagagagtaggggaggtttaaagaatggggggagagctgtggaaggattgctgagcagagctgcaatccctacaggggccagagaccatgaacttgtcatggcagcagtccgcacggctgggcgagtttctccagcagtgctcagcagcgcagatggaggacagaaaggcatggaagagggtgagaacagagacacgcagcagggacggggtggagaggacagggagccaggaccatggggtgctggcaagagcccactctcaggcaggaacaatccttagagggaagtgcccatctagccattgactcatgacctgggtcaaagaagcatctccagcctctctgtcagcattacgggatccccaaaaagctgttgaataagccctaagggtggtaggaatccaggagggacccaggaaactgagatttgagattcagtgcctctgaaaggctaccaaagtctcaattggtttaatatttaaaggctgctatggatttattctgcccacaacttgggggtcctatctggatctcgacttctccagctgtaaagtggacacaatcctcctccagggactgctgtgaaatcaagaaattggaaaatactttttggaagttaaaatgctagaaaaacaaccccaataaatgatgatgattgttaaaaaaaaaaaaaaaaaaaaaaaaa

SEQ ID NO: 2610 - DNA, 574 bp, Macaca Fascicularis
  misc_feature (1)...(574): n = A,T,C or G
agtagaggatcataatacaggagagagtctgggtggtgtagttaatcttacaagatcctagttaaaaggaagtctgttgtgcaatgtgctcttttgcttttttcgtgtttcagagcgtgtgtgtgtctttgtttttgtcgcccaggttgaagtacactggcatgatctcagttcaccgcaacctccacctcctgggttcgggcaattctcccgcctcagcctcctgagtagctgggattacaattgnnnnnnnnnnnnnnnnnnnnnnnnnnnnnnnnnnnnnnnnnnnnnnnnnnnnnnnnnnnnnnnnnnnnnnnnnnnnnnnnnnnnnnnnnnnnnnnnnnnnnnnnnnnnnnnnnnnnnnnnnnnnnnnnnnnnnnnnnnnnnnncatgtccagccttttacttagttctgtctttacttagttctctcacttttcctctgggattagtaaatttctggatgacgtctcaactgaccttggataaatctctatcactgggatctgattctgtctccttatttataatataataaggattgacctacctcgtaaattaattcaattctgtt

SEQ ID NO: 2611 - DNA, 896 bp, Macaca Fascicularis
  misc_feature (1)...(896): n = A,T,C or G
gctggtagcagagaacaagttggcaagaagactggagaaggattttacaaatacaaatgatgtgcagctnnnccggcnctgagaagaaccnntgagaannnnnnnnagccagtgccccgagtgnntgtnnnaaggctctttgttctgacattctctcacacagcacagtctaatcaatgtgcattttgattgtaatctatctgaagtgattnnnnnnnnnnnnnnnnnnnnnnnnnnnnnnncattaagaactaattcccttttttagtctgttcacttctgtgtattttctaaacagctttatacccttggtgccttggagcaaacttttttttttgaaccttgtcacttttatgaagaatagcgtggattcgttctctcatcaagggaaaagtacttcctccgagagtgcgagtgcaccatgcccnnnnnnnnnnnnnnnnngagtgacaagccaccggcacgacgtggtatgtctgtgaagcactgcagcgagcagcaccttgatcttgcctttataagaacattttactncnnncagctttgagtcttgccctacattctgggcacgacataagatgtgtctttattcagttcatcgtgaagatgctgctgctggatgggtcggcatatctctgtgtgcatggtttgcacgaggtcagttttcatggtcagtcagttccacagatctgaatgattactgtctgtctgtgtcttttttccatgagaaatcgctgttgcaaattgcctataaattgactactaaaatacaatgttttcgtctgaaaatttgaattgaaaaagaaatgtataatataaaattgtaatacactcaaacgtttataaaagtaaaaagttgataatttaaaaaaaaaaaaaaaaaaaaaaaaaaaagg

SEQ ID NO: 2612 - DNA, 766 bp, Macaca Fascicularis
  misc_feature (1)...(766): n = A,T,C or G
cttttgtaaggannncagaagagcccagnnncnnnnnnnnnnnnnnnnnggannnnnnnnnnnnnnatgtgcagnnnnnnnnnnnnnnnnnnnnnnnnnnnnnnnnnnnctggtaccgaaacatggaaaggaactggaagtgggcctgcaaaagcttggggcggaagatcctgattnnnnnnnnnnnnnnnnnnnnnnnnnnnnnnnnnnnnnnnnntcctcagatgtccaagcacatggaggactnnnnnnnccacctgaaaaggggacacattgaggactgtnnnnnnnnnnnncagnnnnnnnnnnnnnnnnnnnnnnnnnnnatcctcattaagtggctggagtcnnnnnnncggaacccaccggtggtctcaaagatgtagcacnnnnnnnnnnnnnnnnnnnnnnnnnnnngccgtccttccacctgctggggcatcattcttagtatacnnnnnnnnnnnnnnnnnnnnnnnnnnnnnnnnnnnnnnnnnnnnnnnnnnnnnnnnnnnnnnnnnnagattttcattacctaaagtgaatcaaatttgacattattttagatcccagagaaatcaggtnnnnnnnnnnnnnnnnnnnnnnntgcatcgtccctttatctctaagaacccttagtgtcctgttgggggacagaatggggtggcgaggtggtgatttctctttaactgaccaatccatagttttgcagaaaaatcagccattcactgagaagaatcttagtagagattgggatgcgtactca

SEQ ID NO: 2613 - DNA, 703 bp, Macaca Fascicularis
  misc_feature (1)...(703): n = A,T,C or G
gtatgccaggaggcacagcagagcttgcgggctgcaggactggtcagtgacctggatgcagactctggactgaccctcagccggagaatccgccgggcccagcttgcccactacaattttcagtttgtggttggccagaaagagcaaagtaagagaacagtgaacattcggactcgagataatcgtcgccttggggagtgggacttgcctgaagctgtgcagcgactggtggagctacagaatatgcgggtcccaaatgccgaagaaattttctgagcctttgtacatagatgaggcaaaaacctgcaagagccatcagcctccctcacatgggagaccccagaacctcagaactgcgtggaggcacatgtctgctctcctgaaaagagacttggtttggcgaccccacaaagggagggaagctgtagctgtttggatgtgaggagaacgaaactaaaaaaaaaatacactgggccaggcgcannnnnnnnnnnnnnnnnnnnnnnnnnnnnnnnnnnnnnnnnnnnnnnnnnnnnnnnnnnnnnnnnnnnnnnnnnnnnnnnnnnnnnnnnnnnnnnnnnnnnnnnnnnnnnnnnnnnnnnnnnnnnnnnnnnnnnnnnnnnnnnnnnnnnnnnnnnnnnnnnnnnnnnnnnnnnnnnnnnnnnnnnnnnnnnnnnnnnnnnnnggaggttgcagtgagctg

SEQ ID NO: 2614 - DNA, 2124 bp, Macaca Fascicularis
acgtcaccccgccgtgacgcgcacgctgtaggaaaactaattaattaaaaggatttatggtatatcttatgactctacaggagccttgggatataggtgtgttgaagaaagtacacacatcttatcttctgaacattttgatggaattaaccacaaacctcatgcaagaacagtaaaaggaaagatactattcaagtccagtacatcataatgcagaattctttagcagtaccaccaaaagatgaaggtgaatcaaacatcccttctggaacaatacagagtaggaaaggtttgcagaataagagtcagtttaggaccatcgcaccaaaaattgtgcccaaagtcctaacatccagaatgctgccatgtcattcaccatcacgctctgatcaggacctaaggccgactgtgataaggtatcctccaccacagaaggctttaatgcagccaccaaggtggcaagcaagctgcctgttccacaagtgtcacagcagagtccctgtgaaagtgccttttgtccacccaccaaacttgatctcaaccacaaaacaaaactgaacagtggaaccgcaaagagaagaggaaggaaacggaaggtaccagatgaaattttggcatttcagggaaaaaggaggaaatgtgtcattaataagtgtagagatggtaaagaaagagtaaaaaatgatccccaagaattcagagaccaaaagccggggaccctgaaaaaatatcgtagcattatgcccaaacctatcatggtcatacccactttgacccccctggcttctccagctacactacaatcccagatgcttgggggcctaggacaggatgtttcgttaaataattcactcactcctaaatatcttggctgtaagcaagacaacagctcttcccctaagcccagctccatgttcagaagtggattctctggcattaagaagccttggcacagatgtcatgtctgcaaccaccacttccagttcaaacagcaccttcgagaccacatgaatacacacaccaacagacggccttacagttgtcggatttgtcgcaagtcctacgtacgtcctggcagcctgagcacacacatgaaacttcatcacggtgagaaccgtctgaagaaactcatgtgttgtgagttttgtgcaaaagtgtttggccacgtccgagtctattttagccatctgaaagaagtgcatagggttgtgatcagcactgagcccgccgccagtgaactgcagccaggagacataccaaagaacagagacatgagtgtgcgaggcacggagggatcactggagagagaaaacaagtccaacctggaagaagacttccttctaaaccaggcagatgaagtcaaattacaaatcaaatgtggccgttgtcagattactgctcagtcttttgcggaaataaagtttcatttactttatgttcacggagaggaaattcagggcaggctacaagaagggaccttcccaggaagcaaggggactcaggaagagttggtgcagttccctgactggaaaaggcatcctgagagagggaagccggagaagcttcattcctccgaggaggattcacacgcatgtccgagactgaaaaggcagctccaccttcatcatcagaatggcatggaaatgctcatggaaaatgaaggaccccggtcaggaaccaacaaaccaagggaaacctgccagggccctgagtgtcctggcctccacacagttctcttgtggtcccgttcaggctttaactgcctgctttgtgcagagatgctgggacggaaagaggacctcctccgccactggaagcaccagcataattgtgaggacccttccaaactgtgggctgttttaaatacggtctccaaccagggagtgattgaactttccagtgaagctgagaaatgagaccccaaggcaggccggggttaaggagagagctctgccgccgccttccttcagagcttcgtgctttatggtggtgcttagtcacaaagatcaaacaacaggattggcgtgagtgaacagaaatgatttttgtacatggttttattttcttatgaaataaaatatatgttctcgaaacataaaaaaaaaaaaaaaaaaaaaaaaaaaa

SEQ ID NO: 2615 - DNA, 184 bp, Macaca Fascicularis
cacaaatgattcagtctccctccctcacacggggaaagcacagcagggatgcgcggcaagaaagtacccgtagaggtgtacataccacacagctgtaatattgtatgtagcactcacgtaaatacacgtatggattttataatatacacatataaaaattataaaggcatatttttagaaaaac

SEQ ID NO: 2616 - DNA, 988 bp, Macaca Fascicularis
  misc_feature (1)...(988): n = A,T,C or G
tttttttcnangatggtgtatttcaaagtanttcatannaatgtactatannnacttgaagttcccaatagtacattatgacagaaaccaaaagatctaacaattctgcttagctttttggttaagactccatgctttcattaccagaaaagggtcctatgtagtcattctgattacatgtaattctattccatgaagccttaagaaaaaatattttttttttactttcccttaaaactttatcatttgataagtaaatttacttttcaagagtataatcaaagaataaagataatgtgacactaagatatcaatgtgttatgaatacacataaggcatacatttcagctgtaaaaaaaagccacattcaatctgactctggttttaaaacaaaactgtcatacttatacatgatactgcaacttttggaaggctaatttagtggaatgttgcctcatcacagaacaccataaatcattaaaaattctataaaaattttgccaagctaccatgcagttaataaaagggtatacaatcacttttatttctgaaaatacaaaacaattggagcctttcagtgtctctgatgcttctcttttggtaaggaattatacttttatttcatggatcccaggcaggcatataaaagggaatttataaaatcatttgggataattagaaaatgcaattattcataacagaaaaataaagatttctagaaagnnnnnnnnnnnnnnnnnnnnnnnnnnnnnnnnnnnnntctttcctgagaatagtcctaagtgacaaagttatttcagtactttttttaaaaccctaaatagatattaagaaactcaagattatcattggatatttactgcttcctcacttagtatttaaatttggttgtagttcgggggaaaacagttattatatttattttgctgtttactaaatagcaacttctnnnnnnnnnnnnnnnnnntatttgtaaagttaaaactgc

SEQ ID NO: 2617 - DNA, 648 bp, Macaca Fascicularis
  misc_feature (1)...(648): n = A,T,C or G
nnnnnnnnnnnnnnnnnnnnnnnnnnnnnnnnnnnnnnnnnnnnnnnnnnnnnnnnnnnncaaataaagaaaaaaaaagtgcaggcattagttggcttaggaaggaatcatattctaaaaccgtataatctaaaacagagcaggctaagtttccaggccagccagcataattctgttttgtccataatatgtattatggtttgatgtttagactcttccctctggaaacacacagaactagcagaaggaagaaaaaggtttttcccactttaccgtgcggtagagcaaaatatatttcgggatttcgggatttttcctatttgccaaattctttacatccttttctttttgcctcttgctttttcctaaaaaaataataataataataatttcactcaatttggtagctaaatgtggggaaaaaaaaaaaacaggtaacttttttattatcactttgacagctacttcaccttccttaagagggccagttgcgggccaggcgcggtggctcacgcctgtaatcccaacactttgggcggccaaggcgggtggatcacctgaggtcaggagttcaagaccagcctggccaacatggcaaaatcctgtctttactaaaaatacaaaaaaaaaaaaaaaaaaaaaaaaagg

SEQ ID NO: 2618 - DNA, 685 bp, Macaca Fascicularis
  misc_feature (1)...(685): n = A,T,C or G
aaccagaacatgttttgcgaggagcgggtcggctacaactgggcttacaacaccatgctaaccaagacatggcgctccagtgccacaggggatgaaaagtttgctgatcggctgctgaaggacttcacagacttctgcatcaaccgtgacaaccgtctggtcacgttctggacaagttgcctggagaagatgcatgccagtgccccgtgaggccagggttagaaggctgtgcctgtgctgagggaaggtgggtgagctgctgccctcaaacccagggtggaggaggattccaggcaggctctaggagtcaggtgtccatttgctactgtcagtgagtgggggccaattttttttttttttttttggcccccacaacaaatcttctactctagaagaaagactttggaagcagctgctgctgctgccgccannnnnnnnnnnnnnntctcagagcaggtgggaggcacagattgtccgtgggagggctccagtgtctgggaagagggcaggcagcccccatgaatgtcctcggaagtgagtggctcctggtagcatccttttccttcaccatctataggatattaggggcagaatctgccacttcctgcccgggagtgtgcacagatgtaagataattctgnnaaacaaggnnagtggcagcagcagcagcagctgcttccaaagt

SEQ ID NO: 2619 - DNA, 726 bp, Macaca Fascicularis
  misc_feature (1)...(726): n = A,T,C or G
gacaatgtnnnaagannnaatttgatcttcatgacaacttcataaaatagttactattattctcaattcacaaatgagaaagtgagacacagagatgctaaggaattgttcaaagtcacacagctactgagtggcagagccagggtctgggcccaggcagtgtggctccagatgccacccactcnnnnnnnnnnnnnnnnnnnnnntgctccttaccagttagggatgagctgattctcatatttttccaagatacattttaatttaagctttattnnnnnnnnnnnnnnnatcannnnnnnnnnnattgtcagttttcttgttttaaaatagggtttggagtctcttcaaggctttctgttttagaaaagtaaaacttaaaaatctatagccatgtgaattatacttatagagaaaaagagttgttttgttaacatcagacatctttttcctactaattattttggaacaatgttcagtatcaggctagcaatnnnnnnnnnnnnctcatccaattattatgcatggattaagccacgaccttaaagtgtgtacatagtgttgaatatattcatcttatttgcagtcttattgtcatctagcttaaatacacttgccctttcatatgtctcttgtcactattctgtgtaagattataatcctaaataccactatatgtatttttcttcatattctattattgaacagtattaatgcttaataaat

SEQ ID NO: 2620 - DNA, 717 bp, Macaca Fascicularis
  misc_feature (1)...(717): n = A,T,C or G
aaaatacaaaaatagcnnnnncatggtggcacatgactgtaatnncagctactcgagagcctgaggcaggagaatcgcttcaattcgggaactagaggtttcagtgagcctagatcgtgccattgcactctagcctgggtgacaaagtgagactctgtctcaaatagcctggtgtgnnnnnnnnnnnnnnnnnnnnnnnnnnnnnnnnnnnnnnnnnnnnnnnnnnnnnnnnnnnnnnnnnnnnnnnnnnnnnnnnnnnnnnnnnnnnnnnnnnnnnnnnnnnnnnnnnnnnnnnnnnnnnnnnnnnnnnnnnnnnnnnnnnnnnnnnnnnnnnnnnnnnnnnnnnnnnnnnnnnnnnnnnnnnnnnnnnnnnnnnnnnnnnnnnnnnnnnnnnnnnnnnnnnnnnnnnnnnnnnncaaaaataaattttctgcatcttagcaggttctcctgcctcctctccagtttgtacccgccttccccaagagtggccagtctcctgatctttatcaccgtaaattagtgtagtctgtccttgaaccttctctaaggggaattgtgtatatagttatttgatcctggctttcttcactcaacactgtggatgaagtgtggatccatgctgtgtgtttttatttttattgctgtgtagtatttatcatnnnnnnnnnnnnnnnnttattgtttcatccctctcttcatgaacattttgtattt

SEQ ID NO: 2621 - DNA, 1810 bp, Macaca Fascicularis
agcataaaaggctcaatctgcctgcttcacccagtggtggagaacaactgagtggaaacagctggaggagccatgtccctgggagaaggggaaagctgtcggattcagggcatggtgtgaagatgaaccagcagaatttcccaacagggtagatggggctgagagataagaggggagtgagaggaaacaccagggacattgacctgagggtgtgcaggaaaggccagtttgggaaaccgtggagcaatcagtttagttctgaccgagatgaatttaacatgtctgttagacttccaagtgaaaacgttgaggaggcagttggttgtatcaggcttgacttcacaggagaagtggaggctgggaatatattaataaatgaaggagttgtcagtttagagattgtattaaaatgcataggactgaataagatgttctaggaaatcggtatgaaaagaaataagaaatgtgtgcactgaatcctgggacaagagatgaacagaggacagctagtgaggatagtgaggagaaccaaggcagcataatgctcatagaccaagggaagaaggatttcatggagaaacatcagctgtagcaaaaaaaaggatgtttggatctgcctacactccttcctccctccctccctccctgcttccttcctccctacttctctgcctccctcttttcttccctcccttccttctgttccacgctgccctctctccctccctgcttccttcctccctacttccctgcctccctcttttcttccctcccttccttctgttcctcgccgcctccaccttccttctgcctttcagtttcccgttagtctgagattctgcaggatagatatttctggtgctcttcacagaatgaagggccttgggtttcctcctgataccccacaatgcatgcaaagacatagcggataaagagataatcatatctaaccgcaaaatgcatcccttgccctctgttattctattaatagcgctgctggtactttcctcccaacttttacccgtggagaattgaaaagacactctgagtgaaggttcagaatcttcaaaacgtgtacaccatcagcataaatgtctcattctggataaatccacttcaattacatatttaactcagctgtgagctccccaaagaagggttattctgtattcaccagcaaagtatttttgataccctcatggggacaatgatttgccaaaaattcatgcaaccctttttatattaatgcagaaaaacttgaagatgattaagtccatgcttctgacagcccctgcagttacaaataaaatagctaatgagaagaaaaactgcccctaccggcttattcccaaagccccagccatctttacgcaagaatgctgtgacaaatggtacttttcacctttctaacatgccccttctccgattatagatttagatggataacatgaccacaagagttaggccctgaagcagatgattgcctctggcacccgccgtatgcaattcgaggtgaaatttccaagagccaaatgaagtaattgcaacagggtaagtctaactctgccagtgaatttataaaaattaaaaggtctgagaggtaatgctcatgaacccatttgtctcatttttcctcattaagatttaattgaaatgaactctggtaactgtaagaaaatgttacattcttatttcaggctagcatttcttaagcaccaaactctccttgagatcagtttgatgcactgctatttcaccattcacattagtactaacaaactagtgaaataaaaaaaaaaaaaaaaaaaaa

SEQ ID NO: 2622 - DNA, 728 bp, Macaca Fascicularis
  misc_feature (1)...(728): n = A,T,C or G
agcctggggtggggaactgaggnnnnnnnnnnnnnnnnnnnnnnnnnnnnnnnnnnnnccttcatggagttgggnnnnnnnnnnnnnnnnngcccagtcaaaggctccaagcgaggacagcaggaatagggatctactgttaccaaaagtcctgattcccccatctccaacctacccagtttgttcttgctgatgtcggnnnnnnngggggagttggtacagctctgttcttcccttgtcctataccaggaactcccctccnnnnnnnnnnnnnnnnnnnnnnnnnnnnnnnnnnnnnnnnnnnnnnnnnnnnnnnnnnnnnnnnnnnnnnnnnnnnnnnnnnnnnnnnnnnnnnnnnnnnnnnnnnnngatgtcattctccaccaataatggtccctcttcccnnnnnnnnnnnnnnnagcccaaggctctnnnnnnnnnnnnnnnnnnnnnnnnnnnnntttattttaagttatttattcnnnnnnnnnnnnnnnnnngcttatgaggttcttatggagagtgagaaagggaagggaaatagggcaccatggttcggtggnnnnnnnnnnnnnnnnnnnnnnnnnnnnnnnnnnnnnnnnnnnnnnnnnnnnnnnnnnnnnnnnnnnnnnnnnnnnnnnnnnnnnnnnnntcttgcccatcccaccttggggaannnnnnnnnnnnnnnnnnnnnnnnnnnnnnnnnnnnnnnnntccctgcgaag

SEQ ID NO: 2623 - DNA, 763 bp, Macaca Fascicularis
  misc_feature (1)...(763): n = A,T,C or G
cnnnnnnnnnnnnnnnnnnnngnnnnatagcagtacatggaactgtactgtgccagggatattgagatgctctgggggtgtattgtatacctgccagttttcttcatttctgaattgagttttcttttcttgatgttggtttccttcatatcacctcaaggtttagatttgtgaaggaataagcatgatgggaataatagtcttgaaaggagatacgttgtatataatcaggaggaggaggaggaggaaggaaggactttcccattttgatattttgctgtaggtggccagttttgtttctcatagggaaatctgacccacctgtcatnnnnnnnnnnnnnnnnnnnnnnttgtaagcggctcatcnnnnnnnnnnnnnnnnnnnnnnnnnnnnggaatatggaaaaggaagaaagccacaggactgcccattcagtcttgggaagatttggatgattctgcacaagcaaaaatgacttgaaatttatgtatagacacacctctaccaatccatcttcagctgactgaatgttgtatgatagcccttctccaaagcaggggtagaatgttcaggttgcaccacaaattttctacttatttcgtttttggaatcagcttacagattccaggtcccttttgtatatattctttattcttttgcttttttaaaaaataattttgtttcatatttaaagcacttgtattagtcaatgtttcgtgttccgcattattgaaccatttgcccttacagaaagagaaatac

SEQ ID NO: 2624 - DNA, 775 bp, Macaca Fascicularis
  misc_feature (1)...(775): n = A,T,C or G
tcaatgggaggtgaannnnngaagaactgatggtggacaactggcgcccggctcagccactgaagaacaggcaaatcaaagcttccttcaaataagatggtcccatagcctgtatccaaataatgaatcttcgggtgtttccctctagctaagcacagatctaccttggtgatttggaccctgattgctttgtgtctggttttctagacgcttcgtctcttacttgatagnnnnnnnnnnnnnnnnnnnngactagatcaattgtcatgcttgaaacaactgctgtggctggttggtgctttgtttatggtagtagtttttctgtaacgcagaatataggataagaaataagaataaagtaccttgactttgttcacagcatgtagggtgatgagcactcannnnnnnnnnnnnnnnnnncttttaaaacataggaaagtagaatgattgagtgcaaatccatagcacgtgataaattgagctagttaaggcaaatcaggtaaaatagtcatgattctatgtaatgtaaaccagaaaaaataaatgttcatgattccaagatgttatattaaagaaaaactttaaaaattattatatatttatagtaaagttatcttannnnnnnnnnnnnttgtaatttagtgacttttgaattacagagatgtaaatgaagtgttatgtgtaaaaattgttataattagagttgtgatacagagtatatttcaattcagacaatatatcataacttaataaatattgtattttagatatatct

SEQ ID NO: 2625 - DNA, 740 bp, Macaca Fascicularis
  misc_feature (1)...(740): n = A,T,C or G
aggctgccagcaggtagctgggggcttggggcctggtagggaatgcgggcnnnnnnnnnnnnnnnnnnnnnnnnnnnnnnnnnnnnnnnnnngctcccactcctgaggtcttcaggcttggccagtttgctgtcagggaggtaggaggtggtgaaaggccagctcctaaagagggtggtgaatttcagcaaggttggcctttggacctgtccagaacctctggggtgagacagtgtgnnnnnnnnnnnnnnncgctctgtgagtatacggttggctcctcttcctttaagctaatgagtaagacaaaagggaaacaaggaggatgtcaagcttctccacttcgtcagtgacctgagccactttgttgaatcagatggtttttggatactagaagagcatttcctcaacttgtgctnnnnnnnnnnnnnnnnnnnnnnnnnnnnnnnnnnnnnctaatctacattttaatcatcttaagtctagacaagtaactgtaaatcaagtcccagtgtgaagaatttgccaattcccatggtgtaaatactcccaccacagctgatttccagctaccagttagatgtcattgaatggggagctggaagagatgccctcagcaccccgttatgtggtnnnnnnnnnnnnnnnnnnnnnnnatgtacataacccggggcagagaaaacagtcctacgtgcagaaataactaggaagtgatgtttgttgattttgcttttaataacaca

SEQ ID NO: 2626 - DNA, 649 bp, Macaca Fascicularis
  misc_feature (1)...(649): n = A,T,C or G
ctgtggtagccgtgtcccggcacccggtcccggtgaagcctctggatgcggaggtcccaaaccgtggccccttcgacctgcgctccgcgctctggcgctatggtctggccgtcggctgcggcgccatcggagccctcgtactcggtgctggtcttctcttctctctccggtctgtgcgctcagtggtgcttcgagctggagggcagcaggtgaccctcaccactcatgccccttttggcttgtgggcccatttcacagttcctttgaagcaggtatcttgcatggcccaccgagatgaagtccctgccatgctacctctgaaagtcaaaggccgacgcttctatttcctcttggacaaagctggacacttccctaacacaaaactctttgacaatactgtgggtgcctaccggagcttgtgaagaaacaacctcaagtcactcacctctccaacagggggataaaagctgaaccttggggagccaggtgtgttggttcacacctgttgnnnnnnnnnnnnnnnnnnnnnnnnnnnnnnnnnnnnnnnnnnnnnnnnnnnnnntgagaccagcctgggcaacatagcgagaccttgtctgtatttacaaaaaaaaaaaaaccaatcttagaatggagtaacaaccaggtc

SEQ ID NO: 2627 - DNA, 742 bp, Macaca Fascicularis
  misc_feature (1)...(742): n = A,T,C or G
gcagatnnnnnnnnnnacaatnnnnnnnataaagattgtgaagtgattattggcaaacgtttgtaaatgtgaccatgtataaagtatttatactctttaattcacactgttagagagcaaaatcatctaagtattgccacatgacaagattagtaagcaggaatactagaactatgnnnnnnnnnnnnnnnnnnnnnnnnnnnnnnnnnnnnnnnnnnncacagttaacctaatgccaaataaatactggttaaatacatgtatggcacagaatataatnnnnnnnnnnnnnnnnttagcataatgaaaaagtctatatatatgtgtannnnnnnnnnnnnnnnnnnnnnnnnnnnnnaagttctagtttgaaaaaaaatacataactaatttaattttacacaaaaatatttatgcagattttcagaatttcatatcaggaaatgacctttttatgtctgttaaatatcaaaacaatttgctacagtgttaannnnnnnnnnnnnnnnnnnnnnnnnnnnnnagatgcagacagtgcatgaaaaagtattccgctgggaattgagccatgccaccaaagccaagaggagcnnnnnnnnnnnnnnnnnnnnnnnnnnnnnnnnnnnnnnnnnnnnnnnnnnnnnnnnnnnnnnnnnnnnnnnnnnnnnnnnnnnnnnnnnnnnntgtgtgttccnnnnnnnnnnnnnnnnnnnnnnnnnntaccatcgatatgaaattaaac

SEQ ID NO: 2628 - DNA, 687 bp, Macaca Fascicularis
gaattccagaggcacggaacccccagaaatgtccctcctcagaaacaggctccaggacctgcctgccctgtacctctgtgtgctggtcctggcctgcattggggcatgcccgtcagaagcctatgaaggaacccccagccccccaccaaagctcaagatgagtcactggagcctggcgacgggcaggatgaaggagctgctggagccagtgttgaacaggaccagagacaggtggcagtggttctggtctcccgaccaccatgggcacacgattcctcctggctctgtgtctcgtcctcctggtactgggattcgaggtccagggggcccaactcccccagcaagatgaaccgcccagcccggccttgctcagccgggtgcaggaatctctctccagttactgggagtcagcaaaggcagccgcccagaagctgtacgagaagacatacctgcctgctgtagacgagaaactcagggacttgtacagcaaaagcacagcagccatgagcacttacacaggcatttttactgaccaagttctttctgtgctgaagggagaggaataacagccagaccctccatctgtggacaaggggagagtcccccgctcccctgatcccccaggttcggactgagctcccccttcccagtagctcttgcatcctgctcccaactctagcctgaatt

SEQ ID NO: 2629 - DNA, 115 bp, Macaca Fascicularis
  misc_feature (1)...(115): n = A,T,C or G
gtagtcattggttaccagtgtgtcaggcaatgtggactttcctgtgatgccaatgnnnnnnnnnnnnnnnnnnnnnnnnnngttccatttctagattgtggatgntcagataaat

SEQ ID NO: 2630 - DNA, 1827 bp, Macaca Fascicularis
  misc_feature (1)...(1827): n = A,T,C or G
tggcattttgggatgaggatttgggatcttctggacttggcgcagccatgactggttatcacagatctgagtggaggtctgtctgctcacataccttcagcttgtcctgacaactttctctttgcaaatctggcttcctgatggactttcaaacagatttttgcccctgttgcagtgttaaaaggggagggtgctacatcctggctggggccagcagcacttacgggttaggtgttgggtttacctgtgtatcatgtgacccgcccatttcatcacccagggtccaggtggcagaggtcagctgtcttctctttactcccatagggcagtgtttttcaagccattttgatgaagattcatactaagaaacacattacaggcatgagccactgtgcccaacctccacttttaaggtattttttcatgttatttcaagcactttgtaaagattattttaaaagtctacattgaatggatgtgccagaatttatttagccactcttgtaattcaggatgtatttgtatctatatacatagtctgcaatgagaatcttttgacgtaaagtcaacccctccatatctcaggtattttccctaggccacactaagaaattaggtataacttgccttctgctgtctgtgccccagccagggctgccattctgcctgctgtcactggactgaccattctccacagttaacacctgtccccatccctggggagtctgggcatccagggacctactgcaagatagctggggtgttttgttttgagatggagttttgctctnnnnnnnnnnnnnnnnnnnnnnnnnnnnnnnnnnnnnnnnnnnnnnnnnnnnnnnnnnnnnnnnnnnnnnnnnnnnnnnnnnnnnnnnnnnnnnnnnnnnnnnnnnnnnnnnnnnnnnnnnnnnnnnnnnnnnnnnnnnnnnnnnnnnnnnnnnnnnnnnnnnnnnnnnnnnnnnnnnnnnnnnnnnnnnnnnnnnnnnnnnnnnnnnnnnnnnnnnnnnnnnnnnnnnnnnnnnnnnnnnnnnnnnnnnnnnnnnnnnnnggcccagagagctgttttatatggaagatacagaacagtcaaccctggcacgaagagcaaggtgtggagaggaggaggcaggaggaggcccacacttgttctgctgctgatctggtgggcggcagaagaggggatatgggttgtaggggggacgctgctgaagggcgaaccatgagcactttacatgaggagggtataccatcccatctcatgtcgctctactgctggggcgggagatgaggagtcattgaaggtgtcagtgttcttacatccttagggcaccctggagaccgattgttacatattcaggcttttgcaagttattagaagactgatagggtgaaattaaccaaggtgtgagtgtttacaccacggtgatgggcaaatgctacagatcagagcttcatgtttttggagagctaatttacaggcacaccatgacctgcatcccatggatacatctctgcacaccatctcccttcttaccagtataagagataatatgcacacttatgaacatgcacacattcgcatccctcttcttgtattttgctcttccagaacctcacaagatgaaattactgttttctttttctttttttttttttttttttgagacacgnnnnnnnnnnnnnnnnnnnnnnnnnnnnnnnnnnnnnnnnnnnnnnnnnnnnnnnnnnnnnnnnnnnnnnnnnnnnnnnnnnnnnnnnnnnnnnnnnnnnnnnnnnnnnnnnnnnnnnnnnnnnnnnnnnnnnnnnnnaatttttgtaaaaaaa

SEQ ID NO: 2631 - DNA, 2112 bp, Macaca Fascicularis
catatactacatgtgtaactttgaattacttacgtagcctctctgtaactcagtttcttcatttgtagaaataaataaagaatagtatctacctcatagagttgttataaggattaaacaagttaatattgataaggtttttggaacagttcctggcacatagtaaattacctatcttatttttaagtcaatcaaaatatttgctaagatatttgtacctttacaaatctataatattgcatgtaatataaaaatcaaaagtgaacatttaaatgaataaggtgtacctatactatgaaataatatgcagtcattgaaatgatgtgagctgtatttactgacatggaagagtgctgctggtgtacgaagagaagaaattagatcgtataacaacatggtgtgtaatattattctatttatgtatagtcacagaaagatgactggaaatatgtttgtcatcaacaatgtattttaaaatgtaactcacagcacattagttattttcttcagtaatgaatcgtgtcctttttgagtcagcagatggttaagtggattactactgttagattggagggatagctggttgatctattaatactagttcaattcgttacaatccaccataacgtttagctcttggaaggagaaacaagctgctgcaggtcaagcagggccagagaacacacatggaagggctgttgtcaattagactcctctagaccatgaagtttctacaacacaaacctgcagaaaaatctgatgtactgttgcctcaagaaacgtgcttggggaagaaagctgttattcttgataaataattgcagcacgacatgtttataaatttggcagtagaagtttagagtattattcagctcttaaaaagaatgttacattatatagtaaagagaagagaaaagggggctataatatagttaaagtcaggctattattagcaaggtttgttaggattatggactagagctgttaggtatcttaagtaggaattatgtttattaaaacaatgattgaataaacttctttatgtccataatctaagaggtaattaaatgtgatttttatttaacaaagcatgaaagaggtttcaagtgtaacactgctaaacaaatattagatgtatgaatcttgtacaagttttgatggtactttaaatatatattttgccttcagtagaaattgaagaccttctgtgtgttggttaattctctgggtaccatggccaaagagggaaacctaacacattgaaaaatcattaatatgtttcagagtatgcatctttaatccaaatagacatgcacctgaaattcagttatttatttttgaataggtgtattgtttgtttttttgccacagaggaaggtagaagacaaaaaaggataatcaagggaagattttagatttcataaaaccaaagtgagactcattgaagatttttgaataaggaagcttagtaagtaagattttttaataattattttttagaatattgcacagcacaggtggaaaaaagagaggcaagatgggtacagcaggccctgttagtgcaccacctgtatcccccatgcccaagattttggggtgcccaggctgatgcccagcttccataccatttatatacttaaaggcttttcctggaacaaggagagtggaaatgagagggaattacctccctatgaatcagccctcaagcaatgactacagggatttggtgtataaatgctctagctgccatgctccaggtggtaaaattctctgaaatgtatttaccaccttttccaaagtttggctcagtggaattaagctcaagtcaccctctgcattagcttaataattattctttactggctgtgtttcctttcatggacaacttttctccctcaccattgcttttttttacattttcctctgcttcaccattgcttcagtaccgggaattgaatctagaccatctctggtctattactggggaacctgaatgaaacagcagcatactggcaggagataaggaaggtgtttgtctcattcatttaaaatggtcagtgcctgccttccaagtttttataatatggatgcaagccaaaaaaaaaaaaaaaa

SEQ ID NO: 2632 - DNA, 1342 bp, Macaca Fascicularis
ctacaaaccccaacagggaagaccccggggtggtctcacccacgcccttccctttggccaacatgagtcctgcagtggggagcttagcccctgctcccacctaacactctacagttagcacccaggggttgattctggaagttcttcctttttctagcctgcatccttcctggtcaccccctttatttctcagtctgacctggtgcactcttggcaagtaagttccctgcagtcccaggtggatatttaatgagcacgccaactgtttcctccaagtcagcgagtggcctgccctcccccttttcaagaagtctggggcacagagcctcctctggctgcctcttctcttctctgagcctctgggagccttcaggcacaacctggcagttcttaggagccgagacctgaggctccagctcccccgccaccagagattcagtgtgcagtgctgaaggcagtcaccctcaagcagttcctgctgtcaggctgcaagcctagggtgcaggatcccagcagcccagggaacaggaccggggcgtgagctgctgccgtggggtctgtggtagggctccccatctcccacccctcagcaagaagggtcctgagcccaccctgcccagagaggagctggggcctccagacagaccccactccagccagatgaaggcccctgtcaaaaaagaggcaggcgggggggagagcagaaagaatggccccgaatccaaactcctggatccccttcttgagagaggggctccccctggaagagaagttctcatccccaggcccagtgcagcaagaccaccagcagagacccactgcccttcctggcagagccagcagctccgaggcaccactcctctcctcccttccctccccactctcccctccctttccctcccctccacacccaccctgttactcccacagctctgggcagccaggccctcccctcctgcctcctggtcttctctactccgctggttctgacccatcccttggctctgctggccatccctcaccctacccctgctgagtaccttctgcctccccacacacccccctccccgtctgggccaggtgggctcaggcgtcccaggccctccttagaaaagccgcctctctcaagtgcagtggccccccctcccacccccgtcgctgccgcccaccccgtattaactgtaattttgtaagaggagtgacttgttggtttaataaatctctagttattgtaataatttattggctgccataatgtatttattagtcgcctaccgttaataaacagtgcccgctttcctaaaaaaaaaaaaaaaaaaaaaaaaaaaaaaaaaaaaaaaaa

SEQ ID NO: 2633 - DNA, 704 bp, Macaca Fascicularis
  misc_feature (1)...(704): n = A,T,C or G
ctggtttgaatcttgaagacagaaaggtgatatccggnnngctgtttaaagggaccacacttttgaatacctactggcgtttggcataaatctgagactggcaccagacacaatgttagatgtgggtattttcccnnnnnnnnnnnnnnnctcagagtaatttggaagacaaaaaacagaaaaaaatcgtaatgattttttaaatgttagaatctatttgttaacatactctgcaaaataaatttcaactaatgcaatagatttaaaatatagcctatggaatactgtgattgaagttggaaggcttgccggttcttattttgcatgcaagtttagatggggtaaagaatgtataaatttatttgagatgagatacagtattgtaaaaatataaactcatctagaatttcttttaaaacaagcaaaagcctattttagtacaaatgttgggtgagtagttgttttaaggtggcaaaatacttcaagattttctaactttttaatttttcataaagacagaagaaatactttcaccctaaccaatgattgtaagatcttgagagtatgttcttactcatttctgtaattgcagtagtgtagtcatctgcatataaatttaataaacgcatgttaaaatttaagttgatgccttttagtcctctcagagtctgtcacagttctttgtggaaagtagatgatcaaaa

SEQ ID NO: 2634 - DNA, 724 bp, Macaca Fascicularis
  misc_feature (1)...(724): n = A,T,C or G
aggcagggaaggcccctctgatgagttgagatttagcagagacctgaagaaatggtgagaactaccaagggaggctaggcagagggaacagccagtgcaaaggccttgaggcagcatatgcttgctgtgtttgaagaacagcaaggaagccagtgtggctggagtgtggtgagcacaggtgacactggcaggagaccagagcagtaaagcagccaggttgggtcattctgaggatttgtcatttactcttagtgagataggaagtcgtgggaggattttgagtagggaagggacatgtcctgacttaggtttttattatgtatgtatgtatgtatgtatttttgagatggagtcttgctttgtcactgaggctgaggtgcagtggcgcgatctcagctcgcggaaacctccacctcccgagcacaagcgattttcctgtctcagcctccctagtagctgggattacaggcgtgcgccatcacgcccagctaatttttatatttttagtagagacggggattcaccatgttggccaggctggtcttgaactcctgacctcaaatgatccatctgccctggcctcccaaagtgctaggattacaggcatgagccgctgagcccggccttgacttaggtttttaaaggatcactctagagagtgcaatgtggaggacaggcttaggggacagctgtggnggctgaagatagaagttggataccagtt

SEQ ID NO: 2635 - DNA, 627 bp, Macaca Fascicularis
  misc_feature (1)...(627): n = A,T,C or G
gcccatgcagcctgttctgtcatcnnnngcgcgctcctgttaagagaacatccaggccgggcgcggtggctcaagcctgtaatcccagcactttgggaggccgagacgggcggatcacgaggtcagnnnnnnnnnnnnnnnnnnnnnnnnnnnnnnnnnnnnnnnnnnnnnnnnnnaaaaaaaaatccaaaaaccnnnnnnnnnnnnnnnnnnnnnnnnnnnnnnnnnnnnnnnnnnnnnnnnnnnnnnnnnnnnnnnnnnnnnnnnnnnnnnnnnnnnnnnnnnnnnnnnnnnnnnnnnnnnnnnnnnnnnnnnnnnnnnnnnnnnnnnnngcgagactccgtcaaaaaaaaaaaaaaaagagaacatccaggccccggctgcctggcctcgccccacttgagtctggcctgggctggatcccagctgttctgggcagggctgggcacaggggggcgcaggcccctgaagggccgagacccactggctgcgctgcccagggccgaggggccacctcttgagggtattcacctctggtcacatggccatggagccctggggtgcccctgggtcaagggaggacatttggccagctggtggctggggggagcccggctgccctgctgc

SEQ ID NO: 2636 - DNA, 763 bp, Macaca Fascicularis
  misc_feature (1)...(763): n = A,T,C or G
tatcaagagagaaatnnncagaaaaggcgtaattgaggaggtaacattgnnnctggtttctaaagggtagctaattactctgtctttacaaagtgtgtgaatgtatatgagtgtttataaaatctgggtcaagtttgaatatacagagattgtagggaaggatgttctacacacagggtacagcaagatcaaagttgggagaggctgagctatgcacaaagaatagcagtggttttagtttggctggactgtaaagtgcatgaaggagaagttgcaaagaagattggaaacgtgggtgggaaccacatcatggaagagctggaattcttagctatgaaaatttgtaccatattctgtaaacattttgggannnnnnnnnnnnnnnnnnnnnnnnnnnncgtaagatcaaagcttgcttgggaaggttaacactcttcccagtaaagtttnnnnnnnnnnnnnnnctgttatattgaaataatgtgggtaaagtgactgacatagtatctgatgcatagtagctcagtaagtcatggaagcagatatattgtagtggtttagagcaaaaactctggtgcctgaatgcctgggttcaaaaaccagctctgccacttaatagctctgtgattttgtgcagatttcttaacctctctgtatggtagtttccctgtctgtaaaataggattaaaaataatacctgttatgaattattatgagggtcaaatgagctaatacatgtgaaatacannnnnnngtgctctat

SEQ ID NO: 2637 - DNA, 2220 bp, Macaca Fascicularis
aacaacaatgccaaacttataatgttattacttaacactccacattcacaaaaagatgttgcatcatttttacatgttatttctccatacttttctgatagaagtttttttataatcagtttttatgatgatatatgaaatgatttttttccaaaaaggaagataaacatgcagtctgtgccagcatgttaccaaaacaatcttttcggtgagaataattgtttcctttactgtttgggaaaggaacaactgattggcctgctatttaaatgttgttttccttgtgttacatagacccactttttcactcctattcccctccaccccattcaactcactattacttaagtgtaccccttacaccatatttccgaaatataaataacataacaggataagatctaaagaaaactagccttcctcttaattcttctgtgttataaggtgtgtaaatggagtggcggctcccatgagtgagtatatgtgcacctgcctgtgggctggcctctttctaagaggagcatgtctgcgtggcacactgagaaatgtttgctcaacgtaagtgggcaaagtatgctgagattcagaaactccagccaccctcatgttttaggtatctgctaggtaatttgttagtttgcatggggaaagtcatccaacaaataagtagaccccaaaccaggggactgtctcctacctttagctgtcatcttccattccctgacaaattagcttagtatttcttctggggcaaaaagaatggcagtggaaagttctccaaacccttaggttttattaaatttgggaagaatctgggattctgatgagaaagatttcttcatttattattacatggcccagagcatagcaatctatcagttacctttttcagttttgcagaataagatatcttaataaaacaaaaagcagaaattatctaggtaaactgtctacatttcttcaacaaatgtaaaaaatatgccttcacttggggccacatagtcatagcctagcaggtaataaactatatatttttaaatacaagtcccagtgaaatgaacattgttaagtagagtaaacatttatttcaaagccataagtatgtctgagtatagaaaaagttcaagatctttaaatatgttcccattattagaactttacacacacacacacaatttatttccttcactttcaaatctaatagtgtcaacagatacctttttctctttacttcttaatccatacattattaaatctaacatatgaaaactatggagaatatgctccctactccagggcagtgggttgaagtggtatgtctgttgctgtgttacttgtctgcatggagagcttgcattgattcactgatgcctctaggaataaaggtcagtccttatgctaatgttgatagtgatgttacaatgatagcagtagtacctgcaattttttgagtgcattctatgtgctagatgatttataagcaccatttttattttaaaaatactacagtgacttgcacaaaatgaagaaaccgtgactcccaatatttatatgattttctcaaggtcctagatctgggtttgcaaccatgtctgtctgattcaaagttcatgttttcttcctacatgcctccaagcggagagttaattcaggcaatgtgaaaacttgaagtaaggtgaccatatgttccagtctatacctgttatcctagcgtaattaatagattcccctttcatgcttgaaaacgccccagtatggacaatgtttaacaatcaacctatctttgagcaaggtttaaaatccacgtaagacttttctaaggtattgttcacaatgctgtaattaatcttgttgtctttactgaaggatgtcaagcaagtaacaaattggacctagcttggtgtatttgggaaaacaaatggatttatgaatgaatatcatttactggttgagtgtattatcgctctgtcatctctctttgagaatcttttgtccttcctcttttctctctcctcctcctagtctccatgtttctttctatgcaggcttttgctattggtcaagtattaaaaaataaattccttggttttgctttagcttttgtttctgatgaacgtttaaaattcagcttggccgctcattcagatgtttaaaccactagtaatggtagttttgtccaaaagacaagtaaaaatcattttaagacatcagaaaaaaaaa

SEQ ID NO: 2638 - DNA, 748 bp, Macaca Fascicularis
  misc_feature (1)...(748): n = A,T,C or G
gtagctgtggctagacttgctggtggtatgaccgnngactagtgcagcatcacacannnnngggtcaagncttggctgtgtcatttnctgctgagggaccaggcactgaatttcctacctcttagggtcgttacctatgaggttaaagctacctcatgggattgttgtacgtggccaatgttggggcagacgcctcctggtcagggtgactgctcatcttagaccctccccttttctgcgaatttgggccccttgatcctctgatgggagctgaaaggatgagaggtgggcatctagattcagggaggctgttcaggctttgcaggtcccttccctgaacacatataaaccctggagctgtgactgtgtccgtgtctgtgtgtatcgggggggatggnnnnnnnnnnnnnnnnggtagagaaaatggctctgctcagagagaagatacgcatagcaaggcagggaccagaggaatcacaggtgcccggagagcagccgggcaccgcctccagggacctgctggcttccctcagtcctccaggggcccagcactctttcctgtgggccctgtgagcgtcccttgtcannnnnnnnnnnnnnnnnnnnnnnnnnnnnnnnnnnnnnnnngtctatttctcatagtcaaaagagctctgaatgagggaagtgcttctgtgttaactccccgtgtctcctgaatttcagtcattcgtgtacccgccttgaaattttgcaatatccatgtacc

SEQ ID NO: 2639 - DNA, 157 bp, Macaca Fascicularis
tgtgatacggtgcctttccctactcaatttgaactcccacacatccttttcctcctctcttttccctcggttcctaaaccttcctcacacctctttgatgcctcagacctttcccttttatccctcttgctcacgtgcttcctttcactcctttttc

SEQ ID NO: 2640 - DNA, 689 bp, Macaca Fascicularis
  misc_feature (1)...(689): n = A,T,C or G
catttattccctttccnntgtccctcnnnaggcctcaggctnnnnnnnnnnnnnnnnnnnnnnnnnnnnnnnnnnnnnnnagccatgcctctgtccctgagctgcttggtgtgggcatgggggatccagaaccccagcaggagggcagatggcaagcacagggcaggaggggctggacaaagcctttggccctcagggaaggtgaccaactggccctggtttgcctgggacttgcccagttttagcactgaaagtcccaaatcctgggaaactccttggtcctaagcaaactgaaacagttggtcagcctatctccaagccctttcgcacctcctaannnnnnnnnnnnnnnnnnnnnnnnnnnnnnnnnnnggcctttggactcctggatactagagagacctgggcgctgaggaagggtcccgagccagtaccaggaaaggacagactcctgcttgcagcattcccagcagagatatcgcctgtggacaccacgtctgtgtctgcatatggcagagctcccacatatatgcacaagggagtgaaaaaatgtgtttgcaccccagtctctaaaaattcaacagcctggttacttctgggtggtatattgcaggtgactttaatacgtgttatttgctcatctgtacatcttacactttgtacaatgaaannnatgttccttttactta

SEQ ID NO: 2641 - DNA, 728 bp, Macaca Fascicularis
  misc_feature (1)...(728): n = A,T,C or G
ggtgtgccattgtacattctcaccaccaagcataggaggattacaaactctcttgcctgtgatgtaggttcacttcgcactggttaccaaatgtctgactccagnnnnnnnnnnnnnnnnnnnnnnnnnnnnnnnnnnnnnnnnnnctactgacaggcaacaaggggcagtagaagcctaggattgannnnnnnnnnnnnnntcccccaaggctcaggaaaactgcttggggannnnnnnnnnnnnnntactggtgtcccaccgnnnnnnnnnnngacggacctcagagagcacccatcctaggttttatggcacatggcctcgtgatgagccaccctaaagcactgaaggatatcctgttttttgaaagaggggcaggggactctggaatggagcccaggctgcttgggccagtttcttcatttcagggtattaccttcccaatacattctgaagttgttcttgagaactacaagcaaggaaggagagaaaaataatttaaggttgttcctttaatgtatacatcccacggtaccttacttctacaaaaccaaaagacagctnnnnnnnnnnnnnnnnnnnnnnnnnnnnnnnnnnnnnnnnnnnnnnnnnnaagtgccaattaacaatatcaagttaattaagaagaaaatggatgggggaaannnnnnnnnnnnnnnnggacttctctcnnnnnnnnnnnnnnnnnnnnntggtcattaagaaaa

SEQ ID NO: 2642 - DNA, 1960 bp, Macaca Fascicularis
aaacattttagttaatatgtatttgtttgtattctgtgcatatgtcaacactaatgaggtccaaacaatttgtatttgaaacatctctatacttgttattcaccattatgggcttgatgaggaccatgcattcaagacagataatacatatttggaagctgtacagtctgtagactcaacacaaggcttggatttatttgttgtgccatttttgtttattatgtgattattctccagggcttgacttataaaggaagattgatgttggaagcccaagaggaataataaacacaaaaataaatatcacaaaagagtgatactctgctaaacttgaaaatccattgcaaaaatagcaaatggaaacaaatactaccaatatagacaaatgaatgtagtaaggacattttatgagtttcagttataattattctagcaacaattgcttaaatttctaaagccacagtgttatttttttaaagtttattttaaagagaatgctttgtcagattgctaatttaaactatgtaacgctttaggtaaaacaataataataaagaaatagccttagtatagctaataaagcactttttagtaagttgaacatgtagatatgcctttcaaagagaaaaggtaatgttattcttggtaagtaagcatggtaaatatttcaaaacaaaatgacttcattattcttattttttttctttgtatttgttaaatttttgtgggtacataagtgcatatatttatagggtaaatgagatgttttaattaccaaaaaagcaggaacaacatttttcattttgtaagtcttccatcaacttatcaaccttatctgtgacaacagaactttatataagttaagaaattaaaattactccaaagtagaaactagaagtaataaaaagaaatcatgcctccatagcttatgtacactaagaaagaagtcttagacctcacagttgacttaattgagttgtagggatgcggtaattcacagttaagaagataattcctctcaaaaaaaatctgtagtgagtgcagtgtaatcaggtgcatagaatttgggtcaaatacaagcttatttactgtcttataatgtgacctcgaatgaggcatttgccatctttgagtatttcttcattcttaaatggaaatagtgagttctaattcacatagtttttgttatatatcatgtaaattatggagtgtggtgcttagtgcttggtggatcaccaataactgatgctaagtacctcttattatttcccaagtgaataaagtttactggtaaatgttaaaacaagaattttattcaacttctagatcacagtgaaaaatgtaccaattatgtgtagagcaaggaaaattagggacatggagaaaaaaggaaaggttttaaagtttttttgtttttgttttacaaaaagtttcatttttcaaacaaaaatgtaccttactttatacttacaggagacattttagcaagacaaattacatttggttttatgattaaaacgtgtgtaacaattttttgggacagtaggtctgttattcattttatacttttaatatctatgtctaaacaaatgcattctagaaacattgtgcagctttctgttgtgtgttgttgtgtgttgttgtttgggggctttttcccctttctgacttggcaacatctttgttgtgtgagtgacagtgatgagcgccccacaggaaagctaacactggagttggaacagcctgacatatcacactgcaaggaatgcaggcagcacagagaatggctcatcaccggttacctacaggctgcaacctggaggctgcaaacaatcggattgattgtgctaatgttctgcaatttgcatgagaaaatatgtcagcagagtcttcccgttgtcattaacctttcttttaactctgcctattctgattctctcttaaaattgctcttgaaaag

SEQ ID NO: 2643 - DNA, 1894 bp, Macaca Fascicularis
cttcatcttctgaatgtaatgccaaccatccctgtctgcacgaaccccaagcattgtggagaatggggaaggacaaatcatccctcttttatgcttccttaattctcttctccagtcttctcacttctaactcagaatctgctttgtagtttattggtggaaaaggaaagaaaaatataaatcggctttgtcatttcaacctctgattataattcaaccctggaatttagtaatttgtactctggtagtttcagcttagctgcctggcagagcagaagggcaatccaatggttccaggcactgggaacagtcacattcctttagtatcctgttgttacctgtgctgcttcctggatgatactgtgggctcattggttcctagccaaacctatcttccttgaattgatagccccacagttaaagggctatgtaaaaccaaaaactttagaaacattcagttttatatagctattgtgtcaatatataaccttcccatttctccaccttcctgtctctattctgataggggcattatttttcctgccctcatcctcttcaacctcagtgctgtcctggggtataaacatatatcatttaactatgatttaaatatgattcattatgtaagatgtgtgaaaatcagtcccaataccatagtcaagatgtatatgtgtcagtaattacaaacaccactttgttattcactttagcaaaatatagattaatgtatattaacaggcatcagttgaataggcatctctatttttacttccgtctgccctttcagtgatatccagtttcattcctgagctaagcttgcttcattcttaaggagcccaagtcctttctttgggatccccagtgaacagtcaaaccgttctcctttcagtgactcaactccagctccttaagttctctggatttggttccatatctgttttctttactggcccatggtcagcgtaaaaatccagtaatattttccttgtcttctttaatatcttttccatcactgctttttaccttcttgttctctgaattctttggctaaaagctctcaagttctcatttttctgtaacagctctcagagtattccccattcccaagtctttgtctcccccaaaattaccatctagaatttatgatgactcaggttacctgtgagtcactttgcccaacttaggttttgttctctattgtttttttttagttcaaatattatcatacacattaacatttctaaacaattacaattatcccgccttccatcagacattagcatggtcctttctcctagcattatgagggggtgtcttagaatccatagttatccaattggctgtgattaatgactactttttaaaagaaaacactgtgggtttattttagctataagtaggcagtctttaggacttgtaacagcaaataaataattgcagtttgaagtataggagacaagaaaaatctttgttcatttctttgtttgtttgagctgtcccattactttccacagtgtcagaaatctcttgttttctgtgcacatgtgagactattttaatgttaccgttgttaatagcagaactcatattttgatgtggcatgaatagcggaagatagttcattttatgatatttttcaggttcttgaccttaggtgaaatacaaaggtcagtaatctctgaattataaagtaggatatatgtgatctctatttatttgtcttattttatgggatgatggaggaagaccctaagaagtttctacttccatttcaaagtgcctggcagaatacctgataggttgctcaagtgggaatgtggcatgaagttataatttcactctactcaggatggttaggtgttagtagaaaaaaaaaaaaaaaaaaaaggccaca

SEQ ID NO: 2644 - DNA, 705 bp, Macaca Fascicularis
  misc_feature (1)...(705): n = A,T,C or G
agacgtggctcactcggatctcatcgtgcacgtgcgggacgtgagccaccccgaggtggagcnnnnnnnnnnnagcgttctgtccacactgcacagcctgcagctgcccgccccgctcctggactccatggtggaggttcacaacaaggtggacctcgtgcccgggtacagccccacggaaccgaacgccgtgcccgtgtctgccctgctgggccacgggctccaggagctgaaggctgagctcgatgcggccgttttgaaggcgaccgggagacagatcctcactctccgcgtgaggctcgccggggcccannnnnnnnnnnnnnnnnaggagnnnnnnnnnnnnnnnntggacgtgatccctgaggacggggcggccgatgtgacggtcatcatcagcgactcggcctacggcaaattccggaagctctttccaggatgaacggacccccgcggagggctggggagctgtggcgttgctgctgtgtgtcgggtgcagccgggtgtcgggtacagccgggtgccccctcgctggctctgggcccgcctcgttcccagccgtttgctgggatgaacgcgcaggctggtgtcacggccacggcgccccaaagggggtctcgcccgagcgtccactccacacgattccagcgggccctcggtgcnnnnnnnnnnnnnnntcccctcggaatgtttccgtagcaggac

SEQ ID NO: 2645 - DNA, 613 bp, Macaca Fascicularis
  misc_feature (1)...(613): n = A,T,C or G
tgtaggctatgagacttcctcattgttttctaagtaaacttcactactggtaattaaggggaaggatatgaggaagcagtttaaatagccctgttctcattactcttaccacatacatagggtgctaaagttgatgaacacattaatccgttaagtaaaatggtctttgtaattgtacggcgtatctaagaaactcagaaggtgcatttaggagaaagacctgaaagacagaaatagtatggattcttatgtagaggactacaaaattcttgtctctactattacaaccaaaaaacaaatatttcatgtatgtcctataaaaatatcagtgtaattcttatgaaacaggctggtagaggaggtttctgagcctagcccaagggcttattcnnnnnnnnnnnnnnnnnnnnnnnnctcacttaattaagtaaaatattttcccagctagaaaagtgtactcattctcatttaaactctcatttggagggatcatgtgagttggcctacttacaagtagtgaaagttccctttttggtttagttttttttttttttttctctttcacgcagccaaatgtgaaagttgtgaatttaggaaaatcacttataatgac

SEQ ID NO: 2646 - DNA, 377 bp, Macaca Fascicularis
gcctgggagaggtgtcagttcagttccgggttgaagaggcccgtgcacacagcatgttggggacccagcctaaagttcttgtcacctcctcatgcaaagccagccatcactctccggccagatcccccaaacctcaaggtggccccttgaccagcccctccttggggcctccaggaggactgagcacccctcccagcggcatccccttgccctccacagggctgccaggggcacgtcgcaggggcaccgtggactgaaaccagcccctggagacagaacgacccgtttgttggaaactgcctgagttgccagaggaactccccaggcatcttggaaagaaagtaatgtgacgttccagcgctgaactggccacagga

SEQ ID NO: 2647 - DNA, 1841 bp, Macaca Fascicularis
tttccaaggttttgcaccaagagtagctgtccgggtctctggctatctcccgtcccaacttctttttcttccctttacggccgagagggatcactgggtgctacaccgctggggcgtcccaggcaggagaggcttcgctctcagaagcgccccggggtcatccacaactcccacgaaaggagcttcccaagaggagtttgttttacccggaatgggctgctggaattaatagattacagaaagtaaacttttgcccattgtttattgtgctttttttaaccaaagcttgcatttgtgcttcgcccggtctattccagcacagcgctgctctgccttttcaagtgcggggcagagaattgctgaggatttctcccctctggagcttcgcgaatatctatggcttgctacctgctagcggaaaacgcaaagttgcccagctaggagatggcgccaggttcctttgctctggcgctgggtgcaccgctccgccacccactgccaccgtctccatcgagaatctcctcaaaatcaagggagtccttgactgtgcctcttcaagttggaaggcggttgactttgccgggaacctagtacgtgagcgccaaacgtggagtcgcagagcgcagaagtgaagatttaatacaaaagatgaaacttgtaggatgacctctagcagcgctactcgcagctctgaaatcgatccggagcattccaaggtgagcgttgcggctcccagggattgcggaccggtaacttcaggcgcaagtctgaatttcagggatgaacctgctctggattctgtttgagccagcggaggcactgacaggggctgtgggtttaggggtaatggatccatggaggctgccacttacttgaagcgagcagacagttggcaataccttccccctaacttgctgcgctgctcaaggctgctcacagacccacgcgtaaggatttagagtgtatatgtccaacgcccagacttgacttctggtgcaattaaggaagagcttgaagctaaaccgcacagcttgcatgaagaagtgaataatgaaatcggtggtgagatgctaaggaataaaaagaggcattttgttgcgtgtatattagtttgccaggattgagtttttaggtttgatgttctaaaatgtatcttcgacacagactcttttgcagcctttcaagaggaggatgttcggcagtgttttggaacctgattgcatcaatgccggagatcaaaacatataaaggatgcagatgacacaaagctgggagacattgccaataaaaacaaagatagaatccagaatgaaaatgatttggtaatctcttcattcctattgaaattcaacaggaatttaaagcccagcctgtatgctaaaaacatcaaacacatagagaagaaatgccttggcaactctttcacaggaggggacatctgtgtttatactgatcgatgatgtgataatgttacaacacatttaatatagtcttaaattgtttcaaaagaaacacggattcaggtttacatgaagtaatagattcagaaaatatgctgctactcagacagtatctgaattgttttgttaaattatctgttatatttttgggtgtatagtgtcaaaatctgtctctgcagagaaagctagccagcattgcatgagaatctaaatatcatgtcatatatggaatagttgaagagtctctttcaccattacaaataacatgacacatgcactaattttgtgaaatatgaatatgtaaagattccatggttgaataaaagctaatcaaaaaaaaaaaaaaaaaaaaaaaaaaaaaaaaaaaaaaaaaaaaaaaaa

SEQ ID NO: 2648 - DNA, 694 bp, Macaca Fascicularis
gaccacagccacccccggagaaggcctggtcccccgcaactgtgagctgtcttgcccaaacccgctctgaacacagccactggctgccacctgatgcgtacctcccagagacggggcagtggagaagccctgaacccaagtgggcctgtgacaggaactaagacttaaaaaattaggtgcttacctgggacaggaagctctgtctggcacaagcaggtaaccaggatggctaacaggcttcgacagctgctcgtgaactaaaacagcagtatgtgtgcaggctcctcctctagggtcaggcagcaggctgtgaaggctgatcctacactgtcccagtgactcccctttacagagtgcccctaccccctaacagccaacagggttagcatggccagcacagatcgctgcttttattgatgcaaatcaagcctaccgcttctcctacctgcagacttagccaaggaactctaagatgcatgactgggacaagaaaaggtgagactccacatgaaaatgccttgccttaaaccctgaatgactgtgagatgcgatctgggagtgcatctgtcaagtcttttgtgttttcttcactaacctcagaatactgggctctgttttatcaagcgctgcagtttatgcctctgtcccctgtcaatgctcagcttctgcaacaggacaccgcgggcaagagagt

SEQ ID NO: 2649 - DNA, 753 bp, Macaca Fascicularis
  misc_feature (1)...(753): n = A,T,C or G
cagacagaaagagacattccaannnctgatnnnnntacaaagaatggcagcgacacatnnncagatagcncggacagnncctgcagttcgcctcccgnnngccaggacaccgaggatgtggattacacacaagtcatcttttcggcccctgaagaactaaaaaaatgactccgccctggactatgagaacataaaggaaatcacagattatgtcaatgtcaatccagaaagccacaagcccaatttctggtattttgtcaaccctgctctgtctgagccagcggaatacaatcaagtgaccatgtgaattccagatatttttaatggggtccagttctctacagattcttacatttaatttgtagggaaatgccatttttcccccttaaacaaggcatagggctcacaaatctatggaaacaggccaaaaagaatgtggaaaagaaagctgacaaacacacagaggtcctcaagacccttggactcctggtctgtacccaataaaggctgtttattcctcaaaaacaaaaacaagacttgggtatgaaaacaggcctatgccccggcaagaaagattccgatcagatgttaggaagaactttcaggtaaagtatgagaaccatggagtccattagcagagacagtgctgaagtctctccccagggaaaattttaaaaaggtttaatcagctgttgtagagttctatttggcaatctcatggttaaatgacttctctttgagctctttaattat

SEQ ID NO: 2650 - DNA, 702 bp, Macaca Fascicularis
gaaactgctttgtgagcaaagtgcttggcaagacaaggtctccttcagcagggctgggtgcacaacagcccctttccccgtgtcccattgatctgagctgtgtagcacttgttgcattacaaggaaaaagacttctgcaggaaatagggtagagaagaggctctctagtcagatgcaacttgatctgtggcaaaaccaagtggggtctttcagcttcagtgtgtgagcatcccagcacctgggatggggtttgtgggaaagttggttttgccacactgtaggacccaggaggtcccattgccacagtgaagccaaattctagcccaagtctggcagagcagttgggcagctagttttttggggagaatgatgtggtgggacagaggacctcagtggcctattacagagccctctttcccagactaaattcatagctgagagcttgggggtatagtagagttaaaattttaagtaattttctaaattctgtatttgggtattaatgtctaaatggtaatttgacaatagtttataaagtgatgttttgaataccataaattacgtgtaggactgtgatggtgcatttatataagttttattattgaggttgatgtgcacataatacgtcaatgtatatttttatagagtgaggtctgtcttgcaaaaggagacaacatgatcaccttgcctttgtttatttgt

SEQ ID NO: 2651 - DNA, 737 bp, Macaca Fascicularis
  misc_feature (1)...(737): n = A,T,C or G
agtagacttaaactttgagtgttnnnnncnnnnnnnnnnnnnnnttccctgggtgaccanctagcacccattttgagaaaactggttctacatggggggatagctgtggaatagatgattagctgcatgttaattctcgagaactaagcctgnnnnnnngctttcctaagcagtatacctttaatcagaactcattcccagagcctggatgctattacacatgcttttaagaaatgtcaatgtgtgtccttttataactctaccactttggagcaagctattccagcattggttttgaatgctgtatnnnnnnnnnnnnnnnnncacgtacgctgcactgttcttagagtgtttccatacttaccaccgatctacaagggttgatccctgtttttaccatcaccctatggtacaacacttgaaaggaaagaccccgctagaggcactaatgaacttcaggatccactagacagttttcagtttgcttggaggtagctgggtaatcaaaaacgtttagtcactgattcaatgtgaactattaaggcctttatgaccaagagtctgaaaaatcttatgctgtttagtatttgtttgatattgttacttttcacctgttgagcccaaattcaggattgattcaatggtggcaataaagttgccatttaaatttgttcatagcctacaacaccaaggtctctgtgtcaaacctgggccactctatatgcactttgttactc

SEQ ID NO: 2652 - DNA, 772 bp, Macaca Fascicularis
  misc_feature (1)...(772): n = A,T,C or G
aatcctttgaaatgggctcactgtcatagctctgtcttgtcactaagcttactaagaagggcgtctatttgagaatacttaactcacttttttggttaaaatttgtatatatgtgtagtgtagatatttacaaaatgcagagagacaataatttaagtattttcttctagttgttttctctgtaatttaaatataaataggatttttctgtttatataatcctatgccctgttttgtaaagtaaatatatctgaataagtagtttgctatctttagaggaaagaatatggtcctgtttgccatgagagctggactgtagctgggtatttaacttgcatttttctcttaaaaaaagatttgtaaagaccctttagatcaagaatgatataataataatagcgattattaataacaatagtagatcaagaaagcctaatcaggactgatattaatttctgtcttctttctgcctgcttctctctccctttggttattgagaggaatgtcatcatgaagctgagggcggtggtgtgacagctggaggtggtaacttgtaataacttgtaatgtggtctagtcaggactgaatactgtgttcttttacacttagtggtaccctaaatcccaagccatcatcgtctctaccattatcagacttttacatttggacaatgctttctatcaaaaagaccaagcnnnacaaaacaatgtattctcatctgagctgtgcacnnatattattctattttagnnntgattaaattgctgnnnt

SEQ ID NO: 2653 - DNA, 741 bp, Macaca Fascicularis
  misc_feature (1)...(741): n = A,T,C or G
atgctccaaggaggntgatgnnnnnnngatgaagtggcacagtcagcttccctaggggccggtgtcatgttgggctcctggggcgggagcacgggctggcatttcatgcactgctgcccctccaggtccacctgtctccactctcacagcctccgagtctgtggcccttcccttctgtcctcctccgaggggcctgccttctctcgtgtccagtgaggtgctcaatgatcggcttaacttagggaaggcccctccccttcccgtctatcccaagagggtctgctgtgagcctgcgttcctaggtggcggggcctcagctgcctgggttgtggccgcgccagcatcctgnnnnnnnnnnnnnnnnnnnnnnnnnnnnnctgctccgggccaagtttctggttgattaacgagggcatcgggtggtccctcgagaccttcccctaccttttgtggaaccagtgattcctcaaagagagtgtcccctccacagctgggtgccaggggccggggatcctcagtgtagctggtgaaccctgataccaggagcccgggcctccctgaacccctggcttccagccagataatagccagcctcctcctggacctcttggcccccagccccttccccacacagccccagaagggtcccagagctgaccccactccaggtcccagcccctcagtctcatctggagcccctgaaggcctgtcccacccacatttctggcctcatctgacact

SEQ ID NO: 2654 - DNA, 3156 bp, Macaca Fascicularis
ttttgggatggtaaggagtatgacaatctaccagaagctttccctattactttagaatggggtggaagagtggtcagagagacagtatattggttccagtatgaaagtgattcatctttgaatagtaatgtttacgatgttgcaatgaaacttgttaccaagcactttccaggtgaatttgggagtgaaatcctagttcagaaagttgtccacactatattgcatcagactgccaaaaagaatcccgatgattatactcctgtaaatatagatggtgctcatgcccaaagagttggagatgttcaaggacaagaatcagagtctcagctcccaactaaaattattcttaccggacagaaaacaaaaactttgcacaaggaggagttaaacatgagtaaaactgaaagaactattcaacagaatattacggaacaggcttctgtaatgcagaaacggaaaacagagaagttaaaacaagaacaaaaagggcaacccaggactgtttctcccagtaccattcgtgatggtccatcctctgcacctgctacacctaccaaggctccctattcacctacaaccttttttgaacttcaggaaagtatagccagagagttcaacattcctccatatttacagtgtattcgatacgggtttcctcctaaagagttaatgccaccacaggcaggaatggaaaaggaaccagttcctttacagcacggcgacagaattacaatagaaattctaaaaagtaaagctgaaggtggtcagtctgctgcagcacactcagcccacactgtgaaacaagaagatattgctgttactggtaaactgtcatctaaggaacttcaggagcaagctgaaaaagaaatgtactccttgtgtcttttagcaacattaatgggagaagatgtatggtcttatgcaaagggacttcctcacatgtttcagcagggtggtgtattctacagtattatgaagaaaaccatgggaatggctgatggcaagcattgtacttttccacatctgcctggcaaaacctttgtctataatgcttctgaagatagactggaattgtgtgtggatgctgcaggacatttccccattggtcctgatgttgaagatttagttaaagaggctgtaagtcaggttcgagcagaggctactacaagaagtagggaatcaagtccctcacatgggctattaaaactaggtagtggtggagtagtaaaaaagaaatctgagcaacttcataacgtaactgcctttcagggaaaagggcattctttaggaactgcatctggtaacccacaccttgatccaggagctagggaaacttcagttgtaagaaagcataacacagggacagactttagtaatagttccactaaaacagagccttctgtattcacagcttcctctagtaatagtgagcttattcgaatagctcctggagtagtaacaatgagagacggcaggcagcttgatcctgatttggttgaggcccagcgaaaaaaattgcaggaaatggtttcttctattcaggcttcaatggacaggcacttgcgggatcaaagtacagagcagtcaccatctgatcttcctcaaaggaaaatagaagttgtgagttcttctgcaaagtctgggagtcttcagactggcttgcctgaatcttttcctttaactggtggtactgaaaatttgaatacagaaacaactgatggctgtgtagcagatgcactgggagcagcctttgccacaaggtcaaaagcacaaaggggaaattccgtggaggagcttgaagagatggatagtcaagatgctgagatgactaacacaactgagccaatggatcactcttgatttaattagaggctaataaaggcagaatgtttattgtgaatatgtaatatttgttggctgggccacgtaacttgattagtcattaaaaatcttgtacgtatgtaattcaaagattatatcttgttattcagtgcatgatagcaagtgtgtgattggccatagcttttaatatactgctgcccaggctggctctgaatttctataaattagctattagatctgctgagatgactttcttccatgtatgtggttcattggaagttctttgtaattttaattccacaaaagtgttaatgtttccaacaagaaaattgtcttactaaatatgtttgatttctgaaaaggctagaaatggaggggaaatgagattttgctaatgttgatgtcatcaaggtaaccatctcacatactagtgtcaaaaggtttacgtaaacttgaattttatctggactaaattgtatcttaaaattcatacaattatttattagacagtgggatgcaagtgtttccatgaacgtaaatacattcatagagatttcttggcgaaaatgtcttgagaatagaatgtaatgatataacattttgctgatttgtgcaaggttggggaaaaatctcttctagattgatgaggtcaatgtgattcagttgtgttgctgtctgagtcaacacagccaattgtgtgtgtgcgttattaatatgttaccattatttttgattcctggcttggtcaagaaccacctgatttttttttttttttaatcttgcagaaaagttgattgcaaagtgtggtagaaaaagaaataatggtagcagtagagaatttataaataagagtttatctttatgaatgagttaattgttctacaattttgatcagtggtatttaagcctgtatatgctaagtgtatttacgcccctttgagccaaaatgttttcttttctttttttcttagaatccataagtttctgtatttgttggcttcacttgggtttagatgcaaattttactgcatcacaccctgatcagctgggtgtttgcttagtgtattcatcaaatctttagtgccagtttccttgagaagcagctttcatgcttattccttaaaaacaacaaaagagtgtttatcctgagattggtattgcactattttattttattctgcaaatctgtattctgaaatgtacatttcaacccatatttttcctctgttcactgaaattaagttgaatttgaatggctgaaagacaaaatgtatgttaatacaatctcttacctagaaaaaaaaaaaaaaaaaa

SEQ ID NO: 2655 - DNA, 631 bp, Macaca Fascicularis
tactggcattgagatgtctgggaacctttctacaaattcaggttctttcgggttgagggaaggctggcctgcactatgttttgaggctctggctttgtggatttgccatgaaagtaagctgaaactctagttccctcactttcagggatcccttcaagaccaagcacctaattttatctttgtaattttgaattattcttctgaagagggaccctgcacatgtgtgagcctcaggcccaacaaatctggattgacccctggttccagcaaccctcatcttggagacttctgtatggacacagggaagacagaacccagcactgccaagggtggtggatctcccattttgatgtgagtgaaaaccacctgaaggtggagggtgtgaaacctgggagcttgctttggttggtccgaggggggttggtaatctgtacgccaaggcactgggtgattctgtgccgtaatcacccaaagcctggaagcctcaagtgagaattgtgcccaaacttcctgaagcggttcctctgcgaagcccatagttcccaagtgtggccccatcccaggagcctcttaggttgaaggaacagctattaataaatcactgacttttcaaaaaaaaaaaaaaaaaaaa

SEQ ID NO: 2656 - DNA, 715 bp, Macaca Fascicularis
  misc_feature (1)...(715): n = A,T,C or G
ccatatcatagtatttcatagtattatatttgatatgagtgtctatnnnnnnnnnnnnnnnnnnaatttcattcctaccagttaagtagttttctgaatggccagaagaccattctaaattcatgatactactataagttggtaaacaaccatacttttatcctcatttttatttttagtaagaaagaagtccattctcctccccttgcccaagtatgaaatatagggacagtatgtatggtgtggtctcatttgtttagaaaaccacttacgactgannnnnnnnnnnnnnnnnnnnnnnnnnnnnnnnnnnnnnnnnnnnnnnnnnnnnnnnnnnnnnnnnnnnnnnnnnnnnnnnnnnnnnnnnnnnnnnnnnnnnnnnnnnnnnnnnnnnnnnnnnnnnnnnnnnnnnnnnnnnnnnnnnnnnnnnnnnnnnnnnnnnnnnnnnnnnnnnnnnnnnnnnnnnnnnnnnnnnnnnnnnnnnnnnnnnnnnnnnnnnnnnnnnnnnnnnnnnnnnnnnnnnnnnnnnnnnnnnnnnnnnnnnnnnnnnnnncaaaacaaaaaacaaaaccacttacatttctagctacattaagaatttnnnnnnnnnnnnnnnnncttgcttgtggtaaccgtttatcatatcagaaagtatatgtataccaaaacatgttgaacatccatgttgtacaactgaaatatacataattttaat

SEQ ID NO: 2657 - DNA, 2582 bp, Macaca Fascicularis
gattcattcaaaaggcgcgcaggctgcgctgcttcactggcgctagccgagccgggccggggcgccgagtcgaacggggagccgagctggagctgccgcggcgcggccaggccagcgaccaccaggggcctcaggatgaaaccaagtctgctgtgccggcccctgtcctgcttccttatgctgctgccctggcctctggccaccctgacatcaacaaccctttggcagtgcccacctggagaggagcctgacctgaacccaggtcagggcacattatgcaggccctgccccccaggcaccttctcagctgcatggggctccagcccatgtcagccccatgcccgctgcagccttcagaggaggctggaggcccaggtgggcacggcaactcaagatacactctgtggagactgctggcctgggtggtttgggccttggggggttccccgtgttccatgtcaaccgtgttcctgggcacctctgggtattcacggctgtgatgagtggggtcggcgggcccgacgtggcgtggaggtggcagcaggggccagcagcggtggtgagacacggcagcctgggaatggcacccgggcaggtggcccagaggagacggccgcccagtacgcggtcatcgccatcgtgcctgtcttctgcctcatggggctgttgggcatcctggtgtgcaacctcctcaagcggaagggctaccactgcacggcgcacaaggaggtcgggcccggccctggaggtggaggcagtggaatcaaccctgcctaccggactgaggatgtcaatgaggacaccattggggtcctggtgcgcctgatcacagagaagaaagagaatgctgcggccctggaggagctgctgaaagagtaccacagcaaacagctggtgcagacgagccacaggcctgtgtccaagctgccgccagcgcccccgaacgtgccgcacatctgcccgcaccgccaccacctccacaccgtgcagggcctggcctcgctctctggcccctgctgctcccgttgtagccagaagaagtggcctgaggtgctgctgtcccctgaggctgtagctgccactacttctgctcccagctttctgcctaacccgaccagggtccccaaggccggggccaaggcagggcgccagggcgagatcaccatcttatctgtgggcaggttccgcgtggctcgaattcctgagcaacggacaggttcaatggtgtctgaggtgaagaccatcacggaggctgggccctcggcgggtgatctccctgactccccacaacctggcctccccgctgagcagcaggcactgctaggaagtggcggaagccatactaagtggctgaagcccccagcagagaacaagaccgaggagaaccgctacgtggtccgcctaagtgagagcaacctggtcatctgaggggcggtctagtctgaggacactgcggccctgccctgggaggttccgaaggcttcctggaggaggtggagctgcagctgggactgtgaggaccgagaagcaatggcccagcagacaagacagcaaagacctaggcctggaggtgggagtgtccgccccagtgaggaggcaggtggcggcgggcactgtgtacaggagcacactgagccctgccccggccctgctgccaggttgctcccctgcaggatgccccgacccccgtgcttgccctggctggatcctaggagcccacgggattctctgtatcatcagagggctgggcttggcagaggggaggggcccgtgccatcacccctggccccattccttggtaattagccacacccttgcctctgtacagggccctagagcagatgtgcctccccctcctcttccagcaggtctataaagggaaggggcaacagaaagtcctgggctaggagaatgaatccctgggttctaatcttgggcacgtctgtggccatcgctgggtccacttttctgactgtgaagtagggagagacgttctcagtacccagggcctcttcagctctttgtgggttctgggctgggttgtggggggctggggagctgggctctaccatccctcctattagtagctttatccagccccgtttttgctgcttccagggcctctgccttctagaccccaacagggctgtccatccatggctctgctacagaaggggcttaatgcatgtgcctgcccctcccccagctttttaaaatgaaaccgaaaaaaacagacttgatcccggcaggactatgatacagagccctagcctgcccagccggccccaagatctcaggagctttaaggagaagagtgttggtggggctggagcacaccttgggcctcagtggtttctgcgtccctgtggtgccagtgcttctgggcagtgcaggtagctgccaggcccagccctgacctccactgtggctcagcaacctggttatttatgtggggccgtgcaggcatgggccccgctgcctgaccgtcctgtttctcttatttattgaaacttgccgttgccctatccttgtgtctccatccccttccatgtgttgaataataaaaggtgggaaaggcaaaa

SEQ ID NO: 2658 - DNA, 692 bp, Macaca Fascicularis
caaaagctctcctgtgtcataaccatggctgccttcttgatattgatgagccctattcctcctcaaattacaatgcttatgtttttggccattagtctgaggtgtcatctttcctcatgcctcatgctccctctgaaagagtgtaactctaagctacaagttcacttttcctttatacaatcattctcaaacctctctgtccagtacagtttcctctcatgggctccaagcctatatgatcaaatgcctactaacaggtcattagtctttaagaaaatgcaaatgaaaaccaaaataatatgtcattacacacctcttagaagtacacagtttgagaagttttggcaaatgtttacatcaatgaaaccatcaccacaatcaggataaggaatcccagagattttctcgttcccctttgtaatctcccctttcgtcccctcttatgtcactgccctcatttacaagcaaccactaatctacttagtttgcattttccagaattttgtataaatggaatcatacagaatgtacttttctttagtctggcttctttcagtcagcatagctattttgagattcatacacatgtaacatgtgttagtagtttatccttttttcttgctgagtagtattccactgtataaattgactacagtttgtttatccattcacttcttgagtaatatctgatt

SEQ ID NO: 2659 - DNA, 697 bp, Macaca Fascicularis
  misc_feature (1)...(697): n = A,T,C or G
cagctgaggcggnnnnnnnnnnnnnacacggcgcccnnnnnncgcnnnnngggccgcaagagtccttcgtcnnntacagctccaccccggctttgggacactgggggtggtctgttaccctcagctttggacaccccgttttccgaggcgtggaagagcgtcgccctggagtaagccgcccgtgccgcgccccggcagcctccctcagtcccgagccgccccttgttccggatcccggccccaactttggccacagagcctctcattcaaatccctccctgctgtcaaggggtctccccttcccccaaggtggctcccgcgagcctctaatgccctgacttcttccaannnnnnnnnnggcccccttagtctcaggtcagccaaaaactttaatnnnnnnnnnnnnnnnngattggttccacaggccttttaaaaagcggacttaaaannnnnnnnnnnnnnnnnccttttcgtcagagtcgagggcaaacnnnnnnnnnnntgggtgacccgtgnnnnnnnnnnnnnnnnnnnnnnnnnnnnnnnnnnnnnnnactagttcggcaggaaatttgttggaagatgaagaagctaagataggaggttggtgacttccacaggaaaagttctggaggagtnnnnnnnnnnnnnnnnnnnttcctttatatgtgggaattgaaatgactagcattattga

SEQ ID NO: 2660 - DNA, 724 bp, Macaca Fascicularis
  misc_feature (1)...(724): n = A,T,C or G
tctgacgnnnntggcnnntcgctgaacgcgggagactcagccgtctgctctgagcccggagcatctgaggcagccgcgcccacccgcgaggtgcaggaggtacacggcccctgacgctcccaggcagcgcagacagagggatccgtaagtggcttccgcgcttgttaccatttgcatactctaaggtatttcatggattgagtgaaatacctgacggggcctgtatccgttccctattgccgcaataaccagtgaccacaaactttnnnnnnnnnnnnnnnncaaatatatcatcttgcatttattgtctcgcggttctgtaggtcagaagtactactgggtgtaaccttagctgcactcctttctggagactccacaggaccatccttagcttgccttcgccagcttctgtcaacattcgttgcctttggccccttcctgcatcttcaaagccagtgacgtgccatctccgacccttccatcctcaagtctaccgctgatggcagctggannnnnnnnnnnnnnnnnnnnnnnnnnnnnnnnnnnnnnnnncccatttccaggcctctgcccttgatcacatcagcggaatccttttgccattggctagaagtgaccccaggattttttttattatcaagagagactagaagaatcatgagacttttcctagtcgcctttcaagaatatgaagaaaaaaatggttctcaaagtgggttaaatg

SEQ ID NO: 2661 - DNA, 760 bp, Macaca Fascicularis
  misc_feature (1)...(760): n = A,T,C or G
gcagggttnnnnnnnnaggnnannnataaaatcaatagcactgaatgataatttttttaatgatggtcatatattttattaatgatatctgaaagttgcttaaccattagaaattagaattatttaagggttggagtacgatgatttcatcaaatgtttgaatatttaaataatttttatgtaaccataattaaaccaaattagtctttttttcttcatacttttctttggtagtgcagaaataacataggggcatatnnnnnnnnnnnnnnnnnnnnnnnnnnnnnnnnnnnnnnnnnnnnnnnnnnnnnnnnnnnnnnnnnnnnnnnnnnnnnnnnnnnnttgaagttcaaaatgaggaaacatacaaaatcctcagccattnnnnnnnnnnnnnnnnnnntttatactcctgtaagctgtaattagtcacaagacaaagtatatagtaatactttgtaatgaagtaacattttctgcccacattaattttactaaagacctaaattgttaaaattagttggcagtctctagattatgctaagtaagtgttttgaaattaaagaccttaaacnnnnnnnnnnnnnnnnnnnnnattctagctctgttttaaattgaatcctaattttcaaaccactgctaccccagattcatacctgtttttgnnnnnnnnnnnnnnnnnnnnaaaattgacagtaggtaatagttcatttactgattggacaaaggnnnttctggttttaactgacttttccattaa

(The sequence listing continues in the following parts.)

1. A nucleotide array for detecting changes in gene expression upon administration of a therapeutic agent comprising a plurality of polynucleotide probes complementary to, or fragments of, Cynomolgus monkey genes, wherein each polynucleotide probe is immobilized to a discrete and known spot on a solid support.

2. The nucleotide array of claim 1, wherein said polynucleotide probes are complementary to, or fragments of, any portion of an ortholog of a human gene.

3. The nucleotide array of claim 2, wherein said polynucleotide probes are complementary to, or fragments of, any portion of a homolog to a human Tox gene.

4. The nucleotide array of claim 1, wherein said polynucleotide probes are complementary to, or fragments of, any portion of any of SEQ ID NOS. 1-8881 or SEQ ID NOS. 9187-18598.

5-6. (canceled)

7. The nucleotide array of claim 1, wherein said polynucleotide probes are any of SEQ ID NOS. 8882-9186.

8. The nucleotide array of claim 1, wherein said nucleotide array additionally comprises at least one polynucleotide probe complementary to, or a fragment of, any portion of any human gene.

9-10. (canceled)

11. The nucleotide array of claim 2, wherein said nucleotide array additionally comprises at least one polynucleotide probe complementary to, or a fragment of, any portion of any human gene.

12-13. (canceled)

14. The nucleotide array of claim 3, wherein said nucleotide array additionally comprises at least one polynucleotide probe complementary to, or a fragment of, any portion of any human gene.

15-16. (canceled)

17. The nucleotide array of claim 4, wherein said nucleotide array additionally comprises at least one polynucleotide probe complementary to, or a fragment of, any portion of any human gene.

18. The nucleotide array of claim 17, wherein said polynucleotide probe from a human gene is complementary to, or a fragment of, any portion of any of SEQ ID NOS. 43450-48714.

19. The nucleotide array of claim 17, wherein said polynucleotide probe from a human gene is any of SEQ ID NOS 43226-48714.

20-25. (canceled)

26. The nucleotide array of claim 7, wherein said nucleotide array additionally comprises at least one polynucleotide probe complementary to, or a fragment of, any portion of any human gene.

27. The nucleotide array of claim 26, wherein said polynucleotide probe from a human gene is complementary to, or a fragment of, any portion of any of SEQ ID NOS. 43450-48714.

28. The nucleotide array of claim 26, wherein said polynucleotide probe from a human gene is any of SEQ ID NOS 43226-48714.

29. The nucleotide array of claim 1, wherein said nucleotide array additionally comprises at least one polynucleotide probe complementary to, or a fragment of, any portion of any Rhesus monkey gene.

30-32. (canceled)

33. The nucleotide array of claim 2, wherein said nucleotide array additionally comprises at least one polynucleotide probe complementary to, or a fragment of, any portion of any Rhesus monkey gene.

34-36. (canceled)

37. The nucleotide array of claim 3, wherein said nucleotide array additionally comprises at least one polynucleotide probe complementary to, or a fragment of, any portion of any Rhesus monkey gene.

38-40. (canceled)

41. The nucleotide array of claim 4, wherein said nucleotide array additionally comprises at least one polynucleotide probe complementary to, or a fragment of, any portion of any Rhesus monkey gene.

42. The nucleotide array of claim 41, wherein said polynucleotide probe from a Rhesus monkey gene is complementary to, or a fragment of, any portion of any of SEQ ID NOS. 18599-35840 or SEQ ID NOS. 36075-43225.

43. (canceled)

44. The nucleotide array of claim 41, wherein said polynucleotide probe from a Rhesus monkey gene is any of SEQ ID NOS 35841-36074.

45-52. (canceled)

53. The nucleotide array of claim 7, wherein said nucleotide array additionally comprises at least one polynucleotide probe complementary to, or a fragment of, any portion of any Rhesus monkey gene.

54. The nucleotide array of claim 53, wherein said polynucleotide probe from a Rhesus monkey gene is complementary to, or a fragment of, any portion of any of SEQ ID NOS. 18599-35840 or SEQ ID NOS. 36075-43225.

55. (canceled)

56. The nucleotide array of claim 53, wherein said polynucleotide probe from a Rhesus monkey gene is any of SEQ ID NOS 35841-36074.

57. The nucleotide array of claim 1, wherein said nucleotide array additionally comprises at least one polynucleotide probe complementary to, or a fragment of, any portion of a Rhesus monkey gene and at least one polynucleotide probe complementary to, or a fragment of, any portion of any human gene.

58. The nucleotide array of claim 2, wherein said nucleotide array additionally comprises at least one polynucleotide probe complementary to, or a fragment of, any portion of a Rhesus monkey gene and at least one polynucleotide probe complementary to, or a fragment of, any portion of any human gene.

59-64. (canceled)

65. The nucleotide array of claim 3, wherein said nucleotide array additionally comprises at least one polynucleotide probe complementary to, or a fragment of, any portion of a Rhesus monkey gene and at least one polynucleotide probe complementary to, or a fragment of, any portion of any human gene.

66-71. (canceled)

72. The nucleotide array of claim 4, wherein said nucleotide array additionally comprises at least one polynucleotide probe complementary to, or a fragment of, any portion of a Rhesus monkey gene and at least one polynucleotide probe complementary to, or a fragment of, any portion of any human gene.

73. The nucleotide array of claim 72, wherein said polynucleotide probe from a Rhesus monkey gene is complementary to, or a fragment of, any portion of any of SEQ ID NOS. 18599-35840 or SEQ ID NOS. 36075-43225 and said polynucleotide probe from a human gene is complementary to, or a fragment of, any portion of any of SEQ ID NOS. 43450-48714.

74. The nucleotide array of claim 72, wherein said polynucleotide probe from a Rhesus monkey gene is complementary to, or a fragment of, any portion of any of SEQ ID NOS. 18599-35840 or SEQ ID NOS. 36075-43225 and said polynucleotide probe from a human gene is any of SEQ ID NOS. 43226-48714.

75-76. (canceled)

77. The nucleotide array of claim 72, wherein said polynucleotide probe from a Rhesus monkey gene is any of SEQ ID NOS. 35841-36074 and said polynucleotide probe from a human gene is complementary to, or a fragment of, any portion of any of SEQ ID NOS. 43450-48714.

78. The nucleotide array of claim 72, wherein said polynucleotide probe from a Rhesus monkey gene is complementary to, or a fragment of, any portion of any of SEQ ID NOS. 35841-36074 and said polynucleotide probe from a human gene is any of SEQ ID NOS. 43226-48714.

79-92. (canceled)

93. The nucleotide array of claim 7, wherein said nucleotide array additionally comprises at least one polynucleotide probe complementary to, or a fragment of, any portion of a Rhesus monkey gene and at least one polynucleotide probe complementary to, or a fragment of, any portion of any human gene.

94. The nucleotide array of claim 93, wherein said polynucleotide probe from a Rhesus monkey gene is complementary to, or a fragment of, any portion of any of SEQ ID NOS. 18599-35840 or SEQ ID NOS. 36075-43225 and said polynucleotide probe from a human gene is complementary to, or a fragment of, any portion of any of SEQ ID NOS. 43450-48714.

95. The nucleotide array of claim 93, wherein said polynucleotide probe from a Rhesus monkey gene is complementary to, or a fragment of, any portion of any of SEQ ID NOS. 18599-35840 or SEQ ID NOS. 36075-43225 and said polynucleotide probe from a human gene is any of SEQ ID NOS. 43226-48714.

96-97. (canceled)

98. The nucleotide array of claim 93, wherein said polynucleotide probe from a Rhesus monkey gene is any of SEQ ID NOS. 35841-36074 and said polynucleotide probe from a human gene is complementary to, or a fragment of, any portion of any of SEQ ID NOS. 43450-48714.

99. The nucleotide array of claim 93, wherein said polynucleotide probe from a Rhesus monkey gene is any of SEQ ID NOS. 35841-36074 and said polynucleotide probe from a human gene is any of SEQ ID NOS. 43226-48714.

100-193. (canceled)
